United States Patent Application Publication US 2025/0074962 A1 - sequence listing, part 2

SEQ ID NO: 900 - DNA, 1817 bp, Homo sapiens
  source 1..1817: mol_type = genomic DNA
catgctgcctctgccaccttctctgccagaagataccatttcaactttaacacagcatgatcgaaacatacaaccaaacttctccccgatctgcggccactggactgcccatcagcatgaaaatttttatgtatttacttactgtttttcttatcacccagatgattgggtcagcactttttgctgtgtatcttcatagaaggttggacaagatagaagatgaaaggaatcttcatgaagattttgtattcatgaaaacgatacagagatgcaacacaggagaaagatccttatccttactgaactgtgaggagattaaaagccagtttgaaggctttgtgaaggatataatgttaaacaaagaggagacgaagaaagaaaacagctttgaaatgcaaaaaggtgatcagaatcctcaaattgcggcacatgtcataagtgaggccagcagtaaaacaacatctgtgttacagtgggctgaaaaaggatactacaccatgagcaacaacttggtaaccctggaaaatgggaaacagctgaccgttaaaagacaaggactctattatatctatgcccaagtcaccttctgttccaatcgggaagcttcgagtcaagctccatttatagccagcctctgcctaaagtcccccggtagattcgagagaatcttactcagagctgcaaatacccacagttccgccaaaccttgcgggcaacaatccattcacttgggaggagtatttgaattgcaaccaggtgcttcggtgtttgtcaatgtgactgatccaagccaagtgagccatggcactggcttcacgtcctttggcttactcaaactctgaacagtgtcaccttgcaggctgtggtggagctgacgctgggagtcttcataatacagcacagcggttaagcccaccccctgttaactgcctatttataaccctaggatcctccttatggagaactatttattatacactccaaggcatgtagaactgtaataagtgaattacaggtcacatgaaaccaaaacgggccctgctccataagagcttatatatctgaagcagcaaccccactgatgcagacatccagagagtcctatgaaaagacaaggccattatgcacaggttgaattctgagtaaacagcagataacttgccaagttcagttttgtttctttgcgtgcagtgtctttccatggataatgcatttgatttatcagtgaagatgcagaagggaaatggggagcctcagctcacattcagttatggttgactctgggttcctatggccttgttggagggggccaggctctagaacgtctaacacagtggagaaccgaaaccccccccccccccccgccaccctctcggacagttattcattctctttcaatctctctctctccatctctctctttcagtctctctctctcaacctctttcttccaatctctctttctcaatctctctgtttccctttgtcagtctcttccctcccccagtctctcttctcaatccccctttctaacacacacacacacacacacacacacacacacacacacacacacacacacacagagtcaggccgttgctagtcagttctcttctttccaccctgtccctatctctaccactatagatgagggtgaggagtagggagtgcagccctgagcctgcccactcctcattacgaaatgactgtatttaaaggaaatctattgtatctacctgcagtctccattgtttccagagtgaacttgtaattatcttgttatttattttttgaataataaagacctcttaacatta

SEQ ID NO: 901 - DNA, 1623 bp, Homo sapiens
  source 1..1623: mol_type = genomic DNA
tggtcctgccgcctggtctcacctcgctatggttcgtctgcctctgcagtgcgtcctctggggctgcttgctgaccgctgtccatccagaaccacccactgcatgcagagaaaaacagtacctaataaacagtcagtgctgttctttgtgccagccaggacagaaactggtgagtgactgcacagagttcactgaaacggaatgccttccttgcggtgaaagcgaattcctagacacctggaacagagagacacactgccaccagcacaaatactgcgaccccaacctagggcttcgggtccagcagaagggcacctcagaaacagacaccatctgcacctgtgaagaaggctggcactgtacgagtgaggcctgtgagagctgtgtcctgcaccgctcatgctcgcccggctttggggtcaagcagattgctacaggggtttctgataccatctgcgagccctgcccagtcggcttcttctccaatgtgtcatctgctttcgaaaaatgtcacccttggacaaggtccccaggatcggctgagagccctggtggtgatccccatcatcttcgggatcctgtttgccatcctcttggtgctggtctttatcaaaaaggtggccaagaagccaaccaataaggccccccaccccaagcaggaaccccaggagatcaattttcccgacgatcttcctggctccaacactgctgctccagtgcaggagactttacatggatgccaaccggtcacccaggaggatggcaaagagagtcgcatctcagtgcaggagagacagtgaggctgcacccacccaggagtgtggccacgtgggcaaacaggcagttggccagagagcctggtgctgctgctgctgtggcgtgagggtgaggggctggcactgactgggcatagctccccgcttctgcctgcacccctgcagtttgagacaggagacctggcactggatgcagaaacagttcaccttgaagaacctctcacttcaccctggagcccatccagtctcccaacttgtattaaagacagaggcagaagtttggtggtggtggtgttggggtatggtttagtaatatccaccagaccttccgatccagcagtttggtgcccagagaggcatcatggtggcttccctgcgcccaggaagccatatacacagatgcccattgcagcattgtttgtgatagtgaacaactggaagctgcttaactgtccatcagcaggagactggctaaataaaattagaatatatttatacaacagaatctcaaaaacactgttgagtaaggaaaaaaaggcatgctgctgaatgatgggtatggaactttttaaaaaagtacatgcttttatgtatgtatattgcctatggatatatgtataaatacaatatgcatcatatattgatataacaagggttctggaagggtacacagaaaacccacagctcgaagagtggtgacgtctggggtggggaagaagggtctgggggagggttggttaaagggagatttggctttcccataatgcttcatcatttttcccaaaaggagagtgaattcacataatgcttatgtaattaaaaaatcatcaaacatgtaaaaagaaaa

SEQ ID NO: 902 - DNA, 5815 bp, Homo sapiens
  source 1..5815: mol_type = genomic DNA
cctcgctatggttcgtctgcctctgcagtgcgtcctctggggctgcttgctgaccgctgtccatccagaaccacccactgcatgcagagaaaaacagtacctaataaacagtcagtgctgttctttgtgccagccaggacagaaactggtgagtgactgcacagagttcactgaaacggaatgccttccttgcggtgaaagcgaattcctagacacctggaacagagagacacactgccaccagcacaaatactgcgaccccaacctagggcttcgggtccagcagaagggcacctcagaaacagacaccatctgcacctgtgaagaaggctggcactgtacgagtgaggcctgtgagagctgtgtcctgcaccgctcatgctcgcccggctttggggtcaagcagattggtaagtggctcatctgggaatcagttttggagggggacagaggagcttagggcccaaggtgaggggctgggcagtgggcacttagccccagaggcagaggaagcagaggctccaacctatgtcggtatccccactggagtgagctgcagacgggaccttgttcattctgccttctgccatggggatctgcctttgaagggcaatgggagaagtcctcctggggactgcagctgtcgggggcagtaccacatcgggggaagagtgctcaaggcaggagctcttcccgtcctgcctggccactggctgccttgtgagccggacaggtggtccactgtgatggttaatgtccccctccccacccactcccagctacaggggtttctgataccatctgcgagccctgcccagtcggcttcttctccaatgtgtcatctgctttcgaaaaatgtcacccttggacaaggtataagcactcatcccttgtgtttcctgctctaagagtggcatggagctgcctccattctctccagccacctgtcctgtccctgctcccagaggtccacacacactcatgtacttgtgaagcatctgcagagtggcctcatggccaaccagacaggcacatttccacattttttttgcctgctgtctctttgaggtaatagacactgttgatctctcgcttcatgagagcctcctatcttgggggtattgggacacttattttagctttccttctgcccctcctgcttctcctcagttttcctcgtcttgctttcaccttacctggctttctagggctttctgggctctgggtgctcaccctgagggcctccctctcttacctccaactccaaacccacaccaggtcctgccactggctgtctacgtgttttgggaacttactgtctccactgttgtcactttagtttgggcctcatcactgtggtctgggtgatgccttttctgcctcctggcctccctgcctctgtctctcccctcctgctggttctgtctccatcctcttgccaacatgagcgttcgacagtttctttcaaatcatgacactctcctatttgagatgcttcctgtctctctgttggaactaagactccttagcatggcacccaaccttcctgttgcatttcctgctctctttcctgcatcgcatagcttcatgctacttgcaatcctctgaacacactgttcattctcttccatcaaactcatctgcctggaataccttaaacatgggccccaggccaggcgcggtggctcttgcctgtaatctcagcactttggatgccaaggcgggtggatcacttgaggtcaggagttcaagaccagccagcacaacatggtaaaaacccatctctactaaaaataccaaaaaattagctgggtgtggtggtgggcgcctgtaatcccagctcctcgggaggctgaggcaggagaatcacttgaacccggaaggtggagtttgcagtgagccaagatagcgccactgcactccagcctgggcaacagagcgacattctgtctcaaaaaaaaaaaaaaaaaaaaaaaagactaaagtacatggtttcttcaaagcttctctctctttctcccaccttagatgatttttcctttgcaatgtcctgtgtccattccgccccactcctcctggggccacctggaccaggtcttcatcatctcatatctatatgtttgctgtgtctcctggctggccactcttctgtaatttctcctcctctgagctctctgggcagctgaatcttctcactagtgaagtcgcctggttggatgctgatgagactgaccagctgaatccagttgaaaacttcacacttggcagtgatctggttctaaagacacaattttccatagtttcctaacaccatcctgcatgccacctgccttatttccccacatcacatcgtcccacttagcgggactgcactgctgatccaaattttacatcctttagggcccactcaggtcatatgtcctcagggaagtctttctggaagaaccttaaaccagaggttctcaacagggggcagttttgctccctgtggaacgtttgccaatgtctggacacatttcattcgtcacaaacggagagggggatgctacagggatctggcggatagaggccagggatgctgctgaacatctgcaatgcataggacagcccacccccacccccacacccccagtaaataatgatccagcccaagtgtcactggtgctgacgttgagtaaccctatcttaagctgaactcatcatctctccattccagccttggtggattctgtctcctctgaaccattcccatctcactttagcctacctagatcacaaagcttggcactcattatagactcccctatttattactccttcaagatgtgcaagaatcttttctctgcacttttaagttctgtaagaagagtctgtgtcgttcctataataaccagcataggacgttgcacgtgttgtgtgctcagtgaacctggatttgttgattgttgactgactcactctagagttggaaatcttatgcttggggaaacttaatatctctttctttctctgtgtgtgtgcatttgtgcacgtgtctgtgcatagctgtgagaccaaagacctggttgtgcaacaggcaggcacaaacaagactgatgttgtctgtggtgagtcctggacaatgggccctggagaaagcctaggaaggtgggaactgaagggggagatgaggcacacaggaacactggatgggaaaaaggggaggggaggcagtttgggggtgtggtatcacagctctgccacttatcttgggagtctgggcaaatcacttcccctctcttagcctcagtttcttcatctgtaaaatgggatgataacagcacttccttagtaggttttgattttagagtgagaaggttggcctacagtaaagatcagataatgtaaatcagtgaaaaaggtcaggggtaagaaaattacattctctttacctaacgctaaatgaccagttaatgggtgcagcacaccaacatggtacatgtatacatatgtaacaaacctgcacattatgcacatgtaccctaaagcttaaagtataataataataaaatttaaaaaaacgaaaaatacattctctttgctttttctcaaaatgtactttcctctttgtagggctgggactagaatgaggtgagcaaggcacttgccctcgggcgcaatatttaagaaggtgccataaaagtgtagtaatcaaggtaaattcattttgatgcaatatttttaaaaataaaaattaatgcaaagaaatccatgatgagcaagatagcaacattttaaataaagaacaggatccgaccctgtgtttgcatgaccctgcctcactcacctcaccctaatcctggccctggttccagtaaaaggaataggcagccagcctgcaggccgtagtttgctgacttggtgtccgcctgatgattttcaaaatatggcattaaaagaatgtttaccttgatgactgagtgttttggacatccttttcaattttgtcctgaaacaatttcatcccttgcctcacgctagtctccgccctgccttttggtctttcttttattttcccactttgaaaaaaaaattcggcatgagaaatactttacctttcccctccactcttctataccaaaagcaacatgcagacatgaatcatgctagacctcggcattgggcagagagcagggagtggcggggagcatggtgagcaggtggtgacagccactgccaccactcgcttctagatggttcccaggtggggaggctgccaactggaacccagtcttcccagtttgtaagagaaatcagatgtctaggtttgaatatgtgatctcccagtttaaaaatgtcggcaaatatttccaaacgttaagaaaatgttctggctcctttaaagacatctgccagccacatttccccaaggaccgcggtttgaaccttctgatgtagatgagctctgacattggaagattctggagtctgacaagtcacagcaggttgagggtagggagaaactgcaggtgaggggtgcatgctgaagtcctgatttctccaggtccccaggatcggctgagagccctggtggtgatccccatcatcttcgggatcctgtttgccatcctcttggtgctggtctttatcaaaaaggtggccaagaagccaaccaataaggtaggtcacccctgagaacccgggacagagttttgacaaactgggaagatggcctcacggttgcctatggggcagtaaaactgattcagagtctgtctctgcagccagtggggtggcagcagaattggggactgtcatccccacccaccatgctccttccatccagagctcaatcccccacagaactgcccctggcaccactggcagagcctaacactggctgttcttcactcctttcctggcattcaacgcgtggggagctgcatctttgggccttggggctgggtcaaatgggtgggagcaaatgtggcagccccttaagcccactggctcccactctggaagctcttcgtcgcccttggtgtggccagcagggggcaggaggcacccgaggaatcagcactgacccgccgtctgggaaaggggggagggcttggggaagggatccgcttcccagggaggggctcctcagaggcacagctgcccctgctgctgggggtgacctcacaccttgcctctccaggccccccaccccaagcaggaaccccaggagatcaattttcccgacgatcttcctggctccaacactgctgctccagtgcaggagactttacatggatgccaaccggtcacccaggaggatggcaaagagagtcgcatctcagtgcaggagagacagtgaggctgcacccacccaggagtgtggccacgtgggcaaacaggcagttggccagagagcctggtgctgctgctgctgtggcgtgagggtgaggggctggcactgactgggcatagctccccgcttctgcctgcacccctgcagtttgagacaggagacctggcactggatgcagaaacagttcaccttgaagaacctctcacttcaccctggagcccatccagtctcccaacttgtattaaagacagaggcagaagtttggtggtggtggtgttggggtatggtttagtaatatccaccagaccttccgatccagcagtttggtgcccagagaggcatcatggtggcttccctgcgcccaggaagccatatacacagatgcccattgcagcattgtttgtgatagtgaacaactggaagctgcttaactgtccatcagcaggagactggctaaataaaattagaatatatttatac

SEQ ID NO: 903 - DNA, 1729 bp, Homo sapiens
  source 1..1729: mol_type = genomic DNA
ggctggggcaggggagtcagcagaggcctcgctcgggcgcccagtggtcctgccgcctggtctcacctcgctatggttcgtctgcctctgcagtgcgtcctctggggctgcttgctgaccgctgtccatccagaaccacccactgcatgcagagaaaaacagtacctaataaacagtcagtgctgttctttgtgccagccaggacagaaactggtgagtgactgcacagagttcactgaaacggaatgccttccttgcggtgaaagcgaattcctagacacctggaacagagagacacactgccaccagcacaaatactgcgaccccaacctagggcttcgggtccagcagaagggcacctcagaaacagacaccatctgcacctgtgaagaaggctggcactgtacgagtgaggcctgtgagagctgtgtcctgcaccgctcatgctcgcccggctttggggtcaagcagattgctacaggggtttctgataccatctgcgagccctgcccagtcggcttcttctccaatgtgtcatctgctttcgaaaaatgtcacccttggacaagctgtgagaccaaagacctggttgtgcaacaggcaggcacaaacaagactgatgttgtctgtggtccccaggatcggctgagagccctggtggtgatccccatcatcttcgggatcctgtttgccatcctcttggtgctggtctttatcaaaaaggtggccaagaagccaaccaataaggccccccaccccaagcaggaaccccaggagatcaattttcccgacgatcttcctggctccaacactgctgctccagtgcaggagactttacatggatgccaaccggtcacccaggaggatggcaaagagagtcgcatctcagtgcaggagagacagtgaggctgcacccacccaggagtgtggccacgtgggcaaacaggcagttggccagagagcctggtgctgctgctgctgtggcgtgagggtgaggggctggcactgactgggcatagctccccgcttctgcctgcacccctgcagtttgagacaggagacctggcactggatgcagaaacagttcaccttgaagaacctctcacttcaccctggagcccatccagtctcccaacttgtattaaagacagaggcagaagtttggtggtggtggtgttggggtatggtttagtaatatccaccagaccttccgatccagcagtttggtgcccagagaggcatcatggtggcttccctgcgcccaggaagccatatacacagatgcccattgcagcattgtttgtgatagtgaacaactggaagctgcttaactgtccatcagcaggagactggctaaataaaattagaatatatttatacaacagaatctcaaaaacactgttgagtaaggaaaaaaaggcatgctgctgaatgatgggtatggaactttttaaaaaagtacatgcttttatgtatgtatattgcctatggatatatgtataaatacaatatgcatcatatattgatataacaagggttctggaagggtacacagaaaacccacagctcgaagagtggtgacgtctggggtggggaagaagggtctgggggagggttggttaaagggagatttggctttcccataatgcttcatcatttttcccaaaaggagagtgaattcacataatgcttatgtaattaaaaaatcatcaaacatgtaaaaagaaaa

SEQ ID NO: 904 - DNA, 4589 bp, Homo sapiens
  source 1..4589: mol_type = genomic DNA
gagaagaaagccagtgcgtctctgggcgcaggggccagtggggctcggaggcacaggcaccccgcgacactccaggttccccgacccacgtccctggcagccccgattatttacagcctcagcagagcacggggcgggggcagaggggcccgcccgggagggctgctacttcttaaaacctctgcgggctgcttagtcacagccccccttgcttgggtgtgtccttcgctcgctccctccctccgtcttaggtcactgttttcaacctcgaataaaaactgcagccaacttccgaggcagcctcattgcccagcggaccccagcctctgccaggttcggtccgccatcctcgtcccgtcctccgccggcccctgccccgcgcccagggatcctccagctcctttcgcccgcgccctccgttcgctccggacaccatggacaagttttggtggcacgcagcctggggactctgcctcgtgccgctgagcctggcgcagatcgatttgaatataacctgccgctttgcaggtgtattccacgtggagaaaaatggtcgctacagcatctctcggacggaggccgctgacctctgcaaggctttcaatagcaccttgcccacaatggcccagatggagaaagctctgagcatcggatttgagacctgcaggtatgggttcatagaagggcacgtggtgattccccggatccaccccaactccatctgtgcagcaaacaacacaggggtgtacatcctcacatccaacacctcccagtatgacacatattgcttcaatgcttcagctccacctgaagaagattgtacatcagtcacagacctgcccaatgcctttgatggaccaattaccataactattgttaaccgtgatggcacccgctatgtccagaaaggagaatacagaacgaatcctgaagacatctaccccagcaaccctactgatgatgacgtgagcagcggctcctccagtgaaaggagcagcacttcaggaggttacatcttttacaccttttctactgtacaccccatcccagacgaagacagtccctggatcaccgacagcacagacagaatccctgctaccagagaccaagacacattccaccccagtggggggtcccataccactcatggatctgaatcagatggacactcacatgggagtcaagaaggtggagcaaacacaacctctggtcctataaggacaccccaaattccagaatggctgatcatcttggcatccctcttggccttggctttgattcttgcagtttgcattgcagtcaacagtcgaagaaggtgtgggcagaagaaaaagctagtgatcaacagtggcaatggagctgtggaggacagaaagccaagtggactcaacggagaggccagcaagtctcaggaaatggtgcatttggtgaacaaggagtcgtcagaaactccagaccagtttatgacagctgatgagacaaggaacctgcagaatgtggacatgaagattggggtgtaacacctacaccattatcttggaaagaaacaaccgttggaaacataaccattacagggagctgggacacttaacagatgcaatgtgctactgattgtttcattgcgaatcttttttagcataaaattttctactctttttgttttttgtgttttgttctttaaagtcaggtccaatttgtaaaaacagcattgctttctgaaattagggcccaattaataatcagcaagaatttgatcgttccagttcccacttggaggcctttcatccctcgggtgtgctatggatggcttctaacaaaaactacacatatgtattcctgatcgccaacctttcccccaccagctaaggacatttcccagggttaatagggcctggtccctgggaggaaatttgaatgggtccattttgcccttccatagcctaatccctgggcattgctttccactgaggttgggggttggggtgtactagttacacatcttcaacagaccccctctagaaatttttcagatgcttctgggagacacccaaagggtgaagctatttatctgtagtaaactatttatctgtgtttttgaaatattaaaccctggatcagtcctttgatcagtataattttttaaagttactttgtcagaggcacaaaagggtttaaactgattcataataaatatctgtacttcttcgatcttcaccttttgtgctgtgattcttcagtttctaaaccagcactgtctgggtccctacaatgtatcaggaagagctgagaatggtaaggagactcttctaagtcttcatctcagagaccctgagttcccactcagacccactcagccaaatctcatggaagaccaaggagggcagcactgtttttgttttttgttttttgttttttttttttgacactgtccaaaggttttccatcctgtcctggaatcagagttggaagctgaggagcttcagcctcttttatggtttaatggccacctgttctctcctgtgaaaggctttgcaaagtcacattaagtttgcatgacctgttatccctggggccctatttcatagaggctggccctattagtgatttccaaaaacaatatggaagtgccttttgatgtcttacaataagagaagaagccaatggaaatgaaagagattggcaaaggggaaggatgatgccatgtagatcctgtttgacatttttatggctgtatttgtaaacttaaacacaccagtgtctgttcttgatgcagttgctatttaggatgagttaagtgcctggggagtccctcaaaaggttaaagggattcccatcattggaatcttatcaccagataggcaagtttatgaccaaacaagagagtactggctttatcctctaacctcatattttctcccacttggcaagtcctttgtggcatttattcatcagtcagggtgtccgattggtcctagaacttccaaaggctgcttgtcatagaagccattgcatctataaagcaacggctcctgttaaatggtatctcctttctgaggctcctactaaaagtcatttgttacctaaacttatgtgcttaacaggcaatgcttctcagaccacaaagcagaaagaagaagaaaagctcctgactaaatcagggctgggcttagacagagttgatctgtagaatatctttaaaggagagatgtcaactttctgcactattcccagcctctgctcctccctgtctaccctctcccctccctctctccctccacttcaccccacaatcttgaaaaacttcctttctcttctgtgaacatcattggccagatccattttcagtggtctggatttctttttattttcttttcaacttgaaagaaactggacattaggccactatgtgttgttactgccactagtgttcaagtgcctcttgttttcccagagatttcctgggtctgccagaggcccagacaggctcactcaagctctttaactgaaaagcaacaagccactccaggacaaggttcaaaatggttacaacagcctctacctgtcgccccagggagaaaggggtagtgatacaagtctcatagccagagatggttttccactccttctagatattcccaaaaagaggctgagacaggaggttattttcaattttattttggaattaaatacttttttccctttattactgttgtagtccctcacttggatatacctctgttttcacgatagaaataagggaggtctagagcttctattccttggccattgtcaacggagagctggccaagtcttcacaaacccttgcaacattgcctgaagtttatggaataagatgtattctcactcccttgatctcaagggcgtaactctggaagcacagcttgactacacgtcatttttaccaatgattttcaggtgacctgggctaagtcatttaaactgggtctttataaaagtaaaaggccaacatttaattattttgcaaagcaacctaagagctaaagatgtaatttttcttgcaattgtaaatcttttgtgtctcctgaagacttcccttaaaattagctctgagtgaaaaatcaaaagagacaaaagacatcttcgaatccatatttcaagcctggtagaattggcttttctagcagaacctttccaaaagttttatattgagattcataacaacaccaagaattgattttgtagccaacattcattcaatactgttatatcagaggagtaggagagaggaaacatttgacttatctggaaaagcaaaatgtacttaagaataagaataacatggtccattcacctttatgttatagatatgtctttgtgtaaatcatttgttttgagttttcaaagaatagcccattgttcattcttgtgctgtacaatgaccactgttattgttactttgacttttcagagcacacccttcctctggtttttgtatatttattgatggatcaataataatgaggaaagcatgatatgtatattgctgagttgaaagcacttattggaaaatattaaaaggctaacattaaaagactaaaggaaacaga

SEQ ID NO: 905 - DNA, 484 bp, Homo sapiens
  source 1..484: mol_type = genomic DNA
ccgttcgctccggacaccatggacaagttttggtggcacgcagcctggggactctgcctcgtgccgctgagcctggcgcagatcgatttgaatataacctgccgctttgcaggtgtattccacgtggagaaaaatggtcgctacagcatctctcggacggaggccgctgacctctgcaaggctttcaatagcaccttgcccacaatggcccagatggagaaagctctgagcatcggatttgagacctgcagtttgcattgcagtcaacagtcgaagaaggtgtgggcagaagaaaaagctagtgatcaacagtggcaatggagctgtggaggacagaaagccaagtggactcaacggagaggccagcaagtctcaggaaatggtgcatttggtgaacaaggagtcgtcagaaactccagaccagtttatgacagctgatgagacaaggaacctgcagaatgtggacatgaagattggggtgtaa

SEQ ID NO: 906 - DNA, 1023 bp, Homo sapiens
  source 1..1023: mol_type = genomic DNA
atggacaagttttggtggcacgcagcctggggactctgcctcgtgccgctgagcctggcgcagatcgatttgaatataacctgccgctttgcaggtgtattccacgtggagaaaaatggtcgctacagcatctctcggacggaggccgctgacctctgcaaggctttcaatagcaccttgcccacaatggcccagatggagaaagctctgagcatcggatttgagacctgcaggtatgggttcatagaagggcacgtggtgattccccggatccaccccaactccatctgtgcagcaaacaacacaggggtgtacatcctcacatccaacacctcccagtatgacacatattgcttcaatgcttcagctccacctgaagaagattgtacatcagtcacagacctgcccaatgcctttgatggaccaattaccataactattgttaaccgtgatggcacccgctatgtccagaaaggagaatacagaacgaatcctgaagacatctaccccagcaaccctactgatgatgacgtgagcagcggctcctccagtgaaaggagcagcacttcaggaggttacatcttttacaccttttctactgtacaccccatcccagacgaagacagtccctggatcaccgacagcacagacagaatccctgctaccagacactcacatgggagtcaagaaggtggagcaaacacaacctctggtcctataaggacaccccaaattccagaatggctgatcatcttggcatccctcttggccttggctttgattcttgcagtttgcattgcagtcaacagtcgaagaaggtgtgggcagaagaaaaagctagtgatcaacagtggcaatggagctgtggaggacagaaagccaagtggactcaacggagaggccagcaagtctcaggaaatggtgcatttggtgaacaaggagtcgtcagaaactccagaccagtttatgacagctgatgagacaaggaacctgcagaatgtggacatgaagattggggtgtaa

SEQ ID NO: 907 - DNA, 1460 bp, Homo sapiens
  source 1..1460: mol_type = genomic DNA
cctcattgcccagcggaccccagcctctgccaggttcggtccgccatcctcgtcccgtcctccgccggcccctgccccgcgcccagggatcctccagctcctttcgcccgcgccctccgttcgctccggacaccatggacaagttttggtggcacgcagcctggggactctgcctcgtgccgctgagcctggcgcagatcgatttgaatataacctgccgctttgcaggtgtattccacgtggagaaaaatggtcgctacagcatctctcggacggaggccgctgacctctgcaaggctttcaatagcaccttgcccacaatggcccagatggagaaagctctgagcatcggatttgagacctgcaggtatgggttcatagaagggcacgtggtgattccccggatccaccccaactccatctgtgcagcaaacaacacaggggtgtacatcctcacatccaacacctcccagtatgacacatattgcttcaatgcttcagctccacctgaagaagattgtacatcagtcacagacctgcccaatgcctttgatggaccaattaccataactattgttaaccgtgatggcacccgctatgtccagaaaggagaatacagaacgaatcctgaagacatctaccccagcaaccctactgatgatgacgtgagcagcggctcctccagtgaaaggagcagcacttcaggaggttacatcttttacaccttttctactgtacaccccatcccagacgaagacagtccctggatcaccgacagcacagacagaatccctgctaccaatatggactccagtcatagtataacgcttcagcctactgcaaatccaaacacaggtttggtggaagatttggacaggacaggacctctttcaatgacaacgcgtagagaccaagacacattccaccccagtggggggtcccataccactcatggatctgaatcagatggacactcacatgggagtcaagaaggtggagcaaacacaacctctggtcctataaggacaccccaaattccagaatggctgatcatcttggcatccctcttggccttggctttgattcttgcagtttgcattgcagtcaacagtcgaagaaggtgtgggcagaagaaaaagctagtgatcaacagtggcaatggagctgtggaggacagaaagccaagtggactcaacggagaggccagcaagtctcaggaaatggtgcatttggtgaacaaggagtcgtcagaaactccagaccagtttatgacagctgatgagacaaggaacctgcagaatgtggacatgaagattggggtgtaacacctacaccattatcttggaaagaaacaaccgttggaaacataaccattacagggagctgggacacttaacagatgcaatgtgctactgattgtttcattgcgaatcttttttagcataaaattttctactctt

SEQ ID NO: 908 - DNA, 2369 bp, Homo sapiens
  source 1..2369: mol_type = genomic DNA
cctcattgcccagcggaccccagcctctgccaggttcggtccgccatcctcgtcccgtcctccgccggcccctgccccgcgcccagggatcctccagctcctttcgcccgcgccctccgttcgctccggacaccatggacaagttttggtggcacgcagcctggggactctgcctcgtgccgctgagcctggcgcagatcgatttgaatataacctgccgctttgcaggtgtattccacgtggagaaaaatggtcgctacagcatctctcggacggaggccgctgacctctgcaaggctttcaatagcaccttgcccacaatggcccagatggagaaagctctgagcatcggatttgagacctgcaggtatgggttcatagaagggcacgtggtgattccccggatccaccccaactccatctgtgcagcaaacaacacaggggtgtacatcctcacatccaacacctcccagtatgacacatattgcttcaatgcttcagctccacctgaagaagattgtacatcagtcacagacctgcccaatgcctttgatggaccaattaccataactattgttaaccgtgatggcacccgctatgtccagaaaggagaatacagaacgaatcctgaagacatctaccccagcaaccctactgatgatgacgtgagcagcggctcctccagtgaaaggagcagcacttcaggaggttacatcttttacaccttttctactgtacaccccatcccagacgaagacagtccctggatcaccgacagcacagacagaatccctgctaccagtacgtcttcaaataccatctcagcaggctgggagccaaatgaagaaaatgaagatgaaagagacagacacctcagtttttctggatcaggcattgatgatgatgaagattttatctccagcaccatttcaaccacaccacgggcttttgaccacacaaaacagaaccaggactggacccagtggaacccaagccattcaaatccggaagtgctacttcagacaaccacaaggatgactgatgtagacagaaatggcaccactgcttatgaaggaaactggaacccagaagcacaccctcccctcattcaccatgagcatcatgaggaagaagagaccccacattctacaagcacaatccaggcaactcctagtagtacaacggaagaaacagctacccagaaggaacagtggtttggcaacagatggcatgagggatatcgccaaacacccaaagaagactcccattcgacaacagggacagctgcagcctcagctcataccagccatccaatgcaaggaaggacaacaccaagcccagaggacagttcctggactgatttcttcaacccaatctcacaccccatgggacgaggtcatcaagcaggaagaaggatggatatggactccagtcatagtataacgcttcagcctactgcaaatccaaacacaggtttggtggaagatttggacaggacaggacctctttcaatgacaacgcagcagagtaattctcagagcttctctacatcacatgaaggcttggaagaagataaagaccatccaacaacttctactctgacatcaagcaataggaatgatgtcacaggtggaagaagagacccaaatcattctgaaggctcaactactttactggaaggttatacctctcattacccacacacgaaggaaagcaggaccttcatcccagtgacctcagctaagactgggtcctttggagttactgcagttactgttggagattccaactctaatgtcaatcgttccttatcaggagaccaagacacattccaccccagtggggggtcccataccactcatggatctgaatcagatggacactcacatgggagtcaagaaggtggagcaaacacaacctctggtcctataaggacaccccaaattccagaatggctgatcatcttggcatccctcttggccttggctttgattcttgcagtttgcattgcagtcaacagtcgaagaaggtgtgggcagaagaaaaagctagtgatcaacagtggcaatggagctgtggaggacagaaagccaagtggactcaacggagaggccagcaagtctcaggaaatggtgcatttggtgaacaaggagtcgtcagaaactccagaccagtttatgacagctgatgagacaaggaacctgcagaatgtggacatgaagattggggtgtaacacctacaccattatcttggaaagaaacaaccgttggaaacataaccattacagggagctgggacacttaacagatgcaatgtgctactgattgtttcattgcgaatcttttttagcataaaattttctactctt

SEQ ID NO: 909 - DNA, 1768 bp, Homo sapiens
  source 1..1768: mol_type = genomic DNA
gcggaccccagcctctgccaggttcggtccgccatcctcgtcccgtcctccgccggcccctgccccgcgcccagggatcctccagctcctttcgcccgcgccctccgttcgctccggacaccatggacaagttttggtggcacgcagcctggggactctgcctcgtgccgctgagcctggcgcagatcgatttgaatataacctgccgctttgcaggtgtattccacgtggagaaaaatggtcgctacagcatctctcggacggaggccgctgacctctgcaaggctttcaatagcaccttgcccacaatggcccagatggagaaagctctgagcatcggatttgagacctgcagctccacctgaagaagattgtacatcagtcacagacctgcccaatgcctttgatggaccaattaccataactattgttaaccgtgatggcacccgctatgtccagaaaggagaatacagaacgaatcctgaagacatctaccccagcaaccctactgatgatgacgtgagcagcggctcctccagtgaaaggagcagcacttcaggaggttacatcttttacaccttttctactgtacaccccatcccagacgaagacagtccctggatcaccgacagcacagacagaatccctgctaccagagaccaagacacattccaccccagtggggggtcccataccactcatggatctgaatcagatggacactcacatgggagtcaagaaggtggagcaaacacaacctctggtcctataaggacaccccaaattccagaatggctgatcatcttggcatccctcttggccttggctttgattcttgcagtttgcattgcagtcaacagtcgaagaaggtgtgggcagaagaaaaagctagtgatcaacagtggcaatggagctgtggaggacagaaagccaagtggactcaacggagaggccagcaagtctcaggaaatggtgcatttggtgaacaaggagtcgtcagaaactccagaccagtttatgacagctgatgagacaaggaacctgcagaatgtggacatgaagattggggtgtaacacctacaccattatcttggaaagaaacaaccgttggaaacataaccattacagggagctgggacacttaacagatgcaatgtgctactgattgtttcattgcgaatcttttttagcataaaattttctactctttttgttttttgtgttttgttctttaaagtcaggtccaatttgtaaaaacagcattgctttctgaaattagggcccaattaataatcagcaagaatttgatcgttccagttcccacttggaggcctttcatccctcgggtgtgctatggatggcttctaacaaaaactacacatatgtattcctgatcgccaacctttcccccaccagctaaggacatttcccagggttaatagggcctggtccctgggaggaaatttgaatgggtccattttgcccttccatagcctaatccctgggcattgctttccactgaggttgggggttggggtgtactagttacacatcttcaacagaccccctctagaaatttttcagatgcttctgggagacacccaaagggtgaagctatttatctgtagtaaactatttatctgtgtttttgaaatattaaaccctggatcagtcctttgatcagtataattttttaaagttactttgtcagaggcacaaaagggtttaaactgattcataataaatatctgtacttcttcgatcttca

SEQ ID NO: 910 - DNA, 3046 bp, Homo sapiens
  source 1..3046: mol_type = genomic DNA
agcggaccccagcctctgccaggttcggtccgccatcctcgtcccgtcctccgccggcccctgccccgcgcccagggatcctccagctcctttcgcccgcgccctccgttcgctccggacaccatggacaagttttggtggcacgcagcctggggactctgcctcgtgccgctgagcctggcgcagatcgatttgaatataacctgccgctttgcaggtgtattccacgtggagaaaaatggtcgctacagcatctctcggacggaggccgctgacctctgcaaggctttcaatagcaccttgcccacaatggcccagatggagaaagctctgagcatcggatttgagacctgcaggtatgggttcatagaagggcacgtggtgattccccggatccaccccaactccatctgtgcagcaaacaacacaggggtgtacatcctcacatccaacacctcccagtatgacacatattgcttcaatgcttcagctccacctgaagaagattgtacatcagtcacagacctgcccaatgcctttgatggaccaattaccataactattgttaaccgtgatggcacccgctatgtccagaaaggagaatacagaacgaatcctgaagacatctaccccagcaaccctactgatgatgacgtgagcagcggctcctccagtgaaaggagcagcacttcaggaggttacatcttttacaccttttctactgtacaccccatcccagacgaagacagtccctggatcaccgacagcacagacagaatccctgctaccactttgatgagcactagtgctacagcaactgagacagcaaccaagaggcaagaaacctgggattggttttcatggttgtttctaccatcagagtcaaagaatcatcttcacacaacaacacaaatggctggtacgtcttcaaataccatctcagcaggctgggagccaaatgaagaaaatgaagatgaaagagacagacacctcagtttttctggatcaggcattgatgatgatgaagattttatctccagcaccatttcaaccacaccacgggcttttgaccacacaaaacagaaccaggactggacccagtggaacccaagccattcaaatccggaagtgctacttcagacaaccacaaggatgactgatgtagacagaaatggcaccactgcttatgaaggaaactggaacccagaagcacaccctcccctcattcaccatgagcatcatgaggaagaagagaccccacattctacaagcacaatccaggcaactcctagtagtacaacggaagaaacagctacccagaaggaacagtggtttggcaacagatggcatgagggatatcgccaaacacccaaagaagactcccattcgacaacagggacagctgcagcctcagctcataccagccatccaatgcaaggaaggacaacaccaagcccagaggacagttcctggactgatttcttcaacccaatctcacaccccatgggacgaggtcatcaagcaggaagaaggatggatatggactccagtcatagtataacgcttcagcctactgcaaatccaaacacaggtttggtggaagatttggacaggacaggacctctttcaatgacaacgcagcagagtaattctcagagcttctctacatcacatgaaggcttggaagaagataaagaccatccaacaacttctactctgacatcaagcaataggaatgatgtcacaggtggaagaagagacccaaatcattctgaaggctcaactactttactggaaggttatacctctcattacccacacacgaaggaaagcaggaccttcatcccagtgacctcagctaagactgggtcctttggagttactgcagttactgttggagattccaactctaatgtcaatcgttccttatcaggagaccaagacacattccaccccagtggggggtcccataccactcatggatctgaatcagatggacactcacatgggagtcaagaaggtggagcaaacacaacctctggtcctataaggacaccccaaattccagaatggctgatcatcttggcatccctcttggccttggctttgattcttgcagtttgcattgcagtcaacagtcgaagaaggtgtgggcagaagaaaaagctagtgatcaacagtggcaatggagctgtggaggacagaaagccaagtggactcaacggagaggccagcaagtctcaggaaatggtgcatttggtgaacaaggagtcgtcagaaactccagaccagtttatgacagctgatgagacaaggaacctgcagaatgtggacatgaagattggggtgtaacacctacaccattatcttggaaagaaacaaccgttggaaacataaccattacagggagctgggacacttaacagatgcaatgtgctactgattgtttcattgcgaatcttttttagcataaaattttctactctttttgttttttgtgttttgttctttaaagtcaggtccaatttgtaaaaacagcattgctttctgaaattagggcccaattaataatcagcaagaatttgatcgttccagttcccacttggaggcctttcatccctcgggtgtgctatggatggcttctaacaaaaactacacatatgtattcctgatcgccaacctttcccccaccagctaaggacatttcccagggttaatagggcctggtccctgggaggaaatttgaatgggtccattttgcccttccatagcctaatccctgggcattgctttccactgaggttgggggttggggtgtactagttacacatcttcaacagaccccctctagaaatttttcagatgcttctgggagacacccaaagggtgaagctatttatctgtagtaaactatttatctgtgtttttgaaatattaaaccctggatcagtcctttgatcagtataattttttaaagttactttgtcagaggcacaaaagggtttaaactgattcataataaatatctgtacttcttcgatcttca

SEQ ID NO: 911 - DNA, 2414 bp, Homo sapiens
  source 1..2414: mol_type = genomic DNA
cctcattgcccagcggaccccagcctctgccaggttcggtccgccatcctcgtcccgtcctccgccggcccctgccccgcgcccagggatcctccagctcctttcgcccgcgccctccgttcgctccggacaccatggacaagttttggtggcacgcagcctggggactctgcctcgtgccgctgagcctggcgcagatcgatttgaatataacctgccgctttgcaggtgtattccacgtggagaaaaatggtcgctacagcatctctcggacggaggccgctgacctctgcaaggctttcaatagcaccttgcccacaatggcccagatggagaaagctctgagcatcggatttgagacctgcaggtatgggttcatagaagggcacgtggtgattccccggatccaccccaactccatctgtgcagcaaacaacacaggggtgtacatcctcacatccaacacctcccagtatgacacatattgcttcaatgcttcagctccacctgaagaagattgtacatcagtcacagacctgcccaatgcctttgatggaccaattaccataactattgttaaccgtgatggcacccgctatgtccagaaaggagaatacagaacgaatcctgaagacatctaccccagcaaccctactgatgatgacgtgagcagcggctcctccagtgaaaggagcagcacttcaggaggttacatcttttacaccttttctactgtacaccccatcccagacgaagacagtccctggatcaccgacagcacagacagaatccctgctaccactttgatgagcactagtgctacagcaactgagacagcaaccaagaggcaagaaacctgggattggttttcatggttgtttctaccatcagagtcaaagaatcatcttcacacaacaacacaaatggctggtacgtcttcaaataccatctcagcaggctgggagccaaatgaagaaaatgaagatgaaagagacagacacctcagtttttctggatcaggcattgatgatgatgaagattttatctccagcaccatttcaaccacaccacgggcttttgaccacacaaaacagaaccaggactggacccagtggaacccaagccattcaaatccggaagtgctacttcagacaaccacaaggatgactgcagatgtagacagaaatggcaccactgcttatgaaggaaactggaacccagaagcacaccctcccctcattcaccatgagcatcatgaggaagaagagaccccacattctacaagcacaatccaggcaactcctagtagtacaacggaagaaacagctacccagaaggaacagtggtttggcaacagatggcatgagggatatcgccaaacacccaaagaagactcccattcgacaacagggacagctgcagcctcagctcataccagccatccaatgcaaggaaggacaacaccaagcccagaggacagttcctggactgatttcttcaacccaatctcacaccccatgggacgaggtcatcaagcaggaagaaggatggatatggactccagtcatagtataacgcttcagcctactgcaaatccaaacacaggtttggtggaagatttggacaggacaggacctctttcaatgacaacgcgtaataggaatgatgtcacaggtggaagaagagacccaaatcattctgaaggctcaactactttactggaaggttatacctctcattacccacacacgaaggaaagcaggaccttcatcccagtgacctcagctaagactgggtcctttggagttactgcagttactgttggagattccaactctaatgtcaatcgttccttatcaggagaccaagacacattccaccccagtggggggtcccataccactcatggatctgaatcagatggacactcacatgggagtcaagaaggtggagcaaacacaacctctggtcctataaggacaccccaaattccagaatggctgatcatcttggcatccctcttggccttggctttgattcttgcagtttgcattgcagtcaacagtcgaagaaggtgtgggcagaagaaaaagctagtgatcaacagtggcaatggagctgtggaggacagaaagccaagtggactcaacggagaggccagcaagtctcaggaaatggtgcatttggtgaacaaggagtcgtcagaaactccagaccagtttatgacagctgatgagacaaggaacctgcagaatgtggacatgaagattggggtgtaacacctacaccattatcttggaaagaaacaaccgttggaaacataaccattacagggagctgggacacttaacagatgcaatgtgctactgattgtttcattgcgaatcttttttagcataaaattttctactctt

SEQ ID NO: 912 - DNA, 2292 bp, Homo sapiens
  source 1..2292: mol_type = genomic DNA
cccagcctctgccaggttcggtccgccatcctcgtcccgtcctccgccggcccctgccccgcgcccagggatcctccagctcctttcgcccgcgccctccgttcgctccggacaccatggacaagttttggtggcacgcagcctggggactctgcctcgtgccgctgagcctggcgcagatcgatttgaatataacctgccgctttgcaggtgtattccacgtggagaaaaatggtcgctacagcatctctcggacggaggccgctgacctctgcaaggctttcaatagcaccttgcccacaatggcccagatggagaaagctctgagcatcggatttgagacctgcaggtatgggttcatagaagggcacgtggtgattccccggatccaccccaactccatctgtgcagcaaacaacacaggggtgtacatcctcacatccaacacctcccagtatgacacatattgcttcaatgcttcagctccacctgaagaagattgtacatcagtcacagacctgcccaatgcctttgatggaccaattaccataactattgttaaccgtgatggcacccgctatgtccagaaaggagaatacagaacgaatcctgaagacatctaccccagcaaccctactgatgatgacgtgagcagcggctcctccagtgaaaggagcagcacttcaggaggttacatcttttacaccttttctactgtacaccccatcccagacgaagacagtccctggatcaccgacagcacagacagaatccctgctaccaatatggactccagtcatagtataacgcttcagcctactgcaaatccaaacacaggtttggtggaagatttggacaggacaggacctctttcaatgacaacgcagcagagtaattctcagagcttctctacatcacatgaaggcttggaagaagataaagaccatccaacaacttctactctgacatcaagcaataggaatgatgtcacaggtggaagaagagacccaaatcattctgaaggctcaactactttactggaaggttatacctctcattacccacacacgaaggaaagcaggaccttcatcccagtgacctcagctaagactgggtcctttggagttactgcagttactgttggagattccaactctaatgtcaatcgttccttatcaggagaccaagacacattccaccccagtggggggtcccataccactcatggatctgaatcagatggacactcacatgggagtcaagaaggtggagcaaacacaacctctggtcctataaggacaccccaaattccagaatggctgatcatcttggcatccctcttggccttggctttgattcttgcagtttgcattgcagtcaacagtcgaagaaggtgtgggcagaagaaaaagctagtgatcaacagtggcaatggagctgtggaggacagaaagccaagtggactcaacggagaggccagcaagtctcaggaaatggtgcatttggtgaacaaggagtcgtcagaaactccagaccagtttatgacagctgatgagacaaggaacctgcagaatgtggacatgaagattggggtgtaacacctacaccattatcttggaaagaaacaaccgttggaaacataaccattacagggagctgggacacttaacagatgcaatgtgctactgattgtttcattgcgaatcttttttagcataaaattttctactctttttgttttttgtgttttgttctttaaagtcaggtccaatttgtaaaaacagcattgctttctgaaattagggcccaattaataatcagcaagaatttgatcgttccagttcccacttggaggcctttcatccctcgggtgtgctatggatggcttctaacaaaaactacacatatgtattcctgatcgccaacctttcccccaccagctaaggacatttcccagggttaatagggcctggtccctgggaggaaatttgaatgggtccattttgcccttccatagcctaatccctgggcattgctttccactgaggttgggggttggggtgtactagttacacatcttcaacagaccccctctagaaatttttcagatgcttctgggagacacccaaagggtgaagctatttatctgtagtaaactatttatctgtgtttttgaaatattaaaccctggatcagtcctttgatcagtataattttttaaagttactttgtcagaggcacaaaagggtttaaactgattcataataaatatctgtacttcttcgatcttca

SEQ ID NO: 913 - DNA, 1634 bp, Homo sapiens
  source 1..1634: mol_type = genomic DNA
ctccggacaccatggacaagttttggtggcacgcagcctggggactctgcctcgtgccgctgagcctggcgcagatcgatttgaatataacctgccgctttgcaggtgtattccacgtggagaaaaatggtcgctacagcatctctcggacggaggccgctgacctctgcaaggctttcaatagcaccttgcccacaatggcccagatggagaaagctctgagcatcggatttgagacctgcaggtatgggttcatagaagggcacgtggtgattccccggatccaccccaactccatctgtgcagcaaacaacacaggggtgtacatcctcacatccaacacctcccagtatgacacatattgcttcaatgcttcagctccacctgaagaagattgtacatcagtcacagacctgcccaatgcctttgatggaccaattaccataactattgttaaccgtgatggcacccgctatgtccagaaaggagaatacagaacgaatcctgaagacatctaccccagcaaccctactgatgatgacgtgagcagcggctcctccagtgaaaggagcagcacttcaggaggttacatcttttacaccttttctactgtacaccccatcccagacgaagacagtccctggatcaccgacagcacagacagaatccctgctaccaataggaatgatgtcacaggtggaagaagagacccaaatcattctgaaggctcaactactttactggaaggttatacctctcattacccacacacgaaggaaagcaggaccttcatcccagtgacctcagctaagactgggtcctttggagttactgcagttactgttggagattccaactctaatgtcaatcgttccttatcaggagaccaagacacattccaccccagtggggggtcccataccactcatggatctgaatcagatggacactcacatgggagtcaagaaggtggagcaaacacaacctctggtcctataaggacaccccaaattccagaatggctgatcatcttggcatccctcttggccttggctttgattcttgcagtttgcattgcagtcaacagtcgaagaaggtgtgggcagaagaaaaagctagtgatcaacagtggcaatggagctgtggaggacagaaagccaagtggactcaacggagaggccagcaagtctcaggaaatggtgcatttggtgaacaaggagtcgtcagaaactccagaccagtttatgacagctgatgagacaaggaacctgcagaatgtggacatgaagattggggtgtaacacctacaccattatcttggaaagaaacaaccgttggaaacataaccattacagggagctgggacacttaacagatgcaatgtgctactgattgtttcattgcgaatcttttttagcataaaattttctactctttttgttttttgtgttttgttctttaaagtcaggtccaatttgtaaaaacagcattgctttctgaaattagggcccaattaataatcagcaagaatttgatcgttccagttcccacttggaggcctttcatccctcgggtgtgctatggatggcttctaacaaaaactacacatatgtattcctgatcgccaacctttc

SEQ ID NO: 914 - DNA, 2294 bp, Homo sapiens
  source 1..2294: mol_type = genomic DNA
cctcattgcccagcggaccccagcctctgccaggttcggtccgccatcctcgtcccgtcctccgccggcccctgccccgcgcccagggatcctccagctcctttcgcccgcgccctccgttcgctccggacaccatggacaagttttggtggcacgcagcctggggactctgcctcgtgccgctgagcctggcgcagatcgatttgaatataacctgccgctttgcaggtgtattccacgtggagaaaaatggtcgctacagcatctctcggacggaggccgctgacctctgcaaggctttcaatagcaccttgcccacaatggcccagatggagaaagctctgagcatcggatttgagacctgcaggtatgggttcatagaagggcacgtggtgattccccggatccaccccaactccatctgtgcagcaaacaacacaggggtgtacatcctcacatccaacacctcccagtatgacacatattgcttcaatgcttcagctccacctgaagaagattgtacatcagtcacagacctgcccaatgcctttgatggaccaattaccataactattgttaaccgtgatggcacccgctatgtccagaaaggagaatacagaacgaatcctgaagacatctaccccagcaaccctactgatgatgacgtgagcagcggctcctccagtgaaaggagcagcacttcaggaggttacatcttttacaccttttctactgtacaccccatcccagacgaagacagtccctggatcaccgacagcacagacagaatccctgctaccactttgatgagcactagtgctacagcaactgagacagcaaccaagaggcaagaaacctgggattggttttcatggttgtttctaccatcagagtcaaagaatcatcttcacacaacaacacaaatggctggtacgtcttcaaataccatctcagcaggctgggagccaaatgaagaaaatgaagatgaaagagacagacacctcagtttttctggatcaggcattgatgatgatgaagattttatctccagcaccatttcaaccacaccacgggcttttgaccacacaaaacagaaccaggactggacccagtggaacccaagccattcaaatccggaagtgctacttcagacaaccacaaggatgactgatgtagacagaaatggcaccactgcttatgaaggaaactggaacccagaagcacaccctcccctcattcaccatgagcatcatgaggaagaagagaccccacattctacaagcacaatccaggcaactcctagtagtacaacggaagaaacagctacccagaaggaacagtggtttggcaacagatggcatgagggatatcgccaaacacccaaagaagactcccattcgacaacagggacagctgcagcctcagctcataccagccatccaatgcaaggaaggacaacaccaagcccagaggacagttcctggactgatttcttcaacccaatctcacaccccatgggacgaggtcatcaagcaggaagaaggatggatatggactccagtcatagtataacgcttcagcctactgcaaatccaaacacaggtttggtggaagatttggacaggacaggacctctttcaatgacaacgcagcagagtaattctcagagcttctctacatcacatgaaggcttggaagaagataaagaccatccaacaacttctactctgacatcaagcagagaccaagacacattccaccccagtggggggtcccataccactcatggatctgaatcagatggacactcacatgggagtcaagaaggtggagcaaacacaacctctggtcctataaggacaccccaaattccagaatggctgatcatcttggcatccctcttggccttggctttgattcttgcagtttgcattgcagtcaacagtcgaagaaggtgtgggcagaagaaaaagctagtgatcaacagtggcaatggagctgtggaggacagaaagccaagtggactcaacggagaggccagcaagtctcaggaaatggtgcatttggtgaacaaggagtcgtcagaaactccagaccagtttatgacagctgatgagacaaggaacctgcagaatgtggacatgaagattggggtgtaacacctacaccattatcttggaaagaaacaaccgttggaaacataaccattacagggagctgggacacttaacagatgcaatgtgctactgattgtttcattgcgaatcttttttagcataaaattttctactctt

SEQ ID NO: 915 - DNA, 2369 bp, Homo sapiens
  source 1..2369: mol_type = genomic DNA
cctcattgcccagcggaccccagcctctgccaggttcggtccgccatcctcgtcccgtcctccgccggcccctgccccgcgcccagggatcctccagctcctttcgcccgcgccctccgttcgctccggacaccatggacaagttttggtggcacgcagcctggggactctgcctcgtgccgctgagcctggcgcagatcgatttgaatataacctgccgctttgcaggtgtattccacgtggagaaaaatggtcgctacagcatctctcggacggaggccgctgacctctgcaaggctttcaatagcaccttgcccacaatggcccagatggagaaagctctgagcatcggatttgagacctgcaggtatgggttcatagaagggcacgtggtgattccccggatccaccccaactccatctgtgcagcaaacaacacaggggtgtacatcctcacatccaacacctcccagtatgacacatattgcttcaatgcttcagctccacctgaagaagattgtacatcagtcacagacctgcccaatgcctttgatggaccaattaccataactattgttaaccgtgatggcacccgctatgtccagaaaggagaatacagaacgaatcctgaagacatctaccccagcaaccctactgatgatgacgtgagcagcggctcctccagtgaaaggagcagcacttcaggaggttacatcttttacaccttttctactgtacaccccatcccagacgaagacagtccctggatcaccgacagcacagacagaatccctgctaccactttgatgagcactagtgctacagcaactgagacagcaaccaagaggcaagaaacctgggattggttttcatggttgtttctaccatcagagtcaaagaatcatcttcacacaacaacacaaatggctggtacgtcttcaaataccatctcagcaggctgggagccaaatgaagaaaatgaagatgaaagagacagacacctcagtttttctggatcaggcattgatgatgatgaagattttatctccagcaccatttcaaccacaccacgggcttttgaccacacaaaacagaaccaggactggacccagtggaacccaagccattcaaatccggaagtgctacttcagacaaccacaaggatgactgatgtagacagaaatggcaccactgcttatgaaggaaactggaacccagaagcacaccctcccctcattcaccatgagcatcatgaggaagaagagaccccacattctacaagcacaacagcctcagctcataccagccatccaatgcaaggaaggacaacaccaagcccagaggacagttcctggactgatttcttcaacccaatctcacaccccatgggacgaggtcatcaagcaggaagaaggatggatatggactccagtcatagtataacgcttcagcctactgcaaatccaaacacaggtttggtggaagatttggacaggacaggacctctttcaatgacaacgcagcagagtaattctcagagcttctctacatcacatgaaggcttggaagaagataaagaccatccaacaacttctactctgacatcaagcaataggaatgatgtcacaggtggaagaagagacccaaatcattctgaaggctcaactactttactggaaggttatacctctcattacccacacacgaaggaaagcaggaccttcatcccagtgacctcagctaagactgggtcctttggagttactgcagttactgttggagattccaactctaatgtcaatcgttccttatcaggagaccaagacacattccaccccagtggggggtcccataccactcatggatctgaatcagatggacactcacatgggagtcaagaaggtggagcaaacacaacctctggtcctataaggacaccccaaattccagaatggctgatcatcttggcatccctcttggccttggctttgattcttgcagtttgcattgcagtcaacagtcgaagaaggtgtgggcagaagaaaaagctagtgatcaacagtggcaatggagctgtggaggacagaaagccaagtggactcaacggagaggccagcaagtctcaggaaatggtgcatttggtgaacaaggagtcgtcagaaactccagaccagtttatgacagctgatgagacaaggaacctgcagaatgtggacatgaagattggggtgtaacacctacaccattatcttggaaagaaacaaccgttggaaacataaccattacagggagctgggacacttaacagatgcaatgtgctactgattgtttcattgcgaatcttttttagcataaaattttctactctt

SEQ ID NO: 916 - DNA, 1052 bp, Homo sapiens
  source 1..1052: mol_type = genomic DNA
agtgcgtctctgggcgcaggggccagtggggctcggaggcacaggcaccccgcgacactccaggttccccgacccacgtccctggcagccccgattatttacagcctcagcagagcacggggcgggggcagaggggcccgcccgggagggctgctacttcttaaaacctctgcgggctgcttagtcacagccccccttgcttgggtgtgtccttcgctcgctccctccctccgtcttaggtcactgttttcaacctcgaataaaaactgcagccaacttccgaggcagcctcattgcccagcggaccccagcctctgccaggttcggtccgccatcctcgtcccgtcctccgccggcccctgccccgcgcccagggatcctccagctcctttcgcccgcgccctccgttcgctccggacaccatggacaagttttggtggcacgcagcctggggactctgcctcgtgccgctgagcctggcgcagatcgatttgaatataacctgccgctttgcaggtgtattccacgtggagaaaaatggtcgctacagcatctctcggacggaggccgctgacctctgcaaggctttcaatagcaccttgcccacaatggcccagatggagaaagctctgagcatcggatttgagacctgcaggtaagagaccagcacccgaccactggggaaagctggcggcctgggaccaggcagctgggcttagaactggaaggctcctttcccacagctgaatggattattgcctaaggagtcaaccccacgtattaatttggccaagtcaatctgcaacctgtatgacaactggagtttaaagtcagctaaagacacctttgtgaatcatagagcgggaacccagaggaagccattaggggtcctctcggctggaatcctcttgtctaacctgcttccacagagctctcctggctttgaagaagctgcagtatcattgtcagaaccacaagaaaacataaaccaaataacagtgtttgaaataaatatgtggctgttagagtcttggccctgcagacttggatca

SEQ ID NO: 917 - DNA, 1825 bp, Homo sapiens
  source 1..1825: mol_type = genomic DNA
ggacaagttttggtggcacgcagcctggggactctgcctcgtgccgctgagcctggcgcagatcgatttgaatataacctgccgctttgcaggtgtattccacgtggagaaaaatggtcgctacagcatctctcggacggaggccgctgacctctgcaaggctttcaatagcaccttgcccacaatggcccagatggagaaagctctgagcatcggatttgagacctgcaggtatgggttcatagaagggcacgtggtgattccccggatccaccccaactccatctgtgcagcaaacaacacaggggtgtacatcctcacatccaacacctcccagtatgacacatattgcttcaatgcttcagctccacctgaagaagattgtacatcagtcacagacctgcccaatgcctttgatggaccaattaccataactattgttaaccgtgatggcacccgctatgtccagaaaggagaatacagaacgaatcctgaagacatctaccccagcaaccctactgatgatgacgtgagcagcggctcctccagtgaaaggagcagcacttcaggaggttacatcttttacaccttttctactgtacaccccatcccagacgaagacagtccctggatcaccgacagcacagacagaatccctgctaccagagaccaagacacattccaccccagtggggggtcccataccactcatggatctgaatcagatggacactcacatgggagtcaagaaggtggagcaaacacaacctctggtcctataaggacaccccaaattccagaatggctgatcatcttggcatccctcttggccttggctttgattcttgcagtttgcattgcagtcaacagtcgaagaagttgaagagattcaggttatagcataagaagagcactgtttcatcgtcttcttgctgttaggaggtctatgaagcagagaagaactttcctttggaaaacaactaaatgaagacagtcacctcgctagaactgacacatgggctgtttttatattcttgaaggccactctctccctacctgaaccaagacctataggtttacatgttatttacattttatatataatatatatatatatatatacacatacattatatatacacaatagtaattctagcaacagaggaaatgacctttaacaggggtataaatctaaatttataaaagtataaatctaaatttcttacccaagacactttaaagatacattatttttctccaggacgtaattcataggaatattaagccttttgtaaatgtccctttagatggtttctcataaggtaaaagaaacttatttccaagcaggaccacctttattgtgtccccagatcacctcacagggcagaaaaatgcccctcagtctgggagaagacctagagagaattatggactccttactggtttttggaaagcaaccaacagctaattccaacaccatgggcagcccatacagtctctaattatctgagaaaatcaaatgatgctgttacaataattacgctggtacaagttaataaaagtgccatgttacagtcaaacagctatgttgctatctataccattgagggcatagttttaaaaagtagttatgctacctgattgtataaggaacaaaactgagagaaaaaatctaaaaggccgcctatgattgaatggaaagattttttttagttgaatttaaataatgtgacttgggggagcctttacaaagagtctttatacctcccttcagcttcctcattttcccttggattacttttgctcaattaaatatgaatttcct

SEQ ID NO: 918 - DNA, 5020 bp, Homo sapiens
  source 1..5020: mol_type = genomic DNA
tgggcagtgggtcctgcctgtgacgcgcggcggcggtcggtcctgcctgtaacggcggcggcggctgctgctccggacacctgcggcggcggcggcgaccccgcggcgggcgcggagatgtggcccctggtagcggcgctgttgctgggctcggcgtgctgcggatcagctcagctactatttaataaaacaaaatctgtagaattcacgttttgtaatgacactgtcgtcattccatgctttgttactaatatggaggcacaaaacactactgaagtatacgtaaagtggaaatttaaaggaagagatatttacacctttgatggagctctaaacaagtccactgtccccactgactttagtagtgcaaaaattgaagtctcacaattactaaaaggagatgcctctttgaagatggataagagtgatgctgtctcacacacaggaaactacacttgtgaagtaacagaattaaccagagaaggtgaaacgatcatcgagctaaaatatcgtgttgtttcatggttttctccaaatgaaaatattcttattgttattttcccaatttttgctatactcctgttctggggacagtttggtattaaaacacttaaatatagatccggtggtatggatgagaaaacaattgctttacttgttgctggactagtgatcactgtcattgtcattgttggagccattcttttcgtcccaggtgaatattcattaaagaatgctactggccttggtttaattgtgacttctacagggatattaatattacttcactactatgtgtttagtacagcgattggattaacctccttcgtcattgccatattggttattcaggtgatagcctatatcctcgctgtggttggactgagtctctgtattgcggcgtgtataccaatgcatggccctcttctgatttcaggtttgagtatcttagctctagcacaattacttggactagtttatatgaaatttgtggcttccaatcagaagactatacaacctcctaggaataactgaagtgaagtgatggactccgatttggagagtagtaagacgtgaaaggaatacacttgtgtttaagcaccatggccttgatgattcactgttggggagaagaaacaagaaaagtaactggttgtcacctatgagacccttacgtgattgttagttaagtttttattcaaagcagctgtaatttagttaataaaataattatgatctatgttgtttgcccaattgagatccagttttttgttgttatttttaatcaattaggggcaatagtagaatggacaatttccaagaatgatgcctttcaggtcctagggcctctggcctctaggtaaccagtttaaattggttcagggtgataactacttagcactgccctggtgattacccagagatatctatgaaaaccagtggcttccatcaaacctttgccaactcaggttcacagcagctttgggcagttatggcagtatggcattagctgagaggtgtctgccacttctgggtcaatggaataataaattaagtacaggcaggaatttggttgggagcatcttgtatgatctccgtatgatgtgatattgatggagatagtggtcctcattcttgggggttgccattcccacattcccccttcaacaaacagtgtaacaggtccttcccagatttagggtacttttattgatggatatgttttccttttattcacataaccccttgaaaccctgtcttgtcctcctgttacttgcttctgctgtacaagatgtagcaccttttctcctctttgaacatggtctagtgacacggtagcaccagttgcaggaaggagccagacttgttctcagagcactgtgttcacacttttcagcaaaaatagctatggttgtaacatatgtattcccttcctctgatttgaaggcaaaaatctacagtgtttcttcacttcttttctgatctggggcatgaaaaaagcaagattgaaatttgaactatgagtctcctgcatggcaacaaaatgtgtgtcaccatcaggccaacaggccagcccttgaatggggatttattactgttgtatctatgttgcatgataaacattcatcaccttcctcctgtagtcctgcctcgtactccccttcccctatgattgaaaagtaaacaaaacccacatttcctatcctggttagaagaaaattaatgttctgacagttgtgatcgcctggagtacttttagacttttagcattcgttttttacctgtttgtggatgtgtgtttgtatgtgcatacgtatgagataggcacatgcatcttctgtatggacaaaggtggggtacctacaggagagcaaaggttaattttgtgcttttagtaaaaacatttaaatacaaagttctttattgggtggaattatatttgatgcaaatatttgatcacttaaaacttttaaaacttctaggtaatttgccacgctttttgactgctcaccaataccctgtaaaaatacgtaattcttcctgtttgtgtaataagatattcatatttgtagttgcattaataatagttatttcttagtccatcagatgttcccgtgtgcctcttttatgccaaattgattgtcatatttcatgttgggaccaagtagtttgcccatggcaaacctaaatttatgacctgctgaggcctctcagaaaactgagcatactagcaagacagctcttcttgaaaaaaaaaatatgtatacacaaatatatacgtatatctatatatacgtatgtatatacacacatgtatattcttccttgattgtgtagctgtccaaaataataacatatatagagggagctgtattcctttatacaaatctgatggctcctgcagcactttttccttctgaaaatatttacattttgctaacctagtttgttactttaaaaatcagttttgatgaaaggagggaaaagcagatggacttgaaaaagatccaagctcctattagaaaaggtatgaaaatctttatagtaaaattttttataaactaaagttgtaccttttaatatgtagtaaactctcatttatttggggttcgctcttggatctcatccatccattgtgttctctttaatgctgcctgccttttgaggcattcactgccctagacaatgccaccagagatagtgggggaaatgccagatgaaaccaactcttgctctcactagttgtcagcttctctggataagtgaccacagaagcaggagtcctcctgcttgggcatcattgggccagttccttctctttaaatcagatttgtaatggctcccaaattccatcacatcacatttaaattgcagacagtgttttgcacatcatgtatctgttttgtcccataatatgctttttactccctgatcccagtttctgctgttgactcttccattcagttttatttattgtgtgttctcacagtgacaccatttgtccttttctgcaacaacctttccagctacttttgccaaattctatttgtcttctccttcaaaacattctcctttgcagttcctcttcatctgtgtagctgctcttttgtctcttaacttaccattcctatagtactttatgcatctctgcttagttctattagttttttggccttgctcttctccttgattttaaaattccttctatagctagagcttttctttctttcattctctcttcctgcagtgttttgcatacatcagaagctaggtacataagttaaatgattgagagttggctgtatttagatttatcactttttaatagggtgagcttgagagttttctttctttctgttttttttttttgttttttttttttttttttttttttttttttttgactaatttcacatgctctaaaaaccttcaaaggtgattatttttctcctggaaactccaggtccattctgtttaaatccctaagaatgtcagaattaaaataacagggctatcccgtaattggaaatatttcttttttcaggatgctatagtcaatttagtaagtgaccaccaaattgttatttgcactaacaaagctcaaaacacgataagtttactcctccatctcagtaataaaaattaagctgtaatcaaccttctaggtttctcttgtcttaaaatgggtattcaaaaatggggatctgtggtgtatgtatggaaacacatactccttaatttacctgttgttggaaactggagaaatgattgtcgggcaaccgtttattttttattgtattttatttggttgagggatttttttataaacagttttacttgtgtcatattttaaaattactaactgccatcacctgctggggtcctttgttaggtcattttcagtgactaatagggataatccaggtaactttgaagagatgagcagtgagtgaccaggcagtttttctgcctttagctttgacagttcttaattaagatcattgaagaccagctttctcataaatttctctttttgaaaaaaagaaagcatttgtactaagctcctctgtaagacaacatcttaaatcttaaaagtgttgttatcatgactggtgagagaagaaaacattttgtttttattaaatggagcattatttacaaaaagccattgttgagaattagatcccacatcgtataaatatctattaaccattctaaataaagagaactccagtgttgctatgtgcaagatcctctcttggagcttttttgcatagcaattaaaggtgtgctatttgtcagtagccatttttttgcagtgatttgaagaccaaagttgttttacagctgtgttaccgttaaaggtttttttttttatatgtattaaatcaatttatcactgtttaaagctttgaatatctgcaatctttgccaaggtacttttttatttaaaaaaaaacataactttgtaaatattaccctgtaatattatatatacttaataaaacattttaagcta

SEQ ID NO: 919 - DNA, 1285 bp, Homo sapiens
  source 1..1285: mol_type = genomic DNA
tcctgcctgtgacgcgcggcggcggtcggtcctgcctgtaacggcggcggcggctgctgctccggacacctgcggcggcggcggcgaccccgcggcgggcgcggagatgtggcccctggtagcggcgctgttgctgggctcggcgtgctgcggatcagctcagctactatttaataaaacaaaatctgtagaattcacgttttgtaatgacactgtcgtcattccatgctttgttactaatatggaggcacaaaacactactgaagtatacgtaaagtggaaatttaaaggaagagatatttacacctttgatggagctctaaacaagtccactgtccccactgactttagtagtgcaaaaattgaagtctcacaattactaaaaggagatgcctctttgaagatggataagagtgatgctgtctcacacacaggaaactacacttgtgaagtaacagaattaaccagagaaggtgaaacgatcatcgagctaaaatatcgtgttgtttcatggttttctccaaatgaaaatattcttattgttattttcccaatttttgctatactcctgttctggggacagtttggtattaaaacacttaaatatagatccggtggtatggatgagaaaacaattgctttacttgttgctggactagtgatcactgtcattgtcattgttggagccattcttttcgtcccaggtgaatattcattaaagaatgctactggccttggtttaattgtgacttctacagggatattaatattacttcactactatgtgtttagtacagcgattggattaacctccttcgtcattgccatattggttattcaggtgatagcctatatcctcgctgtggttggactgagtctctgtattgcggcgtgtataccaatgcatggccctcttctgatttcaggtttgagtatcttagctctagcacaattacttggactagtttatatgaaatttgtggcttccaatcagaagactatacaacctcctaggaaagctgtagaggaaccccttaatgcattcaaagaatcaaaaggaatgatgaatgatgaataactgaagtgaagtgatggactccgatttggagagtagtaagacgtgaaaggaatacacttgtgtttaagcaccatggccttgatgattcactgttggggagaagaaacaagaaaagtaactggttgtcacctatgagacccttacgtgattgttagttaagtttttattcaaagcagctgtaatttagttaataaaataattatgatc

SEQ ID NO: 920 - DNA, 3221 bp, Homo sapiens
  source 1..3221: mol_type = genomic DNA
aacttcaaacatgggtgacgcaggccccacactgcctgctccccgtcccacccctccctgagcacgccaccccgccctctccctctctgagagcgagatacccggccagacaccctcacctgcggtgcccagctgcccaggctgaggcaagagaaggccagaaaccatgcccatggggtctctgcaaccgctggccaccttgtacctgctggggatgctggtcgcttcctgcctcggacggctcagctggtatgacccagatttccaggcaaggctcacccgttccaactcgaagtgccagggccagctggaggtctacctcaaggacggatggcacatggtttgcagccagagctggggccggagctccaagcagtgggaggaccccagtcaagcgtcaaaagtctgccagcggctgaactgtggggtgcccttaagccttggccccttccttgtcacctacacacctcagagctcaatcatctgctacggacaactgggctccttctccaactgcagccacagcagaaatgacatgtgtcactctctgggcctgacctgcttagaaccccagaagacaacacctccaacgacaaggcccccgcccaccacaactccagagcccacagctcctcccaggctgcagctggtggcacagtctggcggccagcactgtgccggcgtggtggagttctacagcggcagcctggggggtaccatcagctatgaggcccaggacaagacccaggacctggagaacttcctctgcaacaacctccagtgtggctccttcttgaagcatctgccagagactgaggcaggcagagcccaagacccaggggagccacgggaacaccagcccttgccaatccaatggaagatccagaactcaagctgtacctccctggagcattgcttcaggaaaatcaagccccagaaaagtggccgagttcttgccctcctttgctcaggtttccagcccaaggtgcagagccgtctggtggggggcagcagcatctgtgaaggcaccgtggaggtgcgccagggggctcagtgggcagccctgtgtgacagctcttcagccaggagctcgctgcggtgggaggaggtgtgccgggagcagcagtgtggcagcgtcaactcctatcgagtgctggacgctggtgacccaacatcccgggggctcttctgtccccatcagaagctgtcccagtgccacgaactttgggagagaaattcctactgcaagaaggtgtttgtcacatgccaggatccaaaccccgcaggcctggccgcaggcacggtggcaagcatcatcctggccctggtgctcctggtggtgctgctggtcgtgtgcggcccccttgcctacaagaagctagtgaagaaattccgccagaagaagcagcgccagtggattggcccaacgggaatgaaccaaaacatgtctttccatcgcaaccacacggcaaccgtccgatcccatgctgagaaccccacagcctcccacgtggataacgaatacagccaacctcccaggaactcccacctgtcagcttatccagctctggaaggggctctgcatcgctcctccatgcagcctgacaactcctccgacagtgactatgatctgcatggggctcagaggctgtaaagaactgggatccatgagcaaaaagccgagagccagacctgtttgtcctgagaaaactgtccgctcttcacttgaaatcatgtccctatttctaccccggccagaacatggacagaggccagaagccttccggacaggcgctgctgccccgagtggcaggccagctcacactctgctgcacaacagctcggccgcccctccacttgtggaagctgtggtgggcagagccccaaaacaagcagccttccaactagagactcgggggtgtctgaagggggccccctttccctgcccgctggggagcggcgtctcagtgaaatcggctttctcctcagactctgtccctggtaaggagtgacaaggaagctcacagctgggcgagtgcattttgaatagttttttgtaagtagtgcttttcctccttcctgacaaatcgagcgctttggcctcttctgtgcagcatccacccctgcggatccctctggggaggacaggaaggggactcccggagacctctgcagccgtggtggtcagaggctgctcacctgagcacaaagacagctctgcacattcaccgcagctgccagccaggggtctgggtgggcaccaccctgacccacagcgtcaccccactccctctgtcttatgactcccctccccaaccccctcatctaaagacaccttcctttccactggctgtcaagcccacagggcaccagtgccacccagggcccggcacaaaggggcgcctagtaaaccttaaccaacttggttttttgcttcacccagcaattaaaagtcccaagctgaggtagtttcagtccatcacagttcatcttctaacccaagagtcagagatggggctggtcatgttcctttggtttgaataactcccttgacgaaaacagactcctctagtacttggagatcttggacgtacacctaatcccatggggcctcggcttccttaactgcaagtgagaagaggaggtctacccaggagcctcgggtctgatcaagggagaggccaggcgcagctcactgcggcggctccctaagaaggtgaagcaacatgggaacacatcctaagacaggtcctttctccacgccatttgatgctgtatctcctgggagcacaggcatcaatggtccaagccgcataataagtctggaagagcaaaagggagttactaggatatggggtgggctgctcccagaatctgctcagctttctgcccccaccaacaccctccaaccaggccttgccttctgagagcccccgtggccaagcccaggtcacagatcttcccccgaccatgctgggaatccagaaacagggaccccatttgtcttcccatatctggtggaggtgagggggctcctcaaaagggaactgagaggctgctcttagggagggcaaaggttcgggggcagccagtgtctcccatcagtgccttttttaataaaagctctttcatctatagtttggccaccatacagtggcctcaaagcaaccatggcctacttaaaaaccaaaccaaaaataaagagtttagttgaggagaaa

SEQ ID NO: 921 - DNA, 896 bp, Homo sapiens
  source 1..896: mol_type = genomic DNA
ccagagaggggcaggctggtcccctgacaggttgaagcaagtagacgcccaggagccccgggagggggctgcagtttccttccttccttctcggcagcgctccgcgcccccatcgcccctcctgcgctagcggaggtgatcgccgcggcgatgccggaggagggttcgggctgctcggtgcggcgcaggccctatgggtgcgtcctgcgggctgctttggtcccattggtcgcgggcttggtgatctgcctcgtggtgtgcatccagcgcttcgcacaggctcagcagcagctgccgctcgagtcacttgggtgggacgtagctgagctgcagctgaatcacacaggacctcagcaggaccccaggctatactggcaggggggcccagcactgggccgctccttcctgcatggaccagagctggacaaggggcagctacgtatccatcgtgatggcatctacatggtacacatccaggtgacgctggccatctgctcctccacgacggcctccaggcaccaccccaccaccctggccgtgggaatctgctctcccgcctcccgtagcatcagcctgctgcgtctcagcttccaccaaggttgtaccattgcctcccagcgcctgacgcccctggcccgaggggacacactctgcaccaacctcactgggacacttttgccttcccgaaacactgatgagaccttctttggagtgcagtgggtgcgcccctgaccactgctgctgattagggttttttaaattttattttattttatttaagttcaagagaaaaagtgtacacacaggggccacccggggttggggtgggagtgtggtggggcgtagtggtggcaggacaagagaaggcattgagctttttctttcattttcctatt

SEQ ID NO: 922 - DNA, 915 bp, Homo sapiens
  source 1..915: mol_type = genomic DNA
aagtagacgcccaggagccccgggagggggctgcagtttccttccttccttctcggcagcgctccgcgcccccatcgcccctcctgcgctagcggaggtgatcgccgcggcgatgccggaggagggttcgggctgctcggtgcggcgcaggccctatgggtgcgtcctgcgggctgctttggtcccattggtcgcgggcttggtgatctgcctcgtggtgtgcatccagcgcttcgcacaggctcagcagcagctgccgctcgagtcacttgggtgggacgtagctgagctgcagctgaatcacacaggacctcagcaggaccccaggctatactggcaggggggcccagcactgggccgctccttcctgcatggaccagagctggacaaggggcagctacgtatccatcgtgatggcatctacatggtacacatccaggtgacgctggccatctgctcctccacgacggcctccaggcaccaccccaccaccctggccgtgggaatctgctctcccgcctcccgtagcatcagcctgctgcgtctcagcttccaccaagggctttttggattttggaactggggactcaaagtcaagtgcttcttacggcatttaatatggactgcacactgttttatcccattaactcagctcgtgttcatgcaagccctacaaagctggaggaatcatcattgttcccatttcacagatgaggaaaacagaggcgtaaaccgttgagtcatctgtccaaagttactggttttgtaacagctggaacctcagtatttaacagttgaggaaaatagtggcagaaaacctgagtcacaagcccgaggcaattcatctacatagtagtggactcaggattccaagccagataatcccgcatcttgcatccatgatctcacttctag

SEQ ID NO: 923 - DNA, 1258 bp, Homo sapiens
  source 1..1258: mol_type = genomic DNA
tccactcacagcctgaagcatacccggcaggggctgtccccaggcccaacaagcaaagggcccagtagcgagggccactggagcccatctccggggggctgggcaggaagtagggtggggtttggggtagggatctggtaccctgggactgctgcaactcaaactaaccaacccactgggagaagatgcctgggggtccaggagtcctccaagctctgcctgccaccatcttcctcctcttcctgctgtctgctgtctacctgggccctgggtgccaggccctgtggatgcacaaggtcccagcatcattgatggtgagcctgggggaagacgcccacttccaatgcccgcacaatagcagcaacaacgccaacgtcacctggtggcgcgtcctccatggcaactacacgtggccccctgagttcttgggcccgggcgaggaccccaatggtacgctgatcatccagaatgtgaacaagagccatgggggcatatacgtgtgccgggtccaggagggcaacgagtcataccagcagtcctgcggcacctacctccgcgtgcgccagccgccccccaggcccttcctggacatgggggagggcaccaagaaccgaatcatcacagccgaggggatcatcctcctgttctgcgcggtggtgcctgggacgctgctgctgttcaggaaacgatggcagaacgagaagctcgggttggatgccggggatgaatatgaagatgaaaacctttatgaaggcctgaacctggacgactgctccatgtatgaggacatctcccggggcctccagggcacctaccaggatgtgggcagcctcaacataggagatgtccagctggagaagccgtgacacccctactcctgccaggctgcccccgcctgctgtgcacccagctccagtgtctcagctcacttccctgggacattctcctttcagcccttctgggggcttccttagtcatattcccccagtggggggtgggagggtaacctcactcttctccaggccaggcctccttggactcccctgggggtgtcccactcttcttccctctaaactgccccacctcctaacctaatccccccgccccgctgcctttcccaggctcccctcaccccagcgggtaatgagcccttaatcgctgcctctaggggagctgattgtagcagcctcgttagtgtcaccccctcctccctgatctgtcagggccacttagtgataataaattcttcccaactgca

SEQ ID NO: 924 - DNA, 1144 bp, Homo sapiens
  source 1..1144: mol_type = genomic DNA
tccactcacagcctgaagcatacccggcaggggctgtccccaggcccaacaagcaaagggcccagtagcgagggccactggagcccatctccggggggctgggcaggaagtagggtggggtttggggtagggatctggtaccctgggactgctgcaactcaaactaaccaacccactgggagaagatgcctgggggtccaggagtcctccaagctctgcctgccaccatcttcctcctcttcctgctgtctgctgtctacctgggccctgggtgccaggccctgtggatgcacaaggtcccagcatcattgatggtgagcctgggggaagacgcccacttccaatgcccgcacaatagcagcaacaacgccaacgtcacctggtggcgcgtcctccatggcaactacacgtggccccctgagttcttgggcccgggcgaggaccccaatgagccgccccccaggcccttcctggacatgggggagggcaccaagaaccgaatcatcacagccgaggggatcatcctcctgttctgcgcggtggtgcctgggacgctgctgctgttcaggaaacgatggcagaacgagaagctcgggttggatgccggggatgaatatgaagatgaaaacctttatgaaggcctgaacctggacgactgctccatgtatgaggacatctcccggggcctccagggcacctaccaggatgtgggcagcctcaacataggagatgtccagctggagaagccgtgacacccctactcctgccaggctgcccccgcctgctgtgcacccagctccagtgtctcagctcacttccctgggacattctcctttcagcccttctgggggcttccttagtcatattcccccagtggggggtgggagggtaacctcactcttctccaggccaggcctccttggactcccctgggggtgtcccactcttcttccctctaaactgccccacctcctaacctaatccccccgccccgctgcctttcccaggctcccctcaccccagcgggtaatgagcccttaatcgctgcctctaggggagctgattgtagcagcctcgttagtgtcaccccctcctccctgatctgtcagggccacttagtgataataaattcttcccaactgca

SEQ ID NO: 925 - DNA, 2725 bp, Homo sapiens
  source 1..2725: mol_type = genomic DNA
aagtaacagaagttagaaggggaaatgtcgcctctctgaagattacccaaagaaaaagtgatttgtcattgctttatagactgtaagaagagaacatctcagaagtggagtcttaccctgaaatcaaaggatttaaagaaaaagtggaatttttcttcagcaagctgtgaaactaaatccacaacctttggagacccaggaacaccctccaatctctgtgtgttttgtaaacatcactggagggtcttctacgtgagcaattggattgtcatcagccctgcctgttttgcacctgggaagtgccctggtcttacttgggtccaaattgttggctttcacttttgaccctaagcatctgaagccatgggccacacacggaggcagggaacatcaccatccaagtgtccatacctcaatttctttcagctcttggtgctggctggtctttctcacttctgttcaggtgttatccacgtgaccaaggaagtgaaagaagtggcaacgctgtcctgtggtcacaatgtttctgttgaagagctggcacaaactcgcatctactggcaaaaggagaagaaaatggtgctgactatgatgtctggggacatgaatatatggcccgagtacaagaaccggaccatctttgatatcactaataacctctccattgtgatcctggctctgcgcccatctgacgagggcacatacgagtgtgttgttctgaagtatgaaaaagacgctttcaagcgggaacacctggctgaagtgacgttatcagtcaaagctgacttccctacacctagtatatctgactttgaaattccaacttctaatattagaaggataatttgctcaacctctggaggttttccagagcctcacctctcctggttggaaaatggagaagaattaaatgccatcaacacaacagtttcccaagatcctgaaactgagctctatgctgttagcagcaaactggatttcaatatgacaaccaaccacagcttcatgtgtctcatcaagtatggacatttaagagtgaatcagaccttcaactggaatacaaccaagcaagagcattttcctgataacctgctcccatcctgggccattaccttaatctcagtaaatggaatttttgtgatatgctgcctgacctactgctttgccccaagatgcagagagagaaggaggaatgagagattgagaagggaaagtgtacgccctgtataacagtgtccgcagaagcaaggggctgaaaagatctgaaggtcccacctccatttgcaattgacctcttctgggaacttcctcagatggacaagattaccccaccttgccctttacgtatctgctcttaggtgcttcttcacttcagttgctttgcaggaagtgtctagaggaatatggtgggcacagaagtagctctggtgaccttgatcaaggtgttttgaaatgcagaattcttgagttctggaagggactttagagaataccagtgttattaatgacaaaggcactgaggcccagggaggtgacccgaattataaaggccagcgccagaacccagatttcctaactctggtgctctttccctttatcagtttgactgtggcctgttaactggtatatacatatatatgtcaggcaaagtgctgctggaagtagaatttgtccaataacaggtcaacttcagagactatctgatttcctaatgtcagagtagaagattttatgctgctgtttacaaaagcccaatgtaatgcataggaagtatggcatgaacatctttaggagactaatggaaatattattggtgtttacccagtattccatttttttcattgtgttctctattgctgctctctcactcccccatgaggtacagcagaaaggagaactatccaaaactaatttcctctgacatgtaagacgaatgatttaggtacgtcaaagcagtagtcaaggaggaaagggatagtccaaagacttaactggttcatattggactgataatctctttaaatggctttatgctagtttgacctcatttgtaaaatatttatgagaaagttctcatttaaaatgagatcgttgtttacagtgtatgtactaagcagtaagctatcttcaaatgtctaaggtagtaactttccatagggcctccttagatccctaagatggctttttctccttggtatttctgggtctttctgacatcagcagagaactggaaagacatagccaactgctgttcatgttactcatgactcctttctctaaaactgccttccacaattcactagaccagaagtggacgcaacttaagctgggataatcacattatcatctgaaaatctggagttgaacagcaaaagaagacaacatttctcaaatgcacatctcatggcagctaagccacatggctgggatttaaagcctttagagccagcccatggctttagctacctcactatgctgcttcacaaaccttgctcctgtgtaaaactatattctcagtgtagggcagagaggtctaacaccaacataaggtactagcagtgtttcccgtattgacaggaatacttaactcaataattcttttcttttccatttagtaacagttgtgatgactatgtttctattctaagtaattcctgtattctacagcagatactttgtcagcaatactaagggaagaaacaaagttgaaccgtttctttaataa

SEQ ID NO: 926 - DNA, 489 bp, Homo sapiens
  source 1..489: mol_type = genomic DNA
atgggccacacacggaggcagggaacatcaccatccaagtgtccatacctcaatttctttcagctcttggtgctggctggtctttctcacttctgttcaggtgttatccacgtgaccaaggaagtgaaagaagtggcaacgctgtcctgtggtcacaatgtttctgttgaagagctggcacaaactcgcatctactggcaaaaggagaagaaaatggtgctgactatgatgtctggggacatgaatatatggcccgagtacaagaaccggaccatctttgatatcactaataacctctccattgtgatcctggctctgcgcccatctgacgagggcacatacgagtgtgttgttctgaagtatgaaaaagacgctttcaagcgggaacacctggctgaagtgacgttatcagtcaaaggctttgccccaagatgcagagagagaaggaggaatgagagattgagaagggaaagtgtacgccctgtataa

SEQ ID NO: 927 - DNA, 771 bp, Homo sapiens
  source 1..771: mol_type = genomic DNA
atgggccacacacggaggcagggaacatcaccatccaagtgtccatacctcaatttctttcagctcttggtgctggctggtctttctcacttctgttcaggtgttatccacgtgaccaaggaagtgaaagaagtggcaacgctgtcctgtggtcacaatgtttctgttgaagagctggcacaaactcgcatctactggcaaaaggagaagaaaatggtgctgactatgatgtctggggacatgaatatatggcccgagtacaagaaccggaccatctttgatatcactaataacctctccattgtgatcctggctctgcgcccatctgacgagggcacatacgagtgtgttgttctgaagtatgaaaaagacgctttcaagcgggaacacctggctgaagtgacgttatcagtcaaagctgacttccctacacctagtatatctgactttgaaattccaacttctaatattagaaggataatttgctcaacctctggaggttttccagagcctcacctctcctggttggaaaatggagaagaattaaatgccatcaacacaacagtttcccaagatcctgaaactgagctctatgctgttagcagcaaactggatttcaatatgacaaccaaccacagcttcatgtgtctcatcaagtatggacatttaagagtgaatcagaccttcaactggaatacaagctttgccccaagatgcagagagagaaggaggaatgagagattgagaagggaaagtgtacgccctgtataa

SEQ ID NO: 928 - DNA, 1491 bp, Homo sapiens
  source 1..1491: mol_type = genomic DNA
ccaaagaaaaagtgatttgtcattgctttatagactgtaagaagagaacatctcagaagtggagtcttaccctgaaatcaaaggatttaaagaaaaagtggaatttttcttcagcaagctgtgaaactaaatccacaacctttggagacccaggaacaccctccaatctctgtgtgttttgtaaacatcactggagggtcttctacgtgagcaattggattgtcatcagccctgcctgttttgcacctgggaagtgccctggtcttacttgggtccaaattgttggctttcacttttgaccctaagcatctgaagccatgggccacacacggaggcagggaacatcaccatccaagtgtccatacctcaatttctttcagctcttggtgctggctggtctttctcacttctgttcaggtgttatccacgtgaccaaggaagtgaaagaagtggcaacgctgtcctgtggtcacaatgtttctgttgaagagctggcacaaactcgcatctactggcaaaaggagaagaaaatggtgctgactatgatgtctggggacatgaatatatggcccgagtacaagaaccggaccatctttgatatcactaataacctctccattgtgatcctggctctgcgcccatctgacgagggcacatacgagtgtgttgttctgaagtatgaaaaagacgctttcaagcgggaacacctggctgaagtgacgttatcagtcaaagctgacttccctacacctagtatatctgactttgaaattccaacttctaatattagaaggataatttgctcaacctctggaggttttccagagcctcacctctcctggttggaaaatggagaagaattaaatgccatcaacacaacagtttcccaagatcctgaaactgagctctatgctgttagcagcaaactggatttcaatatgacaaccaaccacagcttcatgtgtctcatcaagtatggacatttaagagtgaatcagaccttcaactggaatacaaccaagcaagagcattttcctgataacctgctcccatcctgggccattaccttaatctcagtaaatggaatttttgtgatatgctgcctgacctactgctttgccccaagatgcagagagagaaggaggaatgagagattgagaagggaaagtgtacgccctgtataacagtgtccgcagaagcaaggggctgaaaagatctgaaggtagcctccgtcatctcttctgggatacatggatcgtggggatcatgaggcattcttcccttaacaaatttaagctgttttacccactacctcaccttcttaaaaacctctttcagattaagctgaacagttacaagatggctggcatccctctcctttctccccatatgcaatttgcttaatgtaacctcttcttttgccatgtttccattctgccatcttgaattgtcttgtcagccaattcattatctattaaacactaatttgag

SEQ ID NO: 929 - DNA, 2289 bp, Homo sapiens
  source 1..2289: mol_type = genomic DNA
ggcctgccgagtccgcggcgttccccggctgcagccgggagggggccgaggagtgactgagccccgggctgtgcagtccgacgccgactgaggcacgagcgggtgacgctgggcctgcagcgcggagcagaaagcagaacccgcagagtcctccctgctgctgtgtggacgacacgtgggcacaggcagaagtgggccctgtgaccagctgcactggtttcgtggaaggaagctccaggactggcgggatgggctcagcctgtatcaaagtcaccaaatactttctcttcctcttcaacttgatcttctttatcctgggcgcagtgatcctgggcttcggggtgtggatcctggccgacaagagcagtttcatctctgtcctgcaaacctcctccagctcgcttaggatgggggcctatgtcttcatcggcgtgggggcagtcactatgctcatgggcttcctgggctgcatcggcgccgtcaacgaggtccgctgcctgctggggctgtactttgctttcctgctcctgatcctcattgcccaggtgacggccggggccctcttctacttcaacatgggcaagctgaagcaggagatgggcggcatcgtgactgagctcattcgagactacaacagcagtcgcgaggacagcctgcaggatgcctgggactacgtgcaggctcaggtgaagtgctgcggctgggtcagcttctacaactggacagacaacgctgagctcatgaatcgccctgaggtcacctacccctgttcctgcgaagtcaagggggaagaggacaacagcctttctgtgaggaagggcttctgcgaggcccccggcaacaggacccagagtggcaaccaccctgaggactggcctgtgtaccaggagggctgcatggagaaggtgcaggcgtggctgcaggagaacctgggcatcatcctcggcgtgggcgtgggtgtggccatcatcgagctcctggggatggtcctgtccatctgcttgtgccggcacgtccattccgaagactacagcaaggtccccaagtactgaggcagctgctatccccatctccctgcctggcccccaacctcagggctcccaggggtctccctggctccctcctccaggcctgcctcccacttcactgcgaagaccctcttgcccatcctgactgaaagtagggggctttctggggcctagcgatctctcctggcctatccgctgccagccttgagccctggctgttctgtggttcctctgctcaccgcccatcagggttctcttagcaactcagagaaaaatgctccccacagcgtccctggcgcaggtgggctggacttctacctgccctcaagggtgtgtatattgtataggggcaactgtatgaaaaattggggaggagggggccgggcgcggtggctcacgcctgtaatcccagcactttgggaggccgaggcgggtggatcacgaggtcaggagatcgagaccatcctggctaacatggtgaaaccccgtctctactaaaaatacaaaaaaaatttagccgggcgcggtggcgggcacctgtagtcccagctacttgggaggctgaggcaggagaatggtgtgaacccgggagcggaggttgcagtgagctgagatcgtgctactgcactccagcctgggggacagaaagagactccgtctcaaaaaaaaaaaaaaaaaaaaaaaaaattggggagggaagggcgttagataaggcactctgggctgtcaggagactgcctactgggtgggtcaacttatttcccactatgacatttatatctttatttttcacaattatattgaaggcagtgggagaggggagagggtgggttttacctgatattaaggggtggcaccccttccccaggcctgatgcaggtccatctagacagctcagattagcctaggccatgccctagggacacggcctaggggagctgggctggagggggtctgcctgggtaaggggatctggcttggccctgagctgcttagggacaggtgagtccttgggggcatggcacagagctggtcctgtattctccagggtccggagctggccaggggcggggaggaggaggatggcttctcctgggagaaggtgggctggcctttcttggcaagcggtcctctggcccctggggagtggggtgggtgaggctgtgccttgtagggggagaggggagggggctttgtgtgcaccattctgtaaaacacactcaagattctaagactattaaagaggatttataacagtcta

SEQ ID NO: 930 - DNA, 967 bp, Homo sapiens
  source 1..967: mol_type = genomic DNA
gtccgcggcgttccccggctgcagccgggagggggccgaggagtgactgagccccgggctgtgcagtccgacgccgactgaggcacgagcgggtgacgctgggcctgcagcgcggagcagaaagcagaacccgcagagtcctccctgctgctgtgtggacgacacgtgggcacaggcagaagtgggccctgtgaccagctgcactggtttcgtggaaggaagctccaggactggcgggatgggctcagcctgtatcaaagtcaccaaatactttctcttcctcttcaacttgatcttctttatcctgggcgcagtgatcctgggcttcggggtgtggatcctggccgacaagagcagtttcatctctgtcctgcaaacctcctccagctcgcttaggatgggggcctatgtcttcatcggcgtgggggcagtcactatgctcatgggcttcctgggctgcatcggcgccgtcaacgaggtccgctgcctgctggggctgctgaagcaggagatgggcggcatcgtgactgagctcattcgagactacaacagcagtcgcgaggacagcctgcaggatgcctgggactacgtgcaggctcaggtgaagtgctgcggctgggtcagcttctacaactggacagacaacgctgagctcatgaatcgccctgaggtcacctacccctgttcctgcgaagtcaagggggaagaggacaacagcctttctgtgaggaagggcttctgcgaggcccccggcaacaggacccagagtggcaaccaccctgaggactggcctgtgtaccaggagggctgcatggagaaggtgcaggcgtggctgcaggagaacctgggcatcatcctcggcgtgggcgtgggtgtggccatcatcgagctcctggggatggtcctgtccatctgcttgtgccggcacgtccattccgaagactacagcaaggtccccaagtactga

SEQ ID NO: 931 - DNA, 584 bp, Homo sapiens
  source 1..584: mol_type = genomic DNA
agcagaacccgcaggtgagcaagggggcagcgggccggggtagcctgccggacaaccataggcaaagttagttttagcccccgcttctgcggtccggctcggacaactttcctcggaactagtgacaggtcggggcagctggtgggtgaaaaggagctttagccaccagtcctgaacccccagttctcacactcggccgtgcacagctgcgtgatcctgggtccgtccctctacctggctctggacctcccgggttccagcaggaggaagtgaaccagagtcctccctgctgctgtgtggacgacacgtgggcacaggcagaagtgggccctgtgaccagctgcactggtttcgtggaaggaagctccaggactggcgggatgggctcagcctgtatcaaagtcaccaaatactttctcttcctcttcaacttgatcttctttatcctgggcgcagtgatcctgggcttcggggtgtggatcctggccgacaagagcagtttcatctctgtcctgcaaacctcctccagctcgcttaggatgggggcctatgtcttcatcggcgtgggggcagtcactatgctc

SEQ ID NO: 932 - DNA, 468 bp, Homo sapiens
  source 1..468: mol_type = genomic DNA
gcagtccgacgccgactgaggcacgagcgggtgacgctgggcctgcagcgcggagcagaaagcagaacccgcagagtcctccctgctgctgtgtggacgacacgtgggcacaggcagaagtgggccctgtgaccagctgcactggtttcgtggaagcatttagagtcctggagtgctggtccctggggaggctcggcagcaggtcctggcattcagagctggcccagggttgagcacctgacacacccccaacctgccctgcgggcaaggacagaagaggcctgagaaccgtctcttcggactcaggggcagtggaactcagactgccttcaggaagctccaggactggcgggatgggctcagcctgtatcaaagtcaccaaatactttctcttcctcttcaacttgatcttctttatcctgggcgcagtgatcctgggcttcggggtgtggatcctggccgacaaga

SEQ ID NO: 933 - DNA, 573 bp, Homo sapiens
  source 1..573: mol_type = genomic DNA
aagcctcccagggcgtggcgtgaagcggggatttggtaggggagcgcagagcgaggcctgaggtgtttccctggcagaggtccctccactgggaaacaaacggagaggggagtatgtgttcccacgtgtacacataaaccgttttgaatgatacctgagtcctccctgctgctgtgtggacgacacgtgggcacaggcagaagtgggccctgtgaccagctgcactggtttcgtggaaggaagctccaggactggcgggatgggctcagcctgtatcaaagtcaccaaatactttctcttcctcttcaacttgatcttctttatcctgggcgcagtgatcctgggcttcggggtgtggatcctggccgacaagagcagtttcatctctgtcctgcaaacctcctccagctcgcttaggatgggggcctatgtcttcatcggcgtgggggcagtcactatgctcatgggcttcctgggctgcatcggcgccgtcaacgaggtccgctgcctgctggggctgtactttgctttcctgctcctgatcctcattgcccaggtgacggccggggccct

SEQ ID NO: 934 - DNA, 580 bp, Homo sapiens
  source 1..580: mol_type = genomic DNA
gagtgactgagccccgggctgtgcagtccgacgccgactgaggcacgagcgggtgacgctgggcctgcagcgcggagcagaaagcagaacccgcagttcaactgagccggaccccctaagacttcaagttggaaactcagtggggcttttccagagtcctccctgctgctgtgtggacgacacgtgggcacaggcagaagtgggccctgtgaccagctgcactggtttcgtggaaggaagctccaggactggcgggatgggctcagcctgtatcaaagtcaccaaatactttctcttcctcttcaacttgatcttctttatcctgggcgcagtgatcctgggcttcggggtgtggatcctggccgacaagagcagtttcatctctgtcctgcaaacctcctccagctcgcttaggatgggggcctatgtcttcatcggcgtgggggcagtcactatgctcatgggcttcctgggctgcatcggcgccgtcaacgaggtccgctgcctgctggggctgtactttgctttcctgctcctgatcctcattgcccaggtgacggccggggccctcttctacttc

SEQ ID NO: 935 - DNA, 2873 bp, Homo sapiens
  source 1..2873: mol_type = genomic DNA
gaatttccatccagcaatgcaggccatgggaggctgcagcagtgacgctgtcagatcccctttgtgagaataataatttttataacaacgtggctggaggactgatcaggagagagactggtgtgaattgaaggctgttgcaatggctccaagaagagatgaggctgtgtggtgagtttagccgctggatgaaaggccggaagaatgaggtcagcagcgcactgacaccgacacccaaagcttcggctgctgccgctctcatggaaatctcctgggggaagggagagggtccttcctcggtgaaaactggggctgctctagcgagttcctcagaagcgggcaggtcgctagttcctcttccttttcagccctcagtgcccattttgccaataaaaagtcccaaggtgacagtacaagagacgcctttagtgaaggcaaaggaagggacactcccctcctttgctgcctactctcgccctcacttcttgaaatctttggtctcccttcacccactctgtcactctcacaagacaaccatttccaaggactatttccaagcccttttcctcatccccaaacccgcagttttcagctgcccccagttgcctggccaggctgcctcgacggccctattcacgggccccagcctcctcgccgggctggaaggcgacaaccgcgaaaaggagggtgactctcctcggcgggggcttcgggtgacatcacatcctccaaatgcgaaatcaggctccgggccggccgaagggcgcaactttcccccctcggcgccccaccggctcccgcgcgcctcccctcgcgcccgagcttcgagccaagcagcgtcctggggagcgcgtcatggccttaccagtgaccgccttgctcctgccgctggccttgctgctccacgccgccaggccgagccagttccgggtgtcgccgctggatcggacctggaacctgggcgagacagtggagctgaagtgccaggtgctgctgtccaacccgacgtcgggctgctcgtggctcttccagccgcgcggcgccgccgccagtcccaccttcctcctatacctctcccaaaacaagcccaaggcggccgaggggctggacacccagcggttctcgggcaagaggttgggggacaccttcgtcctcaccctgagcgacttccgccgagagaacgagggctactatttctgctcggccctgagcaactccatcatgtacttcagccacttcgtgccggtcttcctgccagcgaagcccaccacgacgccagcgccgcgaccaccaacaccggcgcccaccatcgcgtcgcagcccctgtccctgcgcccagaggcgtgccggccagcggcggggggcgcagtgcacacgagggggctggacttcgcctgtgatatctacatctgggcgcccttggccgggacttgtggggtccttctcctgtcactggttatcaccctttactgcaaccacaggaaccgaagacgtgtttgcaaatgtccccggcctgtggtcaaatcgggagacaagcccagcctttcggcgagatacgtctaaccctgtgcaacagccactacattacttcaaactgagatccttccttttgagggagcaagtccttccctttcattttttccagtcttcctccctgtgtattcattctcatgattattattttagtgggggcggggtgggaaagattactttttctttatgtgtttgacgggaaacaaaactaggtaaaatctacagtacaccacaagggtcacaatactgttgtgcgcacatcgcggtagggcgtggaaaggggcaggccagagctacccgcagagttctcagaatcatgctgagagagctggaggcacccatgccatctcaacctcttccccgcccgttttacaaagggggaggctaaagcccagagacagcttgatcaaaggcacacagcaagtcagggttggagcagtagctggagggaccttgtctcccagctcagggctctttcctccacaccattcaggtctttctttccgaggcccctgtctcagggtgaggtgcttgagtctccaacggcaagggaacaagtacttcttgatacctgggatactgtgcccagagcctcgaggaggtaatgaattaaagaagagaactgcctttggcagagttctataatgtaaacaatatcagactttttttttttataatcaagcctaaaattgtatagacctaaaataaaatgaagtggtgagcttaaccctggaaaatgaatccctctatctctaaagaaaatctctgtgaaacccctatgtggaggcggaattgctctcccagcccttgcattgcagaggggcccatgaaagaggacaggctacccctttacaaatagaatttgagcatcagtgaggttaaactaaggccctcttgaatctctgaatttgagatacaaacatgttcctgggatcactgatgactttttatactttgtaaagacaattgttggagagcccctcacacagccctggcctctgctcaactagcagatacagggatgaggcagacctgactctcttaaggaggctgagagcccaaactgctgtcccaaacatgcacttccttgcttaaggtatggtacaagcaatgcctgcccattggagagaaaaaacttaagtagataaggaaataagaaccactcataattcttcaccttaggaataatctcctgttaatatggtgtacattcttcctgattattttctacacatacatgtaaaatatgtctttcttttttaaatagggttgtactatgctgttatgagtggctttaatgaataaacatttgtagcatcctctttaatgggtaaacagca

SEQ ID NO: 936 - DNA, 1977 bp, Homo sapiens
  source 1..1977: mol_type = genomic DNA
ccccaccggctcccgcgcgcctcccctcgcgcccgagcttcgagccaagcagcgtcctggggagcgcgtcatggccttaccagtgaccgccttgctcctgccgctggccttgctgctccacgccgccaggccgagccagttccgggtgtcgccgctggatcggacctggaacctgggcgagacagtggagctgaagtgccaggtgctgctgtccaacccgacgtcgggctgctcgtggctcttccagccgcgcggcgccgccgccagtcccaccttcctcctatacctctcccaaaacaagcccaaggcggccgaggggctggacacccagcggttctcgggcaagaggttgggggacaccttcgtcctcaccctgagcgacttccgccgagagaacgagggctactatttctgctcggccctgagcaactccatcatgtacttcagccacttcgtgccggtcttcctgccagcgaagcccaccacgacgccagcgccgcgaccaccaacaccggcgcccaccatcgcgtcgcagcccctgtccctgcgcccagaggcgtgccggccagcggcggggggcgcagggaaccgaagacgtgtttgcaaatgtccccggcctgtggtcaaatcgggagacaagcccagcctttcggcgagatacgtctaaccctgtgcaacagccactacattacttcaaactgagatccttccttttgagggagcaagtccttccctttcattttttccagtcttcctccctgtgtattcattctcatgattattattttagtgggggcggggtgggaaagattactttttctttatgtgtttgacgggaaacaaaactaggtaaaatctacagtacaccacaagggtcacaatactgttgtgcgcacatcgcggtagggcgtggaaaggggcaggccagagctacccgcagagttctcagaatcatgctgagagagctggaggcacccatgccatctcaacctcttccccgcccgttttacaaagggggaggctaaagcccagagacagcttgatcaaaggcacacagcaagtcagggttggagcagtagctggagggaccttgtctcccagctcagggctctttcctccacaccattcaggtctttctttccgaggcccctgtctcagggtgaggtgcttgagtctccaacggcaagggaacaagtacttcttgatacctgggatactgtgcccagagcctcgaggaggtaatgaattaaagaagagaactgcctttggcagagttctataatgtaaacaatatcagactttttttttttataatcaagcctaaaattgtatagacctaaaataaaatgaagtggtgagcttaaccctggaaaatgaatccctctatctctaaagaaaatctctgtgaaacccctatgtggaggcggaattgctctcccagcccttgcattgcagaggggcccatgaaagaggacaggctacccctttacaaatagaatttgagcatcagtgaggttaaactaaggccctcttgaatctctgaatttgagatacaaacatgttcctgggatcactgatgactttttatactttgtaaagacaattgttggagagcccctcacacagccctggcctctgctcaactagcagatacagggatgaggcagacctgactctcttaaggaggctgagagcccaaactgctgtcccaaacatgcacttccttgcttaaggtatggtacaagcaatgcctgcccattggagagaaaaaacttaagtagataaggaaataagaaccactcataattcttcaccttaggaataatctcctgttaatatggtgtacattcttcctgattattttctacacatacatgtaaaatatgtctttcttttttaaatagggttgtactatgctgttatgagtggctttaatgaataaacatttgtagcatcctctttaatgggtaaacagca

SEQ ID NO: 937 - DNA, 3048 bp, Homo sapiens
  source 1..3048: mol_type = genomic DNA
ctctgtaaaataaatgcgctgggccggatcttttctgagttctcttctcccctacgaattctagatccctcctctgtcctccctgcgccagggaccttcgggcgacccttccctgtacccccaccccaccctctctggaccccgtttctgcctcagtacggcgcgctgagctctgccccctgcccaggccctgaccccctcaggagccgcggtttcctggggtaacagtgggaaacgtgtcggccgtctccgctcaggcgcttgctgtgtacagaaaggctgattcaggcacaccggctctcgtcgccttggtggccctccccagccctcctccgcgcctgctccgggtggcgctccgctgggctcctcgtgcgcctgtccgcgaccgcacccacctcatcctggcacccccatcgtggcatcacgtgttccctcatctgtcctcatggctggcgtgcccctctgcggtgagacctgcagaacaggaattggtgccgggtcagcagccggcgatgaagccggacgaagcctgcaaaccccacccatacgccagcttcacatagctcctatccattgcacagcagcgtggggaagcaccgttctctaccctccaaacaaaagcatgaaccaggtgcagtggctcacgtctgtaatcccagcattttggaggccaaggtggatggatggattccttgagtccaggagttcaagaccagcctgggcaacatggtgaacccccatctctacaaaaatttagccagttttcagctgcccccagttgcctggccaggctgcctcgacggccctattcacgggccccagcctcctcgccgggctggaaggcgacaaccgcgaaaaggagggtgactctcctcggcgggggcttcgggtgacatcacatcctccaaatgcgaaatcaggctccgggccggccgaagggcgcaactttcccccctcggcgccccaccggctcccgcgcgcctcccctcgcgcccgagcttcgagccaagcagcgtcctggggagcgcgtcatggccttaccagtgaccgccttgctcctgccgctggccttgctgctccacgccgccaggccgagccagttccgggtgtcgccgctggatcggacctggaacctgggcgagacagtggagctgaagtgccaggtgctgctgtccaacccgacgtcgggctgctcgtggctcttccagccgcgcggcgccgccgccagtcccaccttcctcctatacctctcccaaaacaagcccaaggcggccgaggggctggacacccagcggttctcgggcaagaggttgggggacaccttcgtcctcaccctgagcgacttccgccgagagaacgagggctactatttctgctcggccctgagcaactccatcatgtacttcagccacttcgtgccggtcttcctgccagcgaagcccaccacgacgccagcgccgcgaccaccaacaccggcgcccaccatcgcgtcgcagcccctgtccctgcgcccagaggcgtgccggccagcggcggggggcgcagtgcacacgagggggctggacttcgcctgtgatatctacatctgggcgcccttggccgggacttgtggggtccttctcctgtcactggttatcaccctttactgcaaccacaggaaccgaagacgtgtttgcaaatgtccccggcctgtggtcaaatcgggagacaagcccagcctttcggcgagatacgtctaaccctgtgcaacagccactacattacttcaaactgagatccttccttttgagggagcaagtccttccctttcattttttccagtcttcctccctgtgtattcattctcatgattattattttagtgggggcggggtgggaaagattactttttctttatgtgtttgacgggaaacaaaactaggtaaaatctacagtacaccacaagggtcacaatactgttgtgcgcacatcgcggtagggcgtggaaaggggcaggccagagctacccgcagagttctcagaatcatgctgagagagctggaggcacccatgccatctcaacctcttccccgcccgttttacaaagggggaggctaaagcccagagacagcttgatcaaaggcacacagcaagtcagggttggagcagtagctggagggaccttgtctcccagctcagggctctttcctccacaccattcaggtctttctttccgaggcccctgtctcagggtgaggtgcttgagtctccaacggcaagggaacaagtacttcttgatacctgggatactgtgcccagagcctcgaggaggtaatgaattaaagaagagaactgcctttggcagagttctataatgtaaacaatatcagactttttttttttataatcaagcctaaaattgtatagacctaaaataaaatgaagtggtgagcttaaccctggaaaatgaatccctctatctctaaagaaaatctctgtgaaacccctatgtggaggcggaattgctctcccagcccttgcattgcagaggggcccatgaaagaggacaggctacccctttacaaatagaatttgagcatcagtgaggttaaactaaggccctcttgaatctctgaatttgagatacaaacatgttcctgggatcactgatgactttttatactttgtaaagacaattgttggagagcccctcacacagccctggcctctgctcaactagcagatacagggatgaggcagacctgactctcttaaggaggctgagagcccaaactgctgtcccaaacatgcacttccttgcttaaggtatggtacaagcaatgcctgcccattggagagaaaaaacttaagtagataaggaaataagaaccactcataattcttcaccttaggaataatctcctgttaatatggtgtacattcttcctgattattttctacacatacatgtaaaatatgtctttcttttttaaatagggttgtactatgctgttatgagtggctttaatgaataaacatttgtagcatcctctttaatgggtaaacagc

SEQ ID NO: 938 - DNA, 597 bp, Homo sapiens
  source 1..597: mol_type = genomic DNA
atggccttaccagtgaccgccttgctcctgccgctggccttgctgctccacgccgccaggccgagccagttccgggtgtcgccgctggatcggacctggaacctgggcgagacagtggagctgaagtgccaggtgctgctgtccaacccgacgtcgggctgctcgtggctcttccagccgcgcggcgccgccgccagtcccaccttcctcctatacctctcccaaaacaagcccaaggcggccgaggggctggacacccagcggttctcgggcaagaggttgggggacaccttcgtcctcaccctgagcgacttccgccgagagaacgagggctactatttctgctcggccctgagcaactccatcatgtacttcagccacttcgtgccggtcttcctgccagtgcacacgagggggctggacttcgcctgtgatatctacatctgggcgcccttggccgggacttgtggggtccttctcctgtcactggttatcaccctttactgcaaccacaggaaccgaagacgtgtttgcaaatgtccccggcctgtggtcaaatcgggagacaagcccagcctttcggcgagatacgtctaa

SEQ ID NO: 939 - DNA, 2091 bp, Homo sapiens
  source 1..2091: mol_type = genomic DNA
gaaatcaggctccgggccggccgaagggcgcaactttcccccctcggcgccccaccggctcccgcgcgcctcccctcgcgcccgagcttcgagccaagcagcgtcctggggagcgcgtcatggccttaccagtgaccgccttgctcctgccgctggccttgctgctccacgccgccaggccgagccagttccgggtgtcgccgctggatcggacctggaacctgggcgagacagtggagctgaagtgccaggtgctgctgtccaacccgacgtcgggctgctcgtggctcttccagccgcgcggcgccgccgccagtcccaccttcctcctatacctctcccaaaacaagcccaaggcggccgaggggctggacaccctgagcgacttccgccgagagaacgagggctactatttctgctcggccctgagcaactccatcatgtacttcagccacttcgtgccggtcttcctgccagcgaagcccaccacgacgccagcgccgcgaccaccaacaccggcgcccaccatcgcgtcgcagcccctgtccctgcgcccagaggcgtgccggccagcggcggggggcgcagtgcacacgagggggctggacttcgcctgtgatatctacatctgggcgcccttggccgggacttgtggggtccttctcctgtcactggttatcaccctttactgcaaccacaggaaccgaagacgtgtttgcaaatgtccccggcctgtggtcaaatcgggagacaagcccagcctttcggcgagatacgtctaaccctgtgcaacagccactacattacttcaaactgagatccttccttttgagggagcaagtccttccctttcattttttccagtcttcctccctgtgtattcattctcatgattattattttagtgggggcggggtgggaaagattactttttctttatgtgtttgacgggaaacaaaactaggtaaaatctacagtacaccacaagggtcacaatactgttgtgcgcacatcgcggtagggcgtggaaaggggcaggccagagctacccgcagagttctcagaatcatgctgagagagctggaggcacccatgccatctcaacctcttccccgcccgttttacaaagggggaggctaaagcccagagacagcttgatcaaaggcacacagcaagtcagggttggagcagtagctggagggaccttgtctcccagctcagggctctttcctccacaccattcaggtctttctttccgaggcccctgtctcagggtgaggtgcttgagtctccaacggcaagggaacaagtacttcttgatacctgggatactgtgcccagagcctcgaggaggtaatgaattaaagaagagaactgcctttggcagagttctataatgtaaacaatatcagactttttttttttataatcaagcctaaaattgtatagacctaaaataaaatgaagtggtgagcttaaccctggaaaatgaatccctctatctctaaagaaaatctctgtgaaacccctatgtggaggcggaattgctctcccagcccttgcattgcagaggggcccatgaaagaggacaggctacccctttacaaatagaatttgagcatcagtgaggttaaactaaggccctcttgaatctctgaatttgagatacaaacatgttcctgggatcactgatgactttttatactttgtaaagacaattgttggagagcccctcacacagccctggcctctgctcaactagcagatacagggatgaggcagacctgactctcttaaggaggctgagagcccaaactgctgtcccaaacatgcacttccttgcttaaggtatggtacaagcaatgcctgcccattggagagaaaaaacttaagtagataaggaaataagaaccactcataattcttcaccttaggaataatctcctgttaatatggtgtacattcttcctgattattttctacacatacatgtaaaatatgtctttcttttttaaatagggttgtactatgctgttatgagtggctttaatgaataaacatttgtagcatcctctttaatgggtaaacagc

SEQ ID NO: 940 - DNA, 2942 bp, Homo sapiens
  source 1..2942: mol_type = genomic DNA
ctctgtaaaataaatgcgctgggccggatcttttctgagttctcttctcccctacgaattctagatccctcctctgtcctccctgcgccagggaccttcgggcgacccttccctgtacccccaccccaccctctctggaccccgtttctgcctcagtacggcgcgctgagctctgccccctgcccaggccctgaccccctcaggagccgcggtttcctggggtaacagtgggaaacgtgtcggccgtctccgctcaggcgcttgctgtgtacagaaaggctgattcaggcacaccggctctcgtcgccttggtggccctccccagccctcctccgcgcctgctccgggtggcgctccgctgggctcctcgtgcgcctgtccgcgaccgcacccacctcatcctggcacccccatcgtggcatcacgtgttccctcatctgtcctcatggctggcgtgcccctctgcggtgagacctgcagaacaggaattggtgccgggtcagcagccggcgatgaagccggacgaagcctgcaaaccccacccatacgccagcttcacatagctcctatccattgcacagcagcgtggggaagcaccgttctctaccctccaaacaaaagcatgaaccaggtgcagtggctcacgtctgtaatcccagcattttggaggccaaggtggatggatggattccttgagtccaggagttcaagaccagcctgggcaacatggtgaacccccatctctacaaaaatttagccagttttcagctgcccccagttgcctggccaggctgcctcgacggccctattcacgggccccagcctcctcgccgggctggaaggcgacaaccgcgaaaaggagggtgactctcctcggcgggggcttcgggtgacatcacatcctccaaatgcgaaatcaggctccgggccggccgaagggcgcaactttcccccctcggcgccccaccggctcccgcgcgcctcccctcgcgcccgagcttcgagccaagcagcgtcctggggagcgcgtcatggccttaccagtgaccgccttgctcctgccgctggccttgctgctccacgccgccaggccgagccagttccgggtgtcgccgctggatcggacctggaacctgggcgagacagtggagctgaagtgccaggtgctgctgtccaacccgacgtcgggctgctcgtggctcttccagccgcgcggcgccgccgccagtcccaccttcctcctatacctctcccaaaacaagcccaaggcggccgaggggctggacacccagcggttctcgggcaagaggttgggggacaccttcgtcctcaccctgagcgacttccgccgagagaacgagggctactatttctgctcggccctgagcaactccatcatgtacttcagccacttcgtgccggtcttcctgccagcgaagcccaccacgacgccagcgccgcgaccaccaacaccggcgcccaccatcgcgtcgcagcccctgtccctgcgcccagaggcgtgccggccagcggcggggggcgcagggaaccgaagacgtgtttgcaaatgtccccggcctgtggtcaaatcgggagacaagcccagcctttcggcgagatacgtctaaccctgtgcaacagccactacattacttcaaactgagatccttccttttgagggagcaagtccttccctttcattttttccagtcttcctccctgtgtattcattctcatgattattattttagtgggggcggggtgggaaagattactttttctttatgtgtttgacgggaaacaaaactaggtaaaatctacagtacaccacaagggtcacaatactgttgtgcgcacatcgcggtagggcgtggaaaggggcaggccagagctacccgcagagttctcagaatcatgctgagagagctggaggcacccatgccatctcaacctcttccccgcccgttttacaaagggggaggctaaagcccagagacagcttgatcaaaggcacacagcaagtcagggttggagcagtagctggagggaccttgtctcccagctcagggctctttcctccacaccattcaggtctttctttccgaggcccctgtctcagggtgaggtgcttgagtctccaacggcaagggaacaagtacttcttgatacctgggatactgtgcccagagcctcgaggaggtaatgaattaaagaagagaactgcctttggcagagttctataatgtaaacaatatcagactttttttttttataatcaagcctaaaattgtatagacctaaaataaaatgaagtggtgagcttaaccctggaaaatgaatccctctatctctaaagaaaatctctgtgaaacccctatgtggaggcggaattgctctcccagcccttgcattgcagaggggcccatgaaagaggacaggctacccctttacaaatagaatttgagcatcagtgaggttaaactaaggccctcttgaatctctgaatttgagatacaaacatgttcctgggatcactgatgactttttatactttgtaaagacaattgttggagagcccctcacacagccctggcctctgctcaactagcagatacagggatgaggcagacctgactctcttaaggaggctgagagcccaaactgctgtcccaaacatgcacttccttgcttaaggtatggtacaagcaatgcctgcccattggagagaaaaaacttaagtagataaggaaataagaaccactcataattcttcaccttaggaataatctcctgttaatatggtgtacattcttcctgattattttctacacatacatgtaaaatatgtctttcttttttaaatagggttgtactatgctgttatgagtggctttaatgaataaacatttgtagcatcctctttaatgggtaaacagcatccg

SEQ ID NO: 941 - DNA, 1230 bp, Homo sapiens
  source 1..1230: mol_type = genomic DNA
gaatttccatccagcaatgcaggccatgggaggctgcagcagtgacgctgtcagatcccctttgtgagaataataatttttataacaacgtggctggaggactgatcaggagagagactggtgtgaattgaaggctgttgcaatggctccaagaagagatgaggctgtgtgttttcagctgcccccagttgcctggccaggctgcctcgacggccctattcacgggccccagcctcctcgccgggctggaaggcgacaaccgcgaaaaggagggtgactctcctcggcgggggcttcgggtgacatcacatcctccaaatgcgaaatcaggctccgggccggccgaagggcgcaactttcccccctcggcgccccaccggctcccgcgcgcctcccctcgcgcccgagcttcgagccaagcagcgtcctggggagcgcgtcatggccttaccagtgaccgccttgctcctgccgctggccttgctgctccacgccgccaggccgagccagttccgggtgtcgccgctggatcggacctggaacctgggcgagacagtggagctgaagtgccaggtgctgctgtccaacccgacgtcgggctgctcgtggctcttccagccgcgcggcgccgccgccagtcccaccttcctcctatacctctcccaaaacaagcccaaggcggccgaggggctggacacccagcggttctcgggcaagaggttgggggacaccttcgtcctcaccctgagcgacttccgccgagagaacgagggctactatttctgctcggccctgagcaactccatcatgtacttcagccacttcgtgccggtcttcctgccagcgaagcccaccacgacgccagcgccgcgaccaccaacaccggcgcccaccatcgcgtcgcagcccctgtccctgcgcccagaggcgtgccggccagcggcggggggcgcagtgcacacgagggggctggacttcgcctgtgatatctacatctgggcgcccttggccgggacttgtggggtccttctcctgtcactggttatcaccctttactgcaaccacaggaaccgaagacgtgtttgcaaatgtccccggcctgtggtcaaatcgggagacaagcccagcctttcggcgagatacgtctaaccctgtgcaacagccactacattacttcaaactgagatccttccttttgagggagcaagtccttccctttcattttttcca

SEQ ID NO: 942 - DNA, 759 bp, Homo sapiens
  source 1..759: mol_type = genomic DNA
cttggaggttggcggcgcggggctgaaggctagcaaaccgagcgatcatgtcgcacaaacaaatttactattcggacaaatacgacgacgaggagtttgagtatcgacatgtcatgctgcccaaggacatagccaagctggtccctaaaacccatctgatgtctgaatctgaatggaggaatcttggcgttcagcagagtcagggatgggtccattatatgatccatgaaccagaacctcacatcttgctgttccggcgcccactacccaagaaaccaaagaaatgaagctggcaagctacttttcagcctcaagctttacacagctgtccttacttcctaacatctttctgataacattattatgttgccttcttgtttctcactttgatatttaaaagatgttcaatacactgtttgaatgtgctggtaactgctttgcttcttgagtagagccaccaccaccatagcccagccagatgagtgctctgtggacccacagcctaagctgagtgtgaccccagaagccacgatgtgctctgtatccagaacacacttggcagatggaggaagcatctgagtttgagaccatggctgttacagggatcatgtaaacttgctgtttttgttttttcctgccgggtgttgtatgtgtggtgacttgcggatttatgtttcagtgtactggaaactttccattttattcaagaaatctgttcatgttaaaagccttgattaaagaggaagtttttataatcta

SEQ ID NO: 943 - DNA, 820 bp, Homo sapiens
  source 1..820: mol_type = genomic DNA
gtgctgttgggagttgcttggaggttggcggcgcggggctgaaggctagcaaaccgagcgatcatgtcgcacaaacaaatttactattcggacaaatacgacgacgaggagtttgagtatcgacatgtcatgctgcccaaggacatagccaagctggtccctaaaacccatctgatgtctgaatctgaatggaggaatcttggcgttcagcagagtcagggatgggtccattatatgatccatgaaccaggtcagtgcactggctaaaaacaaccatatagaactgctacactgagagaatgaaagaataagattgtataacccaaatagggagataggaaatggtttactggttccttccccctccagtcgtgggggatttttttaaaaaaaaactagtgaccaaaaataagactaaaatatctgggaagttcagagacaacctgtcactgaaaaacctcctgtaatctttcattcaatcagagggtattctttttaaggccacatatagcctgatcatagcccctgcctcattctccatcgaaaacattcttggatgtgttctaaataagcaaaggaaagtatatttattgataagacaccagacacccagctgccaggcaaaactaataagggacaccctggggctgtataaacatagcaaaagaactgatattaacaattctgtacttggcagacagtccagacttctgggtctgcttctaaggccatatgcttaagtctttatttagttataaagatctgagtgggtgatagctggggaggtggtagtggaatacactataggttgtacatagaa

SEQ ID NO: 944 - DNA, 912 bp, Homo sapiens
  source 1..912: mol_type = genomic DNA
tgaaagcgaggccaaagtgggtgggagcgcgtgctgttgggagttgcttggaggttggcggcgcggggctgaaggctagcaaaccgagcgatcatgtcgcacaaacaaatttactattcggacaaatacgacgacgaggagtttgagtatcggttagtgctggcgcgggagcaatagcgagggtcgtgagctttggccgctgagggcacaaggaattagtaacaggaactgaggcgatagaattggcgcatgcgtacgagacatgtcatgctgcccaaggacatagccaagctggtccctaaaacccatctgatgtctgaatctgaatggaggaatcttggcgttcagcagagtcagggatgggtccattatatgatccatgaaccagaacctcacatcttgctgttccggcgcccactacccaagaaaccaaagaaatgaagctggcaagctacttttcagcctcaagctttacacagctgtccttacttcctaacatctttctgataacattattatgttgccttcttgtttctcactttgatatttaaaagatgttcaatacactgtttgaatgtgctggtaactgctttgcttcttgagtagagccaccaccaccatagcccagccagatgagtgctctgtggacccacagcctaagctgagtgtgaccccagaagccacgatgtgctctgtatccagaacacacttggcagatggaggaagcatctgagtttgagaccatggctgttacagggatcatgtaaacttgctgtttttgttttttcctgccgggtgttgtatgtgtggtgacttgcggatttatgtttcagtgtactggaaactttccattttattcaagaaatctgttcatgttaaaagccttgattaaagaggaagtttttataatct

SEQ ID NO: 945 - DNA, 613 bp, Homo sapiens
  source 1..613: mol_type = genomic DNA
agtctccggcgagttgttgcctgggctggacgtggttttgtctgctgcgcccgctcttcgcgctctcgtttcattttctgcagcgcgccagcaggatggcccacaagcagatctactactcggacaagtacttcgacgaacactacgagtaccggcatgttatgttacccagagaactttccaaacaagtacctaaaactcatctgatgtctgaagaggagtggaggagacttggtgtccaacagagtctaggctgggttcattacatgattcatgagccagaaccacatattcttctctttagacgacctcttccaaaagatcaacaaaaatgaagtttatctggggatcgtcaaatctttttcaaatttaatgtatatgtgtatataaggtagtattcagtgaatacttgagaaatgtacaaatctttcatccatacctgtgcatgagctgtattcttcacagcaacagagctcagttaaatgcaactgcaagtaggttactgtaagatgtttaagataaaagttcttccagtcagtttttctcttaagtgcctgtttgagtttactgaaacagtttacttttgttcaataaagtttgtatgttgcattta

SEQ ID NO: 946 - DNA, 1891 bp, Homo sapiens
  source 1..1891: mol_type = genomic DNA
agcatgacccggcctgaagtagcggcggaacggaagtcgcttgtgtatgaacgcagcggcggacctgtgaggggatccgacttgccggcagaacttacgctgcgggaccccgggcactgttgctgctgcgggagactgtgggctgtttagtgccatgcaccctttacagtgtgtcctccaagtgcagaggtctctggggtggggaccattggcctctgtgtcttggctgtcgctgaggatgtgcagggcacacagcagtctctctagtaccatgtgtcccagtccagagaggcaggaggatggagctcggaaggatttcagctccaggctggctgctggaccgacttttcaacattttttaaaaagtgcctcagctcctcaggagaagctgtcttcagaagtggaagacccacctccctatctcatgatggatgaacttcttggaaggcagagaaaagtctacctcgagacctatggctgccagatgaatgtgaatgacacagagatagcctggtccatcttacagaagagtggctacctgcggaccagtaacctccaagaggcagatgtgattctccttgtcacatgctctatcagggagaaggctgagcagaccatctggaaccgtttacatcagcttaaagccttgaagacaaggcggccccgctcccgggttcctctgaggattggaattctaggctgcatggctgagaggttgaaggaggagattctcaacagagagaaaatggtagatattttggctggtcctgatgcctaccgggaccttccccggctgctggctgttgctgagtcgggccagcaagctgccaacgtgctgctctctctggacgagacctatgctgatgtcatgccagtccagacaagcgccagtgccacgtctgcctttgtgtcaatcatgcgaggctgtgacaacatgtgtagctactgcattgttcctttcacccggggcagggagaggagtcggcctattgcctccattctagaggaagtgaagaagctttctgagcaggttctgcagctgattcatgagagagataacatctgtaaacagatccacctgccagcccagagtggaagcagccgtgtgttggaggccatgcggaggggatattcaagagaagcttatgtggagttagttcaccatattagagaatctattccaggtgtgagcctcagcagcgatttcattgctggcttttgtggtgagacggaggaagatcacgtccagacagtctctttgctccgggaagttcagtacaacatgggcttcctctttgcctacagcatgagacagaagacacgggcatatcataggctgaaggatgatgtcccggaagaggtaaaattaaggcgtttggaggaactcatcactatcttccgagaagaagcaacaaaagccaatcagacctctgtgggctgtacccagttggtgctagtggaagggctcagtaaacgctctgccactgacctgtgtggcaggaatgatggaaaccttaaggtgatcttccctgatgcagagatggaggatgtcaataaccctgggctcagggtcagagcccagcctggggactatgtgctggtgaagatcacctcagccagttctcagacacttaggggacatgttctctgcaggaccactctgagggactcttctgcatattgctgacctgagaggatggcctcagagctgacttgggcaatcctccccaacaggaaggggagacattgcctgccactgaggaaacaggtcatgaaggtggagataagctgcaaggggcgaagcaactttatgtcagtggaaaacgtgtctctttaaagctgctatgtgaacagcttttacagtcattaaatttacctaaactaaggttaa

SEQ ID NO: 947 - DNA, 2122 bp, Homo sapiens
  source 1..2122: mol_type = genomic DNA
agcatgacccggcctgaagtagcggcggaacggaagtcgcttgtgtatgaacgcagcggcggacctgtgaggggatccgacttgccggcagaacttacgctgcgggaccccgggcactgttgctgctgcgggagactgtgggctgtttagtgccatgcaccctttacagtgtgtcctccaagtgcagaggtctctggggtggggaccattggcctctgtgtcttggctgtcgctgaggatgtgcagggcacacagcagtctctctagtaccatgtgtcccagtccagagaggcaggaggatggagctcggaaggatttcagctccaggctggctgctggaccgacttttcaacattttttaaaaagtgcctcagctcctcaggagaagctgtcttcagaagtggaagacccacctccctatctcatgatggatgaacttcttggaaggcagagaaaagtctacctcgagacctatggctgccagatgaatgtgaatgacacagagatagcctggtccatcttacagaagagtggctacctgcggaccagtaacctccaagaggcagatgtgattctccttgtcacatgctctatcagggagaaggctgagcagaccatctggaaccgtttacatcagcttaaagccttgaagacaaggcggccccgctcccgggttcctctgaggattggaattctaggctgcatggctgagaggttgaaggaggagattctcaacagagagaaaatggtagatattttggctggtcctgatgcctaccgggaccttccccggctgctggctgttgctgagtcgggccagcaagctgccaacgtgctgctctctctggacgagacctatgctgatgtcatgccagtccagacaagcgccagtgccacgtctgcctttgtgtcaatcatgcgaggctgtgacaacatgtgtagctactgcattgttcctttcacccggggcagggagaggagtcggcctattgcctccattctagaggaagtgaagaagctttctgagcaggggctgaaagaagtgacacttcttggtcagaatgttaatagttttcgggacaattcggaggtccagttcaacagtgcagtgcctaccaatctcagtcgtggctttaccaccaactataaaaccaagcaaggaggacttcgttttgctcatcttctggatcaggtctccagagtagatcctgaaatgaggatccgttttacctctccccaccccaaggattttcctgatgaggttctgcagctgattcatgagagagataacatctgtaaacagatccacctgccagcccagagtggaagcagccgtgtgttggaggccatgcggaggggatattcaagagaagcttatgtggagttagttcaccatattagagaatctattccaggtgtgagcctcagcagcgatttcattgctggcttttgtggtgagacggaggaagatcacgtccagacagtctctttgctccgggaagttcagtacaacatgggcttcctctttgcctacagcatgagacagaagacacgggcatatcataggctgaaggatgatgtcccggaagaggtaaaattaaggcgtttggaggaactcatcactatcttccgagaagaagcaacaaaagccaatcagacctctgtgggctgtacccagttggtgctagtggaagggctcagtaaacgctctgccactgacctgtgtggcaggaatgatggaaaccttaaggtgatcttccctgatgcagagatggaggatgtcaataaccctgggctcagggtcagagcccagcctggggactatgtgctggtgaagatcacctcagccagttctcagacacttaggggacatgttctctgcaggaccactctgagggactcttctgcatattgctgacctgagaggatggcctcagagctgacttgggcaatcctccccaacaggaaggggagacattgcctgccactgaggaaacaggtcatgaaggtggagataagctgcaaggggcgaagcaactttatgtcagtggaaaacgtgtctctttaaagctgctatgtgaacagcttttacagtcattaaatttacctaaactaaggttaa

SEQ ID NO: 948 - DNA, 2164 bp, Homo sapiens
  source 1..2164: mol_type = genomic DNA
agcatgacccggcctgaagtagcggcggaacggaagtcgcttgtgtatgaacgcagcggcggacctgtgaggggatccgacttgccggcagaacttacgctgcgggaccccgggcactgttgctgctgcgggagactgtgggctgtttagtgccatgcaccctttacagtgtgtcctccaagtgcagaggtctctggggtggggaccattggcctctgtgtcttggctgtcgctgaggatgtgcagggcacacagcagtctctctagtaccatgtgtcccagtccagagaggcaggaggatggagctcggaaggatttcagctccaggctggctgctggaccgacttttcaacattttttaaaaagtgcctcagctcctcaggagaagctgtcttcagaagtggaagacccacctccctatctcatgatggatgaacttcttggaaggcagagaaaagtctacctcgagacctatggctgccagatgaatgtgaatgacacagagatagcctggtccatcttacagaagagtggctacctgcggaccagtaacctccaagaggcagatgtgattctccttgtcacatgctctatcagggagaaggctgagcagaccatctggaaccgtttacatcagcttaaagccttgaagacaaggcggccccgctcccgggttcctctgaggattggaattctaggctgcatggctgagaggttgaaggaggagattctcaacagagagaaaatggtagatattttggctggtcctgatgcctaccgggaccttccccggctgctggctgttgctgagtcgggccagcaagctgccaacgtgctgctctctctggacgagacctatgctgatgtcatgccagtccagacaagcgccagtgccacgtctgcctttgtgtcaatcatgcgaggctgtgacaacatgtgtagctactgcattgttcctttcacccggggcagggagaggagtcggcctattgcctccattctagaggaagtgaagaagctttctgagcaggtgttcctcccacctcggcctcccaaagtgttgggattacaggggctgaaagaagtgacacttcttggtcagaatgttaatagttttcgggacaattcggaggtccagttcaacagtgcagtgcctaccaatctcagtcgtggctttaccaccaactataaaaccaagcaaggaggacttcgttttgctcatcttctggatcaggtctccagagtagatcctgaaatgaggatccgttttacctctccccaccccaaggattttcctgatgaggttctgcagctgattcatgagagagataacatctgtaaacagatccacctgccagcccagagtggaagcagccgtgtgttggaggccatgcggaggggatattcaagagaagcttatgtggagttagttcaccatattagagaatctattccaggtgtgagcctcagcagcgatttcattgctggcttttgtggtgagacggaggaagatcacgtccagacagtctctttgctccgggaagttcagtacaacatgggcttcctctttgcctacagcatgagacagaagacacgggcatatcataggctgaaggatgatgtcccggaagaggtaaaattaaggcgtttggaggaactcatcactatcttccgagaagaagcaacaaaagccaatcagacctctgtgggctgtacccagttggtgctagtggaagggctcagtaaacgctctgccactgacctgtgtggcaggaatgatggaaaccttaaggtgatcttccctgatgcagagatggaggatgtcaataaccctgggctcagggtcagagcccagcctggggactatgtgctggtgaagatcacctcagccagttctcagacacttaggggacatgttctctgcaggaccactctgagggactcttctgcatattgctgacctgagaggatggcctcagagctgacttgggcaatcctccccaacaggaaggggagacattgcctgccactgaggaaacaggtcatgaaggtggagataagctgcaaggggcgaagcaactttatgtcagtggaaaacgtgtctctttaaagctgctatgtgaacagcttttacagtcattaaatttacctaaactaaggttaa

SEQ ID NO: 949 - DNA, 1628 bp, Homo sapiens
  source 1..1628: mol_type = genomic DNA
gtgtatgaacgcagcggcggacctgtgaggggatccgacttgccggcagaacttacgctgcgggaccccgggcactgttgctgctgcgggagactgtgggctgtttagtgccatgcaccctttacagtgtgtcctccaagtgcagaggtctctggggtggggaccattggcctctgtgtcttggctgtcgctgaggatgtgcagggcacacagcagtctctctagtaccatgtgtcccagtccagagaggcaggaggatggagctcggaaggatttcagctccaggctggctgctggaccgacttttcaacattttttaaaaagtgcctcagctcctcaggagaagctgtcttcagaagtggaagacccacctccctatctcatgatggatgaacttcttggaaggcagagaaaagtctacctcgagacctatggctgccagatgaatgtgaatgacacagagatagcctggtccatcttacagaagagtggctacctgcggaccagtaacctccaagaggcagatgtgattctccttgtcacatgctctatcagggagaaggctgagcagaccatctggaaccgtttacatcagcttaaagccttgaagacaaggcggccccgctcccgggttcctctgaggattggaattctaggctgcatggctgagaggttgaaggaggagattctcaacagagagaaaatggtagatattttggctggtcctgatgcctaccgggaccttccccggctgctggctgttgctgagtcgggccagcaagctgccaacgtgctgctctctctggacgagacctatgctgatgtcatgccagtccagacaagcgccagtgccacgtctgcctttgtatattcaagagaagcttatgtggagttagttcaccatattagagaatctattccaggtgtgagcctcagcagcgatttcattgctggcttttgtggtgagacggaggaagatcacgtccagacagtctctttgctccgggaagttcagtacaacatgggcttcctctttgcctacagcatgagacagaagacacgggcatatcataggctgaaggatgatgtcccggaagaggtaaaattaaggcgtttggaggaactcatcactatcttccgagaagaagcaacaaaagccaatcagacctctgtgggctgtacccagttggtgctagtggaagggctcagtaaacgctctgccactgacctgtgtggcaggaatgatggaaaccttaaggtgatcttccctgatgcagagatggaggatgtcaataaccctgggctcagggtcagagcccagcctggggactatgtgctggtgaagatcacctcagccagttctcagacacttaggggacatgttctctgcaggaccactctgagggactcttctgcatattgctgacctgagaggatggcctcagagctgacttgggcaatcctccccaacaggaaggggagacattgcctgccactgaggaaacaggtcatgaaggtggagataagctgcaaggggcgaagcaactttatgtcagtggaaaacgtgtctctttaaagctgctatgtgaacagcttttacagtcattaaatttacctaaactaaggtt

SEQ ID NO: 950 - DNA, 1944 bp, Homo sapiens
  source 1..1944: mol_type = genomic DNA
cggaagtcgcttgtgtatgaacgcagcggcggacctgtgaggggatccgacttgccggcagaacttacgctgcgggaccccgggcactgttgctgctgcgggagtccagagaggcaggaggatggagctcggaaggatttcagctccaggctggctgctggaccgacttttcaacattttttaaaaagtgcctcagctcctcaggagaagctgtcttcagaagtggaagacccacctccctatctcatgatggatgaacttcttggaaggcagagaaaagtctacctcgagacctatggctgccagatgaatgtgaatgacacagagatagcctggtccatcttacagaagagtggctacctgcggaccagtaacctccaagaggcagatgtgattctccttgtcacatgctctatcagggagaaggctgagcagaccatctggaaccgtttacatcagcttaaagccttgaagacaaggcggccccgctcccgggttcctctgaggattggaattctaggctgcatggctgagaggttgaaggaggagattctcaacagagagaaaatggtagatattttggctggtcctgatgcctaccgggaccttccccggctgctggctgttgctgagtcgggccagcaagctgccaacgtgctgctctctctggacgagacctatgctgatgtcatgccagtccagacaagcgccagtgccacgtctgcctttgtgtcaatcatgcgaggctgtgacaacatgtgtagctactgcattgttcctttcacccggggcagggagaggagtcggcctattgcctccattctagaggaagtgaagaagctttctgagcaggggctgaaagaagtgacacttcttggtcagaatgttaatagttttcgggacaattcggaggtccagttcaacagtgcagtgcctaccaatctcagtcgtggctttaccaccaactataaaaccaagcaaggaggacttcgttttgctcatcttctggatcaggtctccagagtagatcctgaaatgaggatccgttttacctctccccaccccaaggattttcctgatgaggttctgcagctgattcatgagagagataacatctgtaaacagatccacctgccagcccagagtggaagcagccgtgtgttggaggccatgcggaggggatattcaagagaagcttatgtggagttagttcaccatattagagaatctattccaggtgtgagcctcagcagcgatttcattgctggcttttgtggtgagacggaggaagatcacgtccagacagtctctttgctccgggaagttcagtacaacatgggcttcctctttgcctacagcatgagacagaagacacgggcatatcataggctgaaggatgatgtcccggaagaggtaaaattaaggcgtttggaggaactcatcactatcttccgagaagaagcaacaaaagccaatcagacctctgtgggctgtacccagttggtgctagtggaagggctcagtaaacgctctgccactgacctgtgtggcaggaatgatggaaaccttaaggtgatcttccctgatgcagagatggaggatgtcaataaccctgggctcagggtcagagcccagcctggggactatgtgctggtgaagatcacctcagccagttctcagacacttaggggacatgttctctgcaggaccactctgagggactcttctgcatattgctgacctgagaggatggcctcagagctgacttgggcaatcctccccaacaggaaggggagacattgcctgccactgaggaaacaggtcatgaaggtggagataagctgcaaggggcgaagcaactttatgtcagtggaaaacgtgtctctttaaagctgctatgtgaacagcttttacagtcattaaatttacctaaactaaggttaa

SEQ ID NO: 951 - DNA, 1791 bp, Homo sapiens
  source 1..1791: mol_type = genomic DNA
gtgtatgaacgcagcggcggacctgtgaggggatccgacttgccggcagaacttacgctgcgggaccccgggcactgttgctgctgcgggagactgtgggctgtttagtgccatgcaccctttacagtgtgtcctccaagtgcagaggtctctggggtggggaccattggcctctgtgtcttggctgtcgctgaggatgtgcagggcacacagcagtctctctagtaccatgtgtcccagtccagagaggcaggaggatggagctcggaaggatttcagctccaggctggctgctggaccgacttttcaacattttttaaaaagtgcctcagctcctcaggagaagctgtcttcagaagtggaagacccacctccctatctcatgatggatgaacttcttggaaggcagagaaaagtctacctcgagacctatggctgccagatgaatgtgaatgacacagagatagcctggtccatcttacagaagagtggctacctgcggaccagtaacctccaagaggcagatgtgattctccttgtcacatgctctatcagggagaaggctgagcagaccatctggaaccgtttacatcagcttaaagccttgaagacaaggcggccccgctcccgggttcctctgaggattggaattctaggctgcatggctgagaggttgaaggaggagattctcaacagagagaaaatggtagatattttggctggtcctgatgcctaccgggaccttccccggctgctggctgttgctgagtcgggccagcaagctgccaacgtgctgctctctctggacgagacctatgctgatgtcatgccagtccagacaagcgccagtgccacgtctgcctttgtgtcaatcatgcgaggctgtgacaacatgtgtagctactgcattgttcctttcacccggggcagggagaggagtcggcctattgcctccattctagaggaagtgaagaagctttctgagcaggggctgaaagaagtgacacttcttggtcagaatgttaatagttttcgggacaattcggaggtccagttcaacagtgcagtgcctaccaatctcagtcgtggctttaccaccaactataaaaccaagcaaggaggacttcgttttgctcatcttctggatcaggtctccagagtagatcctgaaatgaggatccgttttacctctccccaccccaaggattttcctgatgaggttctgcagctgattcatgagagagataacatctgtaaacagatccacctgccagcccagagtggaagcagccgtgtgttggaggccatgcggaggggatattcaagagaagcttatgtggagttagttcaccatattagagaatctattccagaagacacgggcatatcataggctgaaggatgatgtcccggaagaggtaaaattaaggcgtttggaggaactcatcactatcttccgagaagaagcaacaaaagccaatcagacctctgtgggctgtacccagttggtgctagtggaagggctcagtaaacgctctgccactgacctgtgtggcaggaatgatggaaaccttaaggtgatcttccctgatgcagagatggaggatgtcaataaccctgggctcagggtcagagcccagcctggggactatgtgctggtgaaggtgaggagtccttttgggcttttggcttgcactgtgaaatgagtgttggtttggatatttgtggtaataaagttttttcctagagacacattttagtaaaataaaaatcccctctcaaccagtacaa

SEQ ID NO: 952 - DNA, 2255 bp, Homo sapiens
  source 1..2255: mol_type = genomic DNA
ggtgatgggcagaatctgtttacgaaagacgtgacagtgatcgagggagaggttgcgaccatcagttgccaagtcaataagagtgacgactctgtgattcagctactgaatcccaacaggcagaccatttatttcagggacttcaggcctttgaaggacagcaggtttcagttgctgaatttttctagcagtgaactcaaagtatcattgacaaacgtctcaatttctgatgaaggaagatacttttgccagctctataccgatcccccacaggaaagttacaccaccatcacagtcctggtcccaccacgtaatctgatgatcgatatccagaaagacactgcggtggaaggtgaggagattgaagtcaactgcactgctatggccagcaagccagccacgactatcaggtggttcaaagggaacacagagctaaaaggcaaatcggaggtggaagagtggtcagacatgtacactgtgaccagtcagctgatgctgaaggtgcacaaggaggacgatggggtcccagtgatctgccaggtggagcaccctgcggtcactggaaacctgcagacccagcggtatctagaagtacagtataagcctcaagtgcacattcagatgacttatcctctacaaggcttaacccgggaaggggacgcgcttgagttaacatgtgaagccatcgggaagccccagcctgtgatggtaacttgggtgagagtcgatgatgaaatgcctcaacacgccgtactgtctgggcccaacctgttcatcaataacctaaacaaaacagataatggtacataccgctgtgaagcttcaaacatagtggggaaagctcactcggattatatgctgtatgtatacgattcccgagcaggtgaagaaggctcgatcagggcagtggatcatgccgtgatcggtggcgtcgtggcggtggtggtgttcgccatgctgtgcttgctcatcattctggggcgctattttgccagacataaaggtacatacttcactcatgaagccaaaggagccgatgacgcagcagacgcagacacagctataatcaatgcagaaggaggacagaacaactccgaagaaaagaaagagtacttcatctagatcagcctttttgtttcaatgaggtgtccaactggccctatttagatgataaagagacagtgatattggaacttgcgagaaattcgtgtgtttttttatgaatgggtggaaaggtgtgagactgggaaggcttgggatttgctgtgtaaaaaaaaaaaaaatgttctttggaaagtacactctgctgtttgacacctcttttttcgtttgtttgtttgtttaatttttatttcttcctaccaagtcaaacttggatacttggatttagtttcagtagattgcagaaaattctgtgccttgttttttgtttgtttgttgcgttcctttcttttccccctttgtgcacatttatttcctccctctaccccaatttcggattttttccaaaatctcccattttggaatttgcctgctgggattccttagactcttttccttcccttttctgttctagttttttacttttgtttatttttatggtaactgctttctgttccaaattcagtttcataaaaggagaaccagcacagcttagatttcatagttcagaatttagtgtatccataatgcattcttctctgttgtcgtaaagatttgggtgaacaaacaatgaaaactctttgctgctgcccatgtttcaaatacttagagcagtgaagactagaaaattagactgtgattcagaaaatgttctgtttgctgtggaactacattactgtacagggttatctgcaagtgaggtgtgtcacaatgagattgaatttcactgtctttaattctgtatctgtagacggctcagtatagataccctacgctgtccagaaaggtttggggcagaaaggactcctcctttttccatgccctaaacagacctgacaggtgaggtctgttccttttatataagtggacaaattttgagttgccacaggaggggaagtagggaggggggaaatacagttctgctctggttgtttctgttccaaatgattccatccacctttcccaatcggccttacttctcactaatttgtaggaaaaagcaagttcgtctgttgtgcgaatgactgaatgggacagagttgatttttttttttttttcctttgtgcttagttaggaaggcagtaggatgtgg

SEQ ID NO: 953 - DNA, 3517 bp, Homo sapiens
  source 1..3517: mol_type = genomic DNA
agtctgaggcaggtgcccgacatggcgagtgtagtgctgccgagcggatcccagtgtgcggcggcagcggcggcggcggcgcctcccgggctccggctccggcttctgctgttgctcttctccgccgcggcactgatccccacaggtgatgggcagaatctgtttacgaaagacgtgacagtgatcgagggagaggttgcgaccatcagttgccaagtcaataagagtgacgactctgtgattcagctactgaatcccaacaggcagaccatttatttcagggacttcaggcctttgaaggacagcaggtttcagttgctgaatttttctagcagtgaactcaaagtatcattgacaaacgtctcaatttctgatgaaggaagatacttttgccagctctataccgatcccccacaggaaagttacaccaccatcacagtcctggtcccaccacgtaatctgatgatcgatatccagaaagacactgcggtggaaggtgaggagattgaagtcaactgcactgctatggccagcaagccagccacgactatcaggtggttcaaagggaacacagagctaaaaggcaaatcggaggtggaagagtggtcagacatgtacactgtgaccagtcagctgatgctgaaggtgcacaaggaggacgatggggtcccagtgatctgccaggtggagcaccctgcggtcactggaaacctgcagacccagcggtatctagaagtacagtataagcctcaagtgcacattcagatgacttatcctctacaaggcttaacccgggaaggggacgcgcttgagttaacatgtgaagccatcgggaagccccagcctgtgatggtaacttgggtgagagtcgatgatgaaatgcctcaacacgccgtactgtctgggcccaacctgttcatcaataacctaaacaaaacagataatggtacataccgctgtgaagcttcaaacatagtggggaaagctcactcggattatatgctgtatgtatacgatccccccacaactatccctcctcccacaacaaccaccaccaccaccaccaccaccaccaccaccatccttaccatcatcacagattcccgagcaggtgaagaaggctcgatcagggcagtggatcatgccgtgatcggtggcgtcgtggcggtggtggtgttcgccatgctgtgcttgctcatcattctggggcgctattttgccagacataaaggtacatacttcactcatgaagccaaaggagccgatgacgcagcagacgcagacacagctataatcaatgcagaaggaggacagaacaactccgaagaaaagaaagagtacttcatctagatcagcctttttgtttcaatgaggtgtccaactggccctatttagatgataaagagacagtgatattggaacttgcgagaaattcgtgtgtttttttatgaatgggtggaaaggtgtgagactgggaaggcttgggatttgctgtgtaaaaaaaaaaaaaatgttctttggaaagtacactctgctgtttgacacctcttttttcgtttgtttgtttgtttaatttttatttcttcctaccaagtcaaacttggatacttggatttagtttcagtagattgcagaaaattctgtgccttgttttttgtttgtttgttgcgttcctttcttttccccctttgtgcacatttatttcctccctctaccccaatttcggattttttccaaaatctcccattttggaatttgcctgctgggattccttagactcttttccttcccttttctgttctagttttttacttttgtttatttttatggtaactgctttctgttccaaattcagtttcataaaaggagaaccagcacagcttagatttcatagttcagaatttagtgtatccataatgcattcttctctgttgtcgtaaagatttgggtgaacaaacaatgaaaactctttgctgctgcccatgtttcaaatacttagagcagtgaagactagaaaattagactgtgattcagaaaatgttctgtttgctgtggaactacattactgtacagggttatctgcaagtgaggtgtgtcacaatgagattgaatttcactgtctttaattctgtatctgtagacggctcagtatagataccctacgctgtccagaaaggtttggggcagaaaggactcctcctttttccatgccctaaacagacctgacaggtgaggtctgttccttttatataagtggacaaattttgagttgccacaggaggggaagtagggaggggggaaatacagttctgctctggttgtttctgttccaaatgattccatccacctttcccaatcggccttacttctcactaatttgtaggaaaaagcaagttcgtctgttgtgcgaatgactgaatgggacagagttgatttttttttttttttcctttgtgcttagttaggaaggcagtaggatgtggcctgcatgtactgtatattacagatatttgtcatgctgggatttccaactcgaatctgtgtgaaactttcattccttcagatttggcttgacaaaggcaggaggtacaaaagaagggctggtattgttctcacactggtctgctgtcgctctcagttctcgataggtcagagcagaggtggaaaaacagcatgtacggattttcagttacttaatcaaaactcaaatgtgagtgtttttatctttttacctttcatacactagccttggcctctttcctcagccttaagaaccatctgccaaaaattactgatcctcgcatgatggcagccatagtgcatagctactaaaatcagtgaccttgaacatatcttagatggggagcctcgggaaaaggtagaggagtcacgttaccatttacatgttttaaagaaagaagtgtggggattttcactgaaacgtctaggaaatctagaagtagtcctgaaggacagaaactaaactcttaccatatgtttggtaagactccagactccagctaacagtccctatggaaagatggcatcaaaaaagatagatctatatatatatataaatatatattctattacattttcagtgagtaattttggattttgcaaggtgcatttttactattgttacattatgtggaaaacttatgctgatttatttaagggggaaaaagtgtcaactctttgttatttgaaaacatgtttatttttcttgtctttattttaacctttgatagaaccattgcaatatgggggccttttgggaacggactggtatgtaaaagaaaatccattatcgagcagcattttatttacccctcccctatccctaggcacttaaccaagacaaaaagccacaatgaacatccctttttcaatgaattttataatctgcagctctattccgagcccttagcacccattccgaccatagtataatcatatcaaagggtgagaatcatttagcatgttgttgaaaggttttttttcagttgttcttttt

SEQ ID NO: 954 - DNA, 649 bp, Homo sapiens
  source 1..649: mol_type = genomic DNA
agccatcgggaagccccagcctgtgatggtaacttgggtgagagtcgatgatgaaatgcctcaacacgccgtactgtctgggcccaacctgttcatcaataacctaaacaaaacagataatggtacataccgctgtgaagcttcaaacatagtggggaaagctcactcggattatatgctgtatgtatacgatccccccacaactatccctcctcccacaacaaccaccaccaccaccaccaccaccaccaccaccatccttaccatcatcacagacacaacggcgacgacagaaccagcagttcacgattcccgagcaggtgaagaaggctcgatcagggcagtggatcatgccgtgatcggtggcgtcgtggcggtggtggtgttcgccatgctgtgcttgctcatcattctggggcgctattttgccagacataaaggtacatacttcactcatgaagccaaaggagccgatgacgcagcagacgcagacacagctataatcaatgcagaaggaggacagaacaactccgaagaaaagaaagagtacttcatctagatcagcctttttgtttcaatgaggtgtccaactggccctatttagatgataaagagacagtgatattggaacttgcgagaaattcgtgtg

SEQ ID NO: 955 - DNA, 3551 bp, Homo sapiens
  source 1..3551: mol_type = genomic DNA
ggttgggctcgcggcgctgtgattggtctgcccggactccgcctccagcgcatgtcattagcatctcattagctgtccgctcgggctccggaggcagccaacgccgccagtctgaggcaggtgcccgacatggcgagtgtagtgctgccgagcggatcccagtgtgcggcggcagcggcggcggcggcgcctcccgggctccggctccggcttctgctgttgctcttctccgccgcggcactgatccccacaggtgatgggcagaatctgtttacgaaagacgtgacagtgatcgagggagaggttgcgaccatcagttgccaagtcaataagagtgacgactctgtgattcagctactgaatcccaacaggcagaccatttatttcagggacttcaggcctttgaaggacagcaggtttcagttgctgaatttttctagcagtgaactcaaagtatcattgacaaacgtctcaatttctgatgaaggaagatacttttgccagctctataccgatcccccacaggaaagttacaccaccatcacagtcctggtcccaccacgtaatctgatgatcgatatccagaaagacactgcggtggaaggtgaggagattgaagtcaactgcactgctatggccagcaagccagccacgactatcaggtggttcaaagggaacacagagctaaaaggcaaatcggaggtggaagagtggtcagacatgtacactgtgaccagtcagctgatgctgaaggtgcacaaggaggacgatggggtcccagtgatctgccaggtggagcaccctgcggtcactggaaacctgcagacccagcggtatctagaagtacagtataagcctcaagtgcacattcagatgacttatcctctacaaggcttaacccgggaaggggacgcgcttgagttaacatgtgaagccatcgggaagccccagcctgtgatggtaacttgggtgagagtcgatgatgaaatgcctcaacacgccgtactgtctgggcccaacctgttcatcaataacctaaacaaaacagataatggtacataccgctgtgaagcttcaaacatagtggggaaagctcactcggattatatgctgtatgtatacgattcccgagcaggtgaagaaggctcgatcagggcagtggatcatgccgtgatcggtggcgtcgtggcggtggtggtgttcgccatgctgtgcttgctcatcattctggggcgctattttgccagacataaaggtacatacttcactcatgaagccaaaggagccgatgacgcagcagacgcagacacagctataatcaatgcagaaggaggacagaacaactccgaagaaaagaaagagtacttcatctagatcagcctttttgtttcaatgaggtgtccaactggccctatttagatgataaagagacagtgatattggaacttgcgagaaattcgtgtgtttttttatgaatgggtggaaaggtgtgagactgggaaggcttgggatttgctgtgtaaaaaaaaaaaaaatgttctttggaaagtacactctgctgtttgacacctcttttttcgtttgtttgtttgtttaatttttatttcttcctaccaagtcaaacttggatacttggatttagtttcagtagattgcagaaaattctgtgccttgttttttgtttgtttgttgcgttcctttcttttccccctttgtgcacatttatttcctccctctaccccaatttcggattttttccaaaatctcccattttggaatttgcctgctgggattccttagactcttttccttcccttttctgttctagttttttacttttgtttatttttatggtaactgctttctgttccaaattcagtttcataaaaggagaaccagcacagcttagatttcatagttcagaatttagtgtatccataatgcattcttctctgttgtcgtaaagatttgggtgaacaaacaatgaaaactctttgctgctgcccatgtttcaaatacttagagcagtgaagactagaaaattagactgtgattcagaaaatgttctgtttgctgtggaactacattactgtacagggttatctgcaagtgaggtgtgtcacaatgagattgaatttcactgtctttaattctgtatctgtagacggctcagtatagataccctacgctgtccagaaaggtttggggcagaaaggactcctcctttttccatgccctaaacagacctgacaggtgaggtctgttccttttatataagtggacaaattttgagttgccacaggaggggaagtagggaggggggaaatacagttctgctctggttgtttctgttccaaatgattccatccacctttcccaatcggccttacttctcactaatttgtaggaaaaagcaagttcgtctgttgtgcgaatgactgaatgggacagagttgatttttttttttttttcctttgtgcttagttaggaaggcagtaggatgtggcctgcatgtactgtatattacagatatttgtcatgctgggatttccaactcgaatctgtgtgaaactttcattccttcagatttggcttgacaaaggcaggaggtacaaaagaagggctggtattgttctcacactggtctgctgtcgctctcagttctcgataggtcagagcagaggtggaaaaacagcatgtacggattttcagttacttaatcaaaactcaaatgtgagtgtttttatctttttacctttcatacactagccttggcctctttcctcagccttaagaaccatctgccaaaaattactgatcctcgcatgatggcagccatagtgcatagctactaaaatcagtgaccttgaacatatcttagatggggagcctcgggaaaaggtagaggagtcacgttaccatttacatgttttaaagaaagaagtgtggggattttcactgaaacgtctaggaaatctagaagtagtcctgaaggacagaaactaaactcttaccatatgtttggtaagactccagactccagctaacagtccctatggaaagatggcatcaaaaaagatagatctatatatatatataaatatatattctattacattttcagtgagtaattttggattttgcaaggtgcatttttactattgttacattatgtggaaaacttatgctgatttatttaagggggaaaaagtgtcaactctttgttatttgaaaacatgtttatttttcttgtctttattttaacctttgatagaaccattgcaatatgggggccttttgggaacggactggtatgtaaaagaaaatccattatcgagcagcattttatttacccctcccctatccctaggcacttaaccaagacaaaaagccacaatgaacatccctttttcaatgaattttataatctgcagctctattccgagcccttagcacccattccgaccatagtataatcatatcaaagggtgagaatcatttagcatgttgttgaaaggttttttttcagttgttctttttagaaaaaaag

SEQ ID NO: 956 - DNA, 2176 bp, Homo sapiens
  source 1..2176: mol_type = genomic DNA
tgcaggtgccgggccgggagcgagcggcggcggcggcggcggcggcaccatgggccgggcccggcgcttccagtggccgctgctgctgctgtgggcggccgcggcggggccaggggcaggacaggaagtacagacagagaacgtgacagtggctgagggtggggtggctgagatcacctgccgtctgcaccagtatgatgggtccatagttgtcatccagaacccagcccggcagaccctcttcttcaatggcacccgtgccttgaaggatgagcgtttccagcttgaggagttctccccacgccgggtgcggatccggctctcagatgcccgcctggaggacgaggggggctatttctgccagctctacacagaagacacccaccaccagattgccacgctcacggtactagtggccccagagaatcctgtggtggaggtccgggagcaggcggtagagggcggcgaggtggagctcagctgcctcgttccgcggtcccgtccggctgccaccctgcgctggtaccgggaccgcaaggagctgaaaggagtgagcagcagccaggaaaatggcaaggtctggagcgtggcaagcacagtacggtttcgtgtggaccgtaaggacgacggtggtatcatcatctgtgaggcgcagaaccaggcgctgccctccggacacagcaagcagacgcagtacgtgctggatgtgcagtactcccccacggcccggattcatgcctcccaagctgtggtgagggagggagacacgctggtgttgacgtgtgctgtcacggggaaccccaggccaaaccagatccgctggaaccgcgggaatgagtctttgccggagagggcggaggccgtgggagagacgctcacgctgccgggtctggtatccgcggataacggcacctacacttgcgaggcgtccaataagcacggccatgcgagggcgctctacgtacttgtggtctacgaccctggtgcggtggtagaggctcagacgtcggttccctatgccattgtgggcggcatcctggcgctgctggtgtttctgatcatatgtgtgctagtgggcatggtctggtgctcggtacggcagaagggttcctatctgacccacgaagccagtggcttggatgaacagggagaagcaagagaagccttcctcaatggcagcgacggacacaagaggaaagaggaattcttcatctgaccctatccccaccccaggcctaggcctgggcctgggctggggtcccccccactgccagctgcaaggaaccagcaaagacatttaccagagtctgggatggtgggcttctccccccaccactaacacctcagacgcttgggcagggatgggggtgttggatgcctggatctctgtaagggccagaagtgagggcccagaggtctgggtcccccagggggcaggggccaaaggtccagaccccccaagtccagtgagggcagtagggattgggttgggggaagataactgggggaaggccagggcccctaggctacaaaaccaggtcttgtggggagggggtcagtttctgggaagggtggggggggcagggaaggggaacacagatttctttgggggtcctagaccccatgccagccattgtaagagttccacagagctctgggcacttctttgcaaagccatgtttgcacggtggggggatgggtggggggagggcgtggaaatagggattctgtgtctttgtgtcataactttgatgggggcagtgagggagacagccccaacccttttctccaatcccccttccccaggttcctgggctccccttctctctaccttctcccccaacgtctgtcccatccatatttgtctctctgtccacccactcctgggggggccttccccatctctcctccaggccccccggggagggggaaaggagtttggggaggattcgtggtcttcatggttttatatataatatattaaaaaatcaaaagtctgtatgaaaatatcagattgcacccccctctccccattcctggcttttgccccctttttcttgttaaaaaacaaaaaacaaaaaacaaaaaaccacacacacattttgtacggggtggggaggggaatggggagggggtttggcaatctcactaaccaccattaaactgaggagagaac

SEQ ID NO: 957 - DNA, 735 bp, Homo sapiens
  source 1..735: mol_type = genomic DNA
ggccgccgcactttaagaggctgtgcaggcagacagacctccaggcccgctaggggatccgcgccatggaggccgcccgggactatgcaggagccctcatcaggcccctgacatttatgggatcacagactaagcgagtcctgttcaccccgctcatgcatccagctcgccctttccgggtctccaaccatgacaggagcagccggcgtggggtgatggcaagcagcctgcaggagctcatcagcaagactctggatgccctcgtcatcgctaccggactggtcactctggtgctggaggaagatggcaccgtggtggacacagaagagttctttcagaccttgggagacaacacgcatttcatgatcttggaaaaaggacagaagtggatgccgggcagccagcacgtccccacttgctcgccgccgaagaggtcgggaatagcgagagtcaccttcgacttgtacaggctgaaccccaaggacttcatcggctgccttaacgtgaaggccaccatgtatgagatgtactccgtgtcctacgacatccggtgcacgggactcaagggcctgctgaggagtctgctgcggttcctgtcctactccgcccaggtgacgggacagtttctcatctatctgggcacatacatgctccgggtgctggatgacaaggaagagcggccatccctccggtcacaagccaagggcaggttcacgtgtggatagggatgcaggc

SEQ ID NO: 958 - DNA, 2294 bp, Homo sapiens
  source 1..2294: mol_type = genomic DNA
gccagcgctgcgaccgcctgcagaaggttgactgcgtggtagggggcccagagcaagccgaaggcaagcacgatggcgctcaccagccggcccacccgcgccccgtgccgcccggagccccagcgggcgccccgcagccgtgccagcgtcacgctgtagcagccgagcatcagcccgaaaggaagcacgaaagcggtcagagtctccaggctcaggtgggcggcggcgtggaccggcgacgggtggcacagctggcatacgcggtccctccacaggtggcggtagacggcggccgggacggcgagcaacagggcggccagccagaccgccagcagcaggcggcgggccagggccgggctgcgcagccgaggcgccaggaaggggcgggtgactgcgaggcagcgctgcaggctgagcaggccggtgagcagcacgctggcgtacatgctgagcgcgcacacgtagtacaccgccttgcagcccgcctggcccagcggccaggcctgccgggtcaggaaggccacaaagagcggcgtgagcagcagcaccgcgccgtcggccagcgccaggtgcagcacaagcgtggccgccagcggtcgcccccgtgcaggccgccagcccgccaagctccacaccacgaagccgttgccaggcagccccagcagcgccgccagcagcaggaaggctgtgcctgtggcccgcgaagtcttccagctcagcagtgtctcgttccctgggggacggtagcagaccgacatccttctgggcctacaggacacagaaaaaaagtggggaagctgggggaccctacaaggatccttggcaggaaagcagggattgtgttcatttgagggtttcactgtcagtgagagtctcagcttccatgcaactgtccatcacggctgcaactgaaatcagagctgggacacagcgcaccagaagctaaagtcttgatgccatcaaaggacatccctgccccattcacatctctgtcacgtccactaatcggcaaaaggagaaaagtgagagaagatgacctaagtgtgactgcagcaggcagctctggaaaatgaagccagagcagtgagccagcccctcctccgaccaaggaggaaggaaagagcagccccagcacaggagagaaccacccagcccagaagttccagggaaggaactctccggtccaccatggagtacctctcagctctgaaccccagtgacttactcaggtcagtatctaatataagctcggagtttggacggagggtctggacctcagctccaccaccccagcgacctttccgtgtctgtgatcacaagcggaccatccggaaaggcctgacagctgccacccgccaggagctgctagccaaagcattggagaccctactgctgaatggagtgctaaccctggtgctagaggaggatggaactgcagtggacagtgaggacttcttccagctgctggaggatgacacgtgcctgatggtgttgcagtctggtcagagctggagccctacaaggagtggagtgctgtcatatggcctgggacgggagaggcccaagcacagcaaggacatcgcccgattcacctttgacgtgtacaagcaaaaccctcgagacctctttggcagcctgaatgtcaaagccacattctacgggctctactctatgagttgtgactttcaaggacttggcccaaagaaagtactcagggagctccttcgttggacctccacactgctgcaaggcctgggccatatgttgctgggaatttcctccacccttcgtcatgcagtggagggggctgagcagtggcagcagaagggccgcctccattcctactaaggggctctgagcttctgcccccagaatcattccaaccgacccactgcaaagactatgacagcatcaaatttcaggacctgcagacagtacaggctagataacccacccaatttccccactgtcctctgatcccctcgtgacagaacctttcagcataacgcctcacatcccaagtctatacccttacctgaagaatgctgttctttcctagccacctttctggcctcccacttgccctgaaaggccaagatcaagatgtcccccaggcatcttgatcccagcctgactgctgctacatctaatcccctaccaatgcctcctgtccctaaactccccagcatactgatgacagccctctctgactttaccttgagatctgtcttcatacccttcccctcaaactaacaaaaacatttccaataaaaatatcaaatatttaccactaa

SEQ ID NO: 959 - DNA, 2409 bp, Homo sapiens
  source 1..2409: mol_type = genomic DNA
ttgactgcgtggtagggggcccagagcaagccgaaggcaagcacgatggcgctcaccagccggcccacccgcgccccgtgccgcccggagccccagcgggcgccccgcagccgtgccagcgtcacgctgtagcagccgagcatcagcccgaaaggaagcacgaaagcggtcagagtctccaggctcaggtgggcggcggcgtggaccggcgacgggtggcacagctggcatacgcggtccctccacaggtggcggtagacggcggccgggacggcgagcaacagggcggccagccagaccgccagcagcaggcggcgggccagggccgggctgcgcagccgaggcgccaggaaggggcgggtgactgcgaggcagcgctgcaggctgagcaggccggtgagcagcacgctggcgtacatgctgagcgcgcacacgtagtacaccgccttgcagcccgcctggcccagcggccaggcctgccgggtcaggaaggccacaaagagcggcgtgagcagcagcaccgcgccgtcggccagcgccaggtgcagcacaagcgtggccgccagcggtcgcccccgtgcaggccgccagcccgccaagctccacaccacgaagccgttgccaggcagccccagcagcgccgccagcagcaggaaggctgtgcctgtggcccgcgaagtcttccagctcagcagtgtctcgttccctgggggacggtagcagaccgacatccttctgggcctacagcctgcctcttttctgcctgggagtcctgacttccacgaggacccagaccccacctcaaacacaactccttcttggaacccagatcccctgctcccagtcagttgacctgccccactcctggcctccttcccagagctcagtggacacagaaaaaaagtggggaagctgggggaccctacaaggatccttggcaggaaagcagggattgtgttcatttgagggtttcactgtcagtgagagtctcagcttccatgcaactgtccatcacggctgcaactgaaatcagagctgggacacagcgcaccagaagctaaagtcttgatgccatcaaaggacatccctgccccattcacatctctgtcacgtccactaatcggcaaaaggagaaaagtgagagaagatgacctaagtgtgactgcagcaggcagctctggaaaatgaagccagagcagtgagccagcccctcctccgaccaaggaggaaggaaagagcagccccagcacaggagagaaccacccagcccagaagttccagggaaggaactctccggtccaccatggagtacctctcagctctgaaccccagtgacttactcaggtcagtatctaatataagctcggagtttggacggagggtctggacctcagctccaccaccccagcgacctttccgtgtctgtgatcacaagcggaccatccggaaaggcctgacagctgccacccgccaggagctgctagccaaagcattggagaccctactgctgaatggagtgctaaccctggtgctagaggaggatggaactgcagtggacagtgaggacttcttccagctgctggaggatgacacgtgcctgatggtgttgcagtctggtcagagctggagccctacaaggagtggagtgctgtcatatggcctgggacgggagaggcccaagcacagcaaggacatcgcccgattcacctttgacgtgtacaagcaaaaccctcgagacctctttggcagcctgaatgtcaaagccacattctacgggctctactctatgagttgtgactttcaaggacttggcccaaagaaagtactcagggagctccttcgttggacctccacactgctgcaaggcctgggccatatgttgctgggaatttcctccacccttcgtcatgcagtggagggggctgagcagtggcagcagaagggccgcctccattcctactaaggggctctgagcttctgcccccagaatcattccaaccgacccactgcaaagactatgacagcatcaaatttcaggacctgcagacagtacaggctagataacccacccaatttccccactgtcctctgatcccctcgtgacagaacctttcagcataacgcctcacatcccaagtctatacccttacctgaagaatgctgttctttcctagccacctttctggcctcccacttgccctgaaaggccaagatcaagatgtcccccaggcatcttgatcccagcctgactgctgctacatctaatcccctaccaatgcctcctgtccctaaactccccagcatactgatgacagccctctctgactttaccttgagatctgtcttcatacccttcccctcaaactaacaaaaacatttccaataaaaatatcaaatatttaccactaa

SEQ ID NO: 960 - DNA, 3826 bp, Homo sapiens
  source 1..3826: mol_type = genomic DNA
agcttcgccaaggccccttccggtggagccagcgctgcgaccgcctgcagaaggttgactgcgtggtagggggcccagagcaagccgaaggcaagcacgatggcgctcaccagccggcccacccgcgccccgtgccgcccggagccccagcgggcgccccgcagccgtgccagcgtcacgctgtagcagccgagcatcagcccgaaaggaagcacgaaagcggtcagagtctccaggctcaggtgggcggcggcgtggaccggcgacgggtggcacagctggcatacgcggtccctccacaggtggcggtagacggcggccgggacggcgagcaacagggcggccagccagaccgccagcagcaggcggcgggccagggccgggctgcgcagccgaggcgccaggaaggggcgggtgactgcgaggcagcgctgcaggctgagcaggccggtgagcagcacgctggcgtacatgctgagcgcgcacacgtagtacaccgccttgcagcccgcctggcccagcggccaggcctgccgggtcaggaaggccacaaagagcggcgtgagcagcagcaccgcgccgtcggccagcgccaggtgcagcacaagcgtggccgccagcggtcgcccccgtgcaggccgccagcccgccaagctccacaccacgaagccgttgccaggcagccccagcagcgccgccagcagcaggaaggctgtgcctgtggcccgcgaagtcttccagctcagcagtgtctcgttccctgggggacggtagcagaccgacatccttctgggcctacaggtgggtggaaggcgccacagagggcgttcaggggtggggcaaaaccccacctgtgatgcccgatgagaaggtgccatgcctcctccttacttccctgcagcctgcctcttttctgcctgggagtcctgacttccacgaggacccagaccccacctcaaacacaactccttcttggaacccagatcccctgctcccagtcagttgacctgccccactcctggcctccttcccagagctcagtggtaaacaggcataaagtcatcaccccaggctgtcactatctctaccaccactcctctagtctggcccctccttctttgtccagccccattctagcacatctgggcaaaactggatggtggggtgtaaagggacgtgcacagatctacttaccaagctgggagcaagcaggattgggggcctggagaagctgaaaggttaagcagcagtaggcgaggtgcctactcctgtcctgtgcctatcacatttgcagaggtgacccaaacaactcagtcccccacctgccttatccttgcctgtttccagtctcctggtccggctgagcccctggcctcctacctcctcccacctcttgcctcaggccctgccccagtcactccaccctcagggctctcaccgggctgtcaatgacagcttttccatgtaaggcatggtgctaggttccaggaggaacaggggatgcatggaggcataatggttagggagtcatgacacacaaccatgaagaggccccattaccaggctgcaccaggatacaagacaagaaaggaaaggatgagtagggacatactaagaagcagccctctcctcttggaaaagtcaagcaaaacttggaaatgaagagatttgaggggggcctggcagatggatagagctgggggaagggaaaagaaaggcctctgctcaagtaacagccagaacttgaggttgcttggggagggcaccaggagcactgtcttagtttgggttcttccaaagcagagcttgagctaagggcttgggtacaggtgatcctgtattcttgagctaagggcttgggtacaggtgatcctgtatttgggaggttaactcaggaagtgagggcataaggtaaaacaagagagaggaaagccattaagagtatgttaagtcccttcagtaggccttgggaacctctgagaaaagtatagattgcccaagacaaaagactggcagggtgatcagtccaaagcatttattaggagaatgtacttaatgagtgggctacagcgtatcctcacaacagacagtgagagagagttgttctacctgggtatatccaaaacaagggggtcagggtatggagtttacgagggttcaaggtatttggttcagggccagggccagtttttttcagtgttttgggcaacaacctgaataccttttcaaggctctggcttgggctcaagcctgcaggggaaatgcaactggccaggtcacagggcaatcaagttactctgtgtttctttgtcaggacacagaaaaaaagtggggaagctgggggaccctacaaggatccttggcaggaaagcagggattgtgttcatttgagggtttcactgtcagtgagagtctcagcttccatgcaactgtccatcacggctgcaactgaaatcagagctgggacacagcgcaccagaagctaaagtcttgatgccatcaaaggacatccctgccccattcacatctctgtcacgtccactaatcggcaaaaggagaaaagtgagagaagatgacctaagtgtgactgcagcaggcagctctggaaaatgaagccagagcagtgagccagcccctcctccgaccaaggaggaaggaaagagcagccccagcacaggagagaaccacccagcccagaagttccagggaaggaactctccggtccaccatggagtacctctcagctctgaaccccagtgacttactcaggtcagtatctaatataagctcggagtttggacggagggtctggacctcagctccaccaccccagcgacctttccgtgtctgtgatcacaagcggaccatccggaaaggcctgacagctgccacccgccaggagctgctagccaaagcattggagaccctactgctgaatggagtgctaaccctggtgctagaggaggatggaactgcagtggacagtgaggacttcttccagctgctggaggatgacacgtgcctgatggtgttgcagtctggtcagagctggagccctacaaggagtggagtgctgtcatatggcctgggacgggagaggcccaagcacagcaaggacatcgcccgattcacctttgacgtgtacaagcaaaaccctcgagacctctttggcagcctgaatgtcaaagccacattctacgggctctactctatgagttgtgactttcaaggacttggcccaaagaaagtactcagggagctccttcgttggacctccacactgctgcaaggcctgggccatatgttgctgggaatttcctccacccttcgtcatgcagtggagggggctgagcagtggcagcagaagggccgcctccattcctactaaggggctctgagcttctgcccccagaatcattccaaccgacccactgcaaagactatgacagcatcaaatttcaggacctgcagacagtacaggctagataacccacccaatttccccactgtcctctgatcccctcgtgacagaacctttcagcataacgcctcacatcccaagtctatacccttacctgaagaatgctgttctttcctagccacctttctggcctcccacttgccctgaaaggccaagatcaagatgtcccccaggcatcttgatcccagcctgactgctgctacatctaatcccctaccaatgcctcctgtccctaaactccccagcatactgatgacagccctctctgactttaccttgagatctgtcttcatacccttcccctcaaactaacaaaaacatttccaataaaaatatcaaatattt

SEQ ID NO: 961 - DNA, 1602 bp, Homo sapiens
  source 1..1602: mol_type = genomic DNA
gagccactcataaactgcagcttctcagagcctgagagccagaaaccgtccccagaaattccctccatagaaataaaaaaacaccagaagtcacatttcatccttttacatggttcccatctaccctcacaacacatgtcatcaccaaagacacacatacaagctccaatggcttttgccaggcaattcttcctccaggaccccatctggcccctccctcatccctccccttggactttgcccttcttactggccaggcaggggggccagagtccaggcttgactcattcccaccttgtcctgggctgagatcccaggtttgtaacagaaaacaccactaaagccccagcacaggagagaaccacccagcccagaagttccagggaaggaactctccggtccaccatggagtacctctcagctctgaaccccagtgacttactcaggtcagtatctaatataagctcggagtttggacggagggtctggacctcagctccaccaccccagcgacctttccgtgtctgtgatcacaagcggaccatccggaaaggcctgacagctgccacccgccaggagctgctagccaaagcattggagaccctactgctgaatggagtgctaaccctggtgctagaggaggatggaactgcagtggacagtgaggacttcttccagctgctggaggatgacacgtgcctgatggtgttgcagtctggtcagagctggagccctacaaggagtggagtgctgtcatatggcctgggacgggagaggcccaagcacagcaaggacatcgcccgattcacctttgacgtgtacaagcaaaaccctcgagacctctttggcagcctgaatgtcaaagccacattctacgggctctactctatgagttgtgactttcaaggacttggcccaaagaaagtactcagggagctccttcgttggacctccacactgctgcaaggcctgggccatatgttgctgggaatttcctccacccttcgtcatgcagtggagggggctgagcagtggcagcagaagggccgcctccattcctactaaggggctctgagcttctgcccccagaatcattccaaccgacccactgcaaagactatgacagcatcaaatttcaggacctgcagacagtacaggctagataacccacccaatttccccactgtcctctgatcccctcgtgacagaacctttcagcataacgcctcacatcccaagtctatacccttacctgaagaatgctgttctttcctagccacctttctggcctcccacttgccctgaaaggccaagatcaagatgtcccccaggcatcttgatcccagcctgactgctgctacatctaatcccctaccaatgcctcctgtccctaaactccccagcatactgatgacagccctctctgactttaccttgagatctgtcttcatacccttcccctcaaactaacaaaaacatttccaataaaaatatcaaatatttaccactaagacttctgactccaatttaaaccaggaaagggatggggtggataccccattttgccctcccccatcaacacccagtcccagatccaaagcc

SEQ ID NO: 962 - DNA, 2034 bp, Homo sapiens
  source 1..2034: mol_type = genomic DNA
gcgtgaggccgggcccgcgccgccatgaacctagagcggctgcggaagcgcgtccggcagtacctcgaccagcaacagtatcaaagtgctctattttgggcagataaagtagcttcactctctcgtgaaccccaggacatctattggttggctcagtgtctttacctgacagcacaatatcacagagccgcccatgcacttcggtcacgaaaactggacaaattgtatgaagcatgtcgttaccttgcagctaggtgccattatgctgcaaaagagcaccagcaggcccttgatgttcttgacatggaagagcccatcaataaaagattatttgaaaaatacttgaaggacgaaagtggcttcaaagatccttccagcgactgggaaatgtcacagtcttcaataaagagttctatctgtcttctacgcgggaaaatctatgatgctctagataaccgaaccctggctacctacagctacaaagaagctttgaagcttgatgtctactgttttgaagcgttcgatcttttaacatcacatcacatgctgacagcacaagaagaaaaagaacttcttgaatcactaccccttagcaagctgtgtaatgaagaacaggaattgctgcgttttctatttgagaacaaattgaaaaaatataataagcctagtgaaacggtcatccctgaatctgtagatggcttgcaagagaatctggatgtggtagtgtctttagctgagagacattattataactgtgattttaaaatgtgctacaagcttacttctgtagtaatggagaaagatcctttccatgcaagttgtttacctgtacatatagggacgcttgtagagctgaataaagccaatgaacttttctatctttctcataaactggtggatttatatcctagtaatcctgtgtcttggtttgcagtgggatgttactatctcatggtcggtcataaaaatgaacatgccagaagatatctcagcaaagccacaacacttgagaaaacctatggacctgcatggatagcctatggacattcatttgcggtggagagtgagcacgaccaagcgatggctgcttacttcacagcagcacagctgatgaaagggtgtcatttgcctatgctgtatattggattagaatatggtttgaccaataactcaaaactagctgaaaggttcttcagccaagctctgagcattgcaccggaagacccttttgttatgcatgaggtcggcgtggttgcatttcagaatggagaatggaaaacagccgaaaaatggtttcttgatgctttggaaaaaattaaagcaattgggaacgaggtaacagttgacaaatgggaacctttgttgaacaacttggggcatgtctgcagaaaacttaaaaagtatgctgaggccttggattaccaccgtcaggcactggtgttgattcctcagaacgcatccacctactctgctattggatatatccacagtctgatgggcaactttgaaaatgctgtggactacttccacacagcccttggtcttaggcgagatgatacattttctgttacaatgcttggtcattgcatcgaaatgtacattggtgattctgaagcttatattggagcagacattaaagacaaattaaaatgttatgactttgatgtgcatacaatgaagacactaaaaaacattatttcacctccgtgggatttcagggaatttgaagtagaaaaacagactgcagaagaaacggggcttacgccattggaaacctcaaggaaaactccagattccagaccttccttggaagaaacctttgaaattgaaatgaatgaaagtgacatgatgttagagacatctatgtcagaccacagcacgtgactccagtcagtggtcctggtcccactgtcccagtgtaggaacagagacccgccttaagagactggatcgcacacctttgcaacagatgtgttctgattctctgaacctacaaaatagttatacatagtggaataaagaaggtaaaccatc

SEQ ID NO: 963 - DNA, 1991 bp, Homo sapiens
  source 1..1991: mol_type = genomic DNA
cgccatgaacctagagcggctgcggaagcgcgtccggcagtacctcgaccagcaacagtatcaaagtgctctattttgggcagataaagtagcttcactctctcgtgaaccccaggacatctattggttggctcagtgtctttacctgacagcacaatatcacagagccgcccatgcacttcggtcacgaaaactggacaaattgtatgaagcatgtcgttaccttgcagctaggtgccattatgctgcaaaagagcaccagcaggcccttgatgttcttgacatggaagagcccatcaataaaagattatttgaaaaatacttgaaggacgaaagtggcttcaaagatccttccagcgactgggaaatgtcacagtcttcaataaagagttctatctgtcttctacgcgggaaaatctatgatgctctagataaccgaaccctggctacctacagctacaaagaagctttgaagcttgatgtctactgttttgaagcgttcgatcttttaacatcacatcacatgctgacagcacaagaagaaaaagaacttcttgaatcactaccccttagcaagctgtgtaatgaagaacaggaattgctgcgttttctatttgagaacaaattgaaaaaatataataagcctagtgaaacggtcatccctgaatctgtagatggcttgcaagagaatctggatgtggtagtgtctttagctgagagacattattataactgtgattttaaaatgtgctacaagcttacttctgtagtaatggagaaagatcctttccatgcaagttgtttacctgtacatatagggacgcttgtagagctgaataaagccaatgaacttttctatctttctcataaactggtggatttatatcctagtaatcctgtgtcttggtttgcagtgggatgttactatctcatggtcggtcataaaaatgaacatgccagaagatatctcagcaaagccacaacacttgagaaaacctatggacctgcatggatagcctatggacattcatttgcggtggagagtgagcacgaccaagcgatggctgcttacttcacagcagcacagctgatgaaaggatggaaaacagccgaaaaatggtttcttgatgctttggaaaaaattaaagcaattgggaacgaggtaacagttgacaaatgggaacctttgttgaacaacttggggcatgtctgcagaaaacttaaaaagtatgctgaggccttggattaccaccgtcaggcactggtgttgattcctcagaacgcatccacctactctgctattggatatatccacagtctgatgggcaactttgaaaatgctgtggactacttccacacagcccttggtcttaggcgagatgatacattttctgttacaatgcttggtcattgcatcgaaatgtacattggtgattctgaagcttatattggagcagacattaaagacaaattaaaatgttatgactttgatgtgcatacaatgaagacactaaaaaacattatttcacctccgtgggatttcagggaatttgaagtagaaaaacagactgcagaagaaacggggcttacgccattggaaacctcaaggaaaactccagattccagaccttccttggaagaaacctttgaaattgaaatgaatgaaagtgacatgatgttagagacatctatgtcagaccacagcacgtgactccagtcagtggtcctggtcccactgtcccagtgtaggttagtattccttcacatcctctccatggcttaagaatgtcccacttcctaacgtgactccaaactgcatctctacatttaggaacagagacccgccttaagagactggatcgcacacctttgcaacagatgtgttctgattctctgaacctacaaaatagttatacatagtggaataaagaaggtaaaccatctgttatgtctttttttttcttttccaataaacttttattttggactaa

SEQ ID NO: 964 - DNA, 2203 bp, Homo sapiens
  source 1..2203: mol_type = genomic DNA
cggcggcggcggctgcaggcacgggcacgggcacggggcggggtgcttagggtgcaggaggcgcgcgcctagcggcggagtgtggcgtgaggccgggcccgcgccgccatgaacctagagcggctgcggaagcgcgtccggcagtacctcgaccagcaacagtatcaaagtgctctattttgggcagataaagtagcttcactctctcgtgaagaaccccaggacatctattggttggctcagtgtctttacctgacagcacaatatcacagagccgcccatgcacttcggtcacgaaaactggacaaattgtatgaagcatgtcgttaccttgcagctaggtgccattatgctgcaaaagagcaccagcaggcccttgatgttcttgacatggaagagcccatcaataaaagattatttgaaaaatacttgaaggacgaaagtggcttcaaagatccttccagcgactgggaaatgtcacagtcttcaataaagagttctatctgtcttctacgcgggaaaatctatgatgctctagataaccgaaccctggctacctacagctacaaagaagctttgaagcttgatgtctactgttttgaagcgttcgatcttttaacatcacatcacatgctgacagcacaagaagaaaaagaacttcttgaatcactaccccttagcaagctgtgtaatgaagaacaggaattgctgcgttttctatttgagaacaaattgaaaaaatataataagcctagtgaaacggtcatccctgaatctgtagatggcttgcaagagaatctggatgtggtagtgtctttagctgagagacattattataactgtgattttaaaatgtgctacaagcttacttctgtagtaatggagaaagatcctttccatgcaagttgtttacctgtacatatagggacgcttgtagagctgaataaagccaatgaacttttctatctttctcataaactggtggatttatatcctagtaatcctgtgtcttggtttgcagtgggatgttactatctcatggtcggtcataaaaatgaacatgccagaagatatctcagcaaagccacaacacttgagaaaacctatggacctgcatggatagcctatggacattcatttgcggtggagagtgagcacgaccaagcgatggctgcttacttcacagcagcacagctgatgaaagggtgtcatttgcctatgctgtatattggattagaatatggtttgaccaataactcaaaactagctgaaaggttcttcagccaagctctgagcattgcaccggaagacccttttgttatgcatgaggtcggcgtggttgcatttcagaatggagaatggaaaacagccgaaaaatggtttcttgatgctttggaaaaaattaaagcaattgggaacgaggtaacagttgacaaatgggaacctttgttgaacaacttggggcatgtctgcagaaaacttaaaaagtatgctgaggccttggattaccaccgtcaggcactggtgttgattcctcagaacgcatccacctactctgctattggatatatccacagtctgatgggcaactttgaaaatgctgtggactacttccacacagcccttggtcttaggcgagatgatacattttctgttacaatgcttggtcattgcatcgaaatgtacattggtgattctgaagcttatattggagcagacattaaagacaaattaaaatgttatgactttgatgtgcatacaatgaagacactaaaaaacattatttcacctccgtgggatttcagggaatttgaagtagaaaaacagactgcagaagaaacggggcttacgccattggaaacctcaaggaaaactccagattccagaccttccttggaagaaacctttgaaattgaaatgaatgaaagtgacatgatgttagagacatctatgtcagaccacagcacgtgactccagtcagtggtcctggtcccactgtcccagtgtaggttagtattccttcacatcctctccatggcttaagaatgtcccacttcctaacgtgactccaaactgcatctctacatttaggaacagagacccgccttaagagactggatcgcacacctttgcaacagatgtgttctgattctctgaacctacaaaatagttatacatagtggaataaagaaggtaaaccatc

SEQ ID NO: 965 - DNA, 2211 bp, Homo sapiens
  source 1..2211: mol_type = genomic DNA
gagcctgggcagtgcacggggcctgggtggggggtgcgggtgtgggtggggacctgcggccttcgagtccgcggccttcgagtcctggggcggcggcggcggctgcaggcacgggcacgggcacggggcggggtgcttagggtgcaggaggcgcgcgcctagcggcggagtgtggcgtgaggccgggcccgcgccgccatgaacctagagcggctgcggaagcgcgtccggcagtacctcgaccagcaacagtatcaaagtgctctattttgggcagataaagtagcttcactctctcgtgaagaaccccaggacatctattggttggctcagtgtctttacctgacagcacaatatcacagagccgcccatgcacttcggtcacgaaaactggacaaattgtatgaagcatgtcgttaccttgcagctaggtgccattatgctgcaaaagagcaccagcaggcccttgatgttcttgacatggaagagcccatcaataaaagattatttgaaaaatacttgaaggacgaaagtggcttcaaagatccttccagcgactgggaaatgtcacagtcttcaataaagagttctatctgtcttctacgcgggaaaatctatgatgctctagataaccgaaccctggctacctacagctacaaagaagctttgaagcttgatgtctactgttttgaagcgttcgatcttttaacatcacatcacatgctgacagcacaagaagaaaaagaacttcttgaatcactaccccttagcaagctgtgtaatgaagaacaggaattgctgcgttttctatttgagaacaaattgaaaaaatataataagcctagtgaaacggtcatccctgaatctgtagatggcttgcaagagaatctggatgtggtagtgtctttagctgagagacattattataactgtgattttaaaatgtgctacaagcttacttctgtagtaatggagaaagatcctttccatgcaagttgtttacctgtacatatagggacgcttgtagagctgaataaagccaatgaacttttctatctttctcataaactggtggatttatatcctagtaatcctgtgtcttggtttgcagtgggatgttactatctcatggtcggtcataaaaatgaacatgccagaagatatctcagcaaagccacaacacttgagaaaacctatggacctgcatggatagcctatggacattcatttgcggtggagagtgagcacgaccaagcgatggctgcttacttcacagcagcacagctgatgaaagggtgtcatttgcctatgctgtatattggattagaatatggtttgaccaataactcaaaactagctgaaaggttcttcagccaagctctgagcattgcaccggaagacccttttgttatgcatgaggtcggcgtggttgcatttcagaatggagaatggaaaacagccgaaaaatggtttcttgatgctttggaaaaaattaaagcaattgggaacgaggtaacagttgacaaatgggaacctttgttgaacaacttggggcatgtctgcagaaaacttaaaaagtatgctgaggccttggattaccaccgtcaggcactggtgttgattcctcagaacgcatccacctactctgctattggatatatccacagtctgatgggcaactttgaaaatgctgtggactacttccacacagcccttggtcttaggcgagatgatacattttctgttacaatgcttggtcattgcatcgaaatgtacattggtgattctgaagcttatattggagcagacattaaagacaaattaaaatgttatgactttgatgtgcatacaatgaagacactaaaaaacattatttcacctccgtgggatttcagggaatttgaagtagaaaaacagactgcagaagaaacggggcttacgccattggaaacctcaaggaaaactccagattccagaccttccttggaagaaacctttgaaattgaaatgaatgaaagtgacatgatgttagagacatctatgtcagaccacagcacgtgactccagtcagtggtcctggtcccactgtcccagtgtaggaacagagacccgccttaagagactggatcgcacacctttgcaacagatgtgttctgattctctgaacctacaaaatagttatacatagtggaataaagaaggtaaaccatc

SEQ ID NO: 966 - DNA, 2034 bp, Homo sapiens; identical to SEQ ID NO: 962
  source 1..2034: mol_type = genomic DNA

SEQ ID NO: 967 - DNA, 2156 bp, Homo sapiens
  source 1..2156: mol_type = genomic DNA
gcggcggcggctgcaggcacgggcacgggcacggggcggggtgcttagggtgcaggaggcgcgcgcctagcggcggagtgtggcgtgaggccgggcccgcgccgccatgaacctagagcggctgcggaagcgcgtccggcagtacctcgaccagcaacagtatcaaagtgctctattttgggcagataaagtagcttcactctctcgtgaaccccaggacatctattggttggctcagtgtctttacctgacagcacaatatcacagagccgcccatgcacttcggtcacgaaaactggacaaattgtatgaagcatgtcgttaccttgcagctaggtgccataagtcgtgagtgatgagcggcacttctgttttccacgtagtatgctgcaaaagagcaccagcaggcccttgatgttcttgacatggaagagcccatcaataaaagattatttgaaaaatacttgaaggacgaaagtggcttcaaagatccttccagcgactgggaaatgtcacagtcttcaataaagagttctatctgtcttctacgcgggaaaatctatgatgctctagataaccgaaccctggctacctacagctacaaagaagctttgaagcttgatgtctactgttttgaagcgttcgatcttttaacatcacatcacatgctgacagcacaagaagaaaaagaacttcttgaatcactaccccttagcaagctgtgtaatgaagaacaggaattgctgcgttttctatttgagaacaaattgaaaaaatataataagcctagtgaaacggtcatccctgaatctgtagatggcttgcaagagaatctggatgtggtagtgtctttagctgagagacattattataactgtgattttaaaatgtgctacaagcttacttctgtagtaatggagaaagatcctttccatgcaagttgtttacctgtacatatagggacgcttgtagagctgaataaagccaatgaacttttctatctttctcataaactggtggatttatatcctagtaatcctgtgtcttggtttgcagtgggatgttactatctcatggtcggtcataaaaatgaacatgccagaagatatctcagcaaagccacaacacttgagaaaacctatggacctgcatggatagcctatggacattcatttgcggtggagagtgagcacgaccaagcgatggctgcttacttcacagcagcacagctgatgaaagggtgtcatttgcctatgctgtatattggattagaatatggtttgaccaataactcaaaactagctgaaaggttcttcagccaagctctgagcattgcaccggaagacccttttgttatgcatgaggtcggcgtggttgcatttcagaatggagaatggaaaacagccgaaaaatggtttcttgatgctttggaaaaaattaaagcaattgggaacgaggtaacagttgacaaatgggaacctttgttgaacaacttggggcatgtctgcagaaaacttaaaaagtatgctgaggccttggattaccaccgtcaggcactggtgttgattcctcagaacgcatccacctactctgctattggatatatccacagtctgatgggcaactttgaaaatgctgtggactacttccacacagcccttggtcttaggcgagatgatacattttctgttacaatgcttggtcattgcatcgaaatgtacattggtgattctgaagcttatattggagcagacattaaagacaaattaaaatgttatgactttgatgtgcatacaatgaagacactaaaaaacattatttcacctccgtgggatttcagggaatttgaagtagaaaaacagactgcagaagaaacggggcttacgccattggaaacctcaaggaaaactccagattccagaccttccttggaagaaacctttgaaattgaaatgaatgaaagtgacatgatgttagagacatctatgtcagaccacagcacgtgactccagtcagtggtcctggtcccactgtcccagtgtaggaacagagacccgccttaagagactggatcgcacacctttgcaacagatgtgttctgattctctgaacctacaaaatagttatacatagtggaataaagaaggtaaaccatc

SEQ ID NO: 968 - DNA, 2140 bp, Homo sapiens
  source 1..2140: mol_type = genomic DNA
gagcctgggcagtgcacggggcctgggtggggggtgcgggtgtgggtggggacctgcggccttcgagtccgcggccttcgagtcctggggcggcggcggcggctgcaggcacgggcacgggcacggggcggggtgcttagggtgcaggaggcgcgcgcctagcggcggagtgtggcgtgaggccgggcccgcgccgccatgaacctagagcggctgcggaagcgcgtccggcagtacctcgaccagcaacagtatcaaagtgctctattttgggcagataaagtagcttcactctctcgtgaagaaccccaggacatctattggttggctcagtgtctttacctgacagcacaatatcacagagccgcccatgcacttcggtcacgaaaactggacaaattgtatgaagcatgtcgttaccttgcagctaggtgccattatgctgcaaaagagcaccagcaggcccttgatgttcttgacatggaagagcccatcaataaaagattatttgaaaaatacttgaaggacgaaagtggcttcaaagatccttccagcgactgggaaatgtcacagtcttcaataaagagttctatctgtcttctacgcgggaaaatctatgatgctctagataaccgaaccctggctacctacagctacaaagaagctttgaagcttgatgtctactgttttgaagcgttcgatcttttaacatcacatcacatgctgacagcacaagaagaaaaagaacttcttgaatcactaccccttagcaagctgtgtaatgaagaacaggaattgctgcgttttctatttgagaacaaattgaaaaaatataataagcctagtgaaacggtcatccctgaatctgtagatggcttgcaagagaatctggatgtggtagtgtctttagctgagagacattattataactgtgattttaaaatgtgctacaagcttacttctgtagtaatggagaaagatcctttccatgcaagttgtttacctgtacatatagggacgcttgtagagctgaataaagccaatgaacttttctatctttctcataaactggtggatttatatcctagtaatcctgtgtcttggtttgcagtgggatgttactatctcatggtcggtcataaaaatgaacatgccagaagatatctcagcaaagccacaacacttgagaaaacctatggacctgcatggatagcctatggacattcatttgcggtggagagtgagcacgaccaagcgatggctgcttacttcacagcagcacagctgatgaaaggatggaaaacagccgaaaaatggtttcttgatgctttggaaaaaattaaagcaattgggaacgaggtaacagttgacaaatgggaacctttgttgaacaacttggggcatgtctgcagaaaacttaaaaagtatgctgaggccttggattaccaccgtcaggcactggtgttgattcctcagaacgcatccacctactctgctattggatatatccacagtctgatgggcaactttgaaaatgctgtggactacttccacacagcccttggtcttaggcgagatgatacattttctgttacaatgcttggtcattgcatcgaaatgtacattggtgattctgaagcttatattggagcagacattaaagacaaattaaaatgttatgactttgatgtgcatacaatgaagacactaaaaaacattatttcacctccgtgggatttcagggaatttgaagtagaaaaacagactgcagaagaaacggggcttacgccattggaaacctcaaggaaaactccagattccagaccttccttggaagaaacctttgaaattgaaatgaatgaaagtgacatgatgttagagacatctatgtcagaccacagcacgtgactccagtcagtggtcctggtcccactgtcccagtgtaggttagtattccttcacatcctctccatggcttaagaatgtcccacttcctaacgtgactccaaactgcatctctacatttaggaacagagacccgccttaagagactggatcgcacacctttgcaacagatgtgttctgattctctgaacctacaaaatagttatacatagtggaataaagaaggtaaaccatc

SEQ ID NO: 969 - DNA, 1675 bp, Homo sapiens
  source 1..1675: mol_type = genomic DNA
gaggcgtaagccaggcgtgttaaagccggtcggaactgctccggagggcacgggctccgtaggcaccaactgcaaggacccctccccctgcgggcgctcccatggcacagttcgcgttcgagagtgacctgcactcgctgcttcagctggatgcacccatccccaatgcaccccctgcgcgctggcagcgcaaagccaaggaagccgcaggcccggccccctcacccatgcgggccgccaaccgatcccacagcgccggcaggactccgggccgaactcctggcaaatccagttccaaggttcagaccactcctagcaaacctggcggtgaccgctatatcccccatcgcagtgctgcccagatggaggtggccagcttcctcctgagcaaggagaaccagcctgaaaacagccagacgcccaccaagaaggaacatcagaaagcctgggctttgaacctgaacggttttgatgtagaggaagccaagatccttcggctcagtggaaaaccacaaaatgcgccagagggttatcagaacagactgaaagtactctacagccaaaaggccactcctggctccagccggaagacctgccgttacattccttccctgccagaccgtatcctggatgcgcctgaaatccgaaatgactattacctgaaccttgtggattggagttctgggaatgtactggccgtggcactggacaacagtgtgtacctgtggagtgcaagctctggtgacatcctgcagcttttgcaaatggagcagcctggggaatatatatcctctgtggcctggatcaaagagggcaactacttggctgtgggcaccagcagtgctgaggtgcagctatgggatgtgcagcagcagaaacggcttcgaaatatgaccagtcactctgcccgagtgggctccctaagctggaacagctatatcctgtccagtggttcacgttctggccacatccaccaccatgatgttcgggtagcagaacaccatgtggccacactgagtggccacagccaggaagtgtgtgggctgcgctgggccccagatggacgacatttggccagtggtggtaatgataacttggtcaatgtgtggcctagtgctcctggagagggtggctgggttcctctgcagacattcacccagcatcaaggggctgtcaaggccgtagcatggtgtccctggcagtccaatgtcctggcaacaggagggggcaccagtgatcgacacattcgcatctggaatgtgtgctctggggcctgtctgagtgccgtggatgcccattcccaggtgtgctccatcctctggtctccccattacaaggagctcatctcaggccatggctttgcacagaaccagctagttatttggaagtacccaaccatggccaaggtggctgaactcaaaggtcacacatcccgggtcctgagtctgaccatgagcccagatggggccacagtggcatccgcagcagcagatgagaccctgaggctatggcgctgttttgagttggaccctgcgcggcggcgggagcgggagaaggccagtgcagccaaaagcagcctcatccaccaaggcatccgctgaagaccaacccatcacctcagttgttttttatttttctaataaagtcatgtctcccttcatgttttttttttaaa

SEQ ID NO: 970 - DNA, 1777 bp, Homo sapiens
  source 1..1777: mol_type = genomic DNA
ggtggtggggctgagccgaggtggggccgtggccagggggagggggtgctaggccggaaggggctgcagccgagggtggccctgattttgtggccggccaggagcgaaggggtccctttctgtcccctgagcaccgtcgcctcctttcctccagggctccgtaggcaccaactgcaaggacccctccccctgcgggcgctcccatggcacagttcgcgttcgagagtgacctgcactcgctgcttcagctggatgcacccatccccaatgcaccccctgcgcgctggcagcgcaaagccaaggaagccgcaggcccggccccctcacccatgcgggccgccaaccgatcccacagcgccggcaggactccgggccgaactcctggcaaatccagttccaaggttcagaccactcctagcaaacctggcggtgaccgctatatcccccatcgcagtgctgcccagatggaggtggccagcttcctcctgagcaaggagaaccagcctgaaaacagccagacgcccaccaagaaggaacatcagaaagcctgggctttgaacctgaacggttttgatgtagaggaagccaagatccttcggctcagtggaaaaccacaaaatgcgccagagggttatcagaacagactgaaagtactctacagccaaaaggccactcctggctccagccggaagacctgccgttacattccttccctgccagaccgtatcctggatgcgcctgaaatccgaaatgactattacctgaaccttgtggattggagttctgggaatgtactggccgtggcactggacaacagtgtgtacctgtggagtgcaagctctggtgacatcctgcagcttttgcaaatggagcagcctggggaatatatatcctctgtggcctggatcaaagagggcaactacttggctgtgggcaccagcagtgctgaggtgcagctatgggatgtgcagcagcagaaacggcttcgaaatatgaccagtcactctgcccgagtgggctccctaagctggaacagctatatcctgtccagtggttcacgttctggccacatccaccaccatgatgttcgggtagcagaacaccatgtggccacactgagtggccacagccaggaagtgtgtgggctgcgctgggccccagatggacgacatttggccagtggtggtaatgataacttggtcaatgtgtggcctagtgctcctggagagggtggctgggttcctctgcagacattcacccagcatcaaggggctgtcaaggccgtagcatggtgtccctggcagtccaatgtcctggcaacaggagggggcaccagtgatcgacacattcgcatctggaatgtgtgctctggggcctgtctgagtgccgtggatgcccattcccaggtgtgctccatcctctggtctccccattacaaggagctcatctcaggccatggctttgcacagaaccagctagttatttggaagtacccaaccatggccaaggtggctgaactcaaaggtcacacatcccgggtcctgagtctgaccatgagcccagatggggccacagtggcatccgcagcagcagatgagaccctgaggctatggcgctgttttgagttggaccctgcgcggcggcgggagcgggagaaggccagtgcagccaaaagcagcctcatccaccaaggcatccgctgaagaccaacccatcacctcagttgttttttatttttctaataaagtcatgtctcccttcatgttttttttttaaa

SEQ ID NO: 971 - DNA, 1627 bp, Homo sapiens
  source 1..1627: mol_type = genomic DNA
aataggcgctcggagcggagagtttaagaggcgtaagccaggcgtgttaaagccggtcggaactgctccggagggcacgggctccgtaggcaccaactgcaaggacccctccccctgcgggcgctcccatggcacagttcgcgttcgagagtgacctgcactcgctgcttcagctggatgcacccatccccaatgcaccccctgcgcgctggcagcgcaaagccaaggaagccgcaggcccggccccctcacccatgcgggccgccaaccgatcccacagcgccggcaggactccgggccgaactcctggcaaatccagttccaaggttcagaccactcctagcaaggagaaccagcctgaaaacagccagacgcccaccaagaaggaacatcagaaagcctgggctttgaacctgaacggttttgatgtagaggaagccaagatccttcggctcagtggaaaaccacaaaatgcgccagagggttatcagaacagactgaaagtactctacagccaaaaggccactcctggctccagccggaagacctgccgttacattccttccctgccagaccgtatcctggatgcgcctgaaatccgaaatgactattacctgaaccttgtggattggagttctgggaatgtactggccgtggcactggacaacagtgtgtacctgtggagtgcaagctctggtgacatcctgcagcttttgcaaatggagcagcctggggaatatatatcctctgtggcctggatcaaagagggcaactacttggctgtgggcaccagcagtgctgaggtgcagctatgggatgtgcagcagcagaaacggcttcgaaatatgaccagtcactctgcccgagtgggctccctaagctggaacagctatatcctgtccagtggttcacgttctggccacatccaccaccatgatgttcgggtagcagaacaccatgtggccacactgagtggccacagccaggaagtgtgtgggctgcgctgggccccagatggacgacatttggccagtggtggtaatgataacttggtcaatgtgtggcctagtgctcctggagagggtggctgggttcctctgcagacattcacccagcatcaaggggctgtcaaggccgtagcatggtgtccctggcagtccaatgtcctggcaacaggagggggcaccagtgatcgacacattcgcatctggaatgtgtgctctggggcctgtctgagtgccgtggatgcccattcccaggtgtgctccatcctctggtctccccattacaaggagctcatctcaggccatggctttgcacagaaccagctagttatttggaagtacccaaccatggccaaggtggctgaactcaaaggtcacacatcccgggtcctgagtctgaccatgagcccagatggggccacagtggcatccgcagcagcagatgagaccctgaggctatggcgctgttttgagttggaccctgcgcggcggcgggagcgggagaaggccagtgcagccaaaagcagcctcatccaccaaggcatccgctgaagaccaacccatcacctcagttgttttttatttttctaataaagtcatgtctcccttcatgtttttttttt

SEQ ID NO: 972 - DNA, 2128 bp, Homo sapiens
  source 1..2128: mol_type = genomic DNA
gtttgaatggtcaacgcctgcggctgttgatattcttgctcagaggccgtaactttggccttctgctcagggaagactctgagtccgacgttggcctacccagtcggaaggcagagctgcaatctagttaactacctcctttcccctagatttcctttcattctgctcaagtcttcgcctgtgtccgatccctatctactttctctcctcttgtaggcaagcctcagactccaggcttgagctaggttttgtttttctcctggtgagaattcgaagaccatgtctacggaactcttctcatccacaagagaggaaggaagctctggctcaggacccagttttaggtctaatcaaaggaaaatgttaaacctgctcctggagagagacacttcctttaccgtctgtccagatgtccctagaactccagtgggcaaatttcttggtgattctgcaaacctaagcattttgtctggaggaaccccaaaacgttgcctcgatctttcgaatcttagcagtggggagataactgccactcagcttaccacttctgcagaccttgatgaaactggtcacctggattcttcaggacttcaggaagtgcatttagctgggatgaatcatgaccagcacctaatgaaatgtagcccagcacagcttctttgtagcactccgaatggtttggaccgtggccatagaaagagagatgcaatgtgtagttcatctgcaaataaagaaaatgacaatggaaacttggtggacagtgaaatgaaatatttgggcagtcccattactactgttccaaaattggataaaaatccaaacctaggagaagaccaggcagaagagatttcagatgaattaatggagttttccctgaaagatcaagaagcaaaggtgagcagaagtggcctatatcgctccccgtcgatgccagagaacttgaacaggccaagactgaagcaggtggaaaaattcaaggacaacacaataccagataaagttaaaaaaaagtatttttctggccaaggaaagctcaggaagggcttatgtttaaagaagacagtctctctgtgtgacattactatcactcagatgctggaggaagattctaaccaggggcacctgattggtgatttttccaaggtatgtgcgctgccaaccgtgtcagggaaacaccaagatctgaagtatgtcaacccagaaacagtggctgccttactgtcggggaagttccagggtctgattgagaagttttatgtcattgattgtcgctatccatatgagtatctgggaggacacatccagggagccttaaacttatatagtcaggaagaactgtttaacttctttctgaagaagcccatcgtccctttggacacccagaagagaataatcatcgtgttccactgtgaattctcctcagagaggggcccccgaatgtgccgctgtctgcgtgaagaggacaggtctctgaaccagtatcctgcattgtactacccagagctatatatccttaaaggcggctacagagacttctttccagaatatatggaactgtgtgaaccacagagctactgccctatgcatcatcaggaccacaagactgagttgctgaggtgtcgaagccagagcaaagtgcaggaaggggagcggcagctgcgggagcagattgcccttctggtgaaggacatgagcccatgataacattccagccactggctgctaacaagtcaccaaaagacactgcagaaaccctgagcagaaagaggccttctggatggccaaacccaagattattaaaagatgtctctgcaaaccaacaggctaccaacttgtatccaggcctgggaatggattaggtttcagcagagctgaaagctggtggcagagtcctggagctggctctataaggcagccttgagttgcatagagatttgtattggttcagggaactctggcattccttttcccaactcctcatgtcttctcacaagccagccaactctttctctctgggcttcgggctatgcaagagcgttgtctaccttctttctttgtattttccttctttgtttccccctctttcttttttaaaaatggaaaaataaacactacagaatgagaggtg

SEQ ID NO: 973 - DNA, 1896 bp, Homo sapiens
  source 1..1896: mol_type = genomic DNA
ggtcaacgcctgcggctgttgatattcttgctcagaggccgtaactttggccttctgctcagggaagactctgagtccgacgttggcctacccagtcggaaggcagagctgcaatctagttaactacctcctttcccctagatttcctttcattctgctcaagtcttcgcctgtgtccgatccctatctactttctctcctcttgtaggcaagcctcagactccaggcttgagctaggttttgtttttctcctggtgagaattcgaagaccatgtctacggaactcttctcatccacaagagaggaaggaagctctggctcaggacccagttttaggtctaatcaaaggaaaatgttaaacctgctcctggagagagacacttcctttaccgtctgtccagatgtccctagaactccagtgggcaaatttcttggtgattctgcaaacctaagcattttgtctgggtcacctggattcttcaggacttcaggaagtgcatttagctgggatgacaatggaaacttggtggacagtgaaatgaaatatttgggcagtcccattactactgttccaaaattggataaaaatccaaacctaggagaagaccaggcagaagagatttcagatgaattaatggagttttccctgaaagatcaagaagcaaaggtgagcagaagtggcctatatcgctccccgtcgatgccagagaacttgaacaggccaagactgaagcaggtggaaaaattcaaggacaacacaataccagataaagttaaaaaaaagtatttttctggccaaggaaagctcaggaagggcttatgtttaaagaagacagtctctctgtgtgacattactatcactcagatgctggaggaagattctaaccaggggcacctgattggtgatttttccaaggtatgtgcgctgccaaccgtgtcagggaaacaccaagatctgaagtatgtcaacccagaaacagtggctgccttactgtcggggaagttccagggtctgattgagaagttttatgtcattgattgtcgctatccatatgagtatctgggaggacacatccagggagccttaaacttatatagtcaggaagaactgtttaacttctttctgaagaagcccatcgtccctttggacacccagaagagaataatcatcgtgttccactgtgaattctcctcagagaggggcccccgaatgtgccgctgtctgcgtgaagaggacaggtctctgaaccagtatcctgcattgtactacccagagctatatatccttaaaggcggctacagagacttctttccagaatatatggaactgtgtgaaccacagagctactgccctatgcatcatcaggaccacaagactgagttgctgaggtgtcgaagccagagcaaagtgcaggaaggggagcggcagctgcgggagcagattgcccttctggtgaaggacatgagcccatgataacattccagccactggctgctaacaagtcaccaaaagacactgcagaaaccctgagcagaaagaggccttctggatggccaaacccaagattattaaaagatgtctctgcaaaccaacaggctaccaacttgtatccaggcctgggaatggattaggtttcagcagagctgaaagctggtggcagagtcctggagctggctctataaggcagccttgagttgcatagagatttgtattggttcagggaactctggcattccttttcccaactcctcatgtcttctcacaagccagccaactctttctctctgggcttcgggctatgcaagagcgttgtctaccttctttctttgtattttccttctttgtttccccctctttcttttttaaaaatggaaaaataaacactacagaatgag

SEQ ID NO: 974 - DNA, 2025 bp, Homo sapiens
  source 1..2025: mol_type = genomic DNA
ggtcaacgcctgcggctgttgatattcttgctcagaggccgtaactttggccttctgctcagggaagactctgagtccgacgttggcctacccagtcggaaggcagagctgcaatctagttaactacctcctttcccctagatttcctttcattctgctcaagtcttcgcctgtgtccgatccctatctactttctctcctcttgtaggcaagcctcagactccaggcttgagctaggttttgtttttctcctggtgagaattcgaagaccatgtctacggaactcttctcatccacaagagaggaaggaagctctggctcaggacccagttttaggtctaatcaaaggaaaatgttaaacctgctcctggagagagacacttcctttaccgtctgtccagatgtccctagaactccagtgggcaaatttcttggtgattctgcaaacctaagcattttgtctggaggaaccccaaaacgttgcctcgatctttcgaatcttagcagtggggagataactgccactcagcttaccacttctgcagaccttgatgaaactggtcacctggattcttcaggacttcaggaagtgcatttagctgggatgaatcatgaccagcacctaatgaaatgtagcccagacaatggaaacttggtggacagtgaaatgaaatatttgggcagtcccattactactgttccaaaattggataaaaatccaaacctaggagaagaccaggcagaagagatttcagatgaattaatggagttttccctgaaagatcaagaagcaaaggtgagcagaagtggcctatatcgctccccgtcgatgccagagaacttgaacaggccaagactgaagcaggtggaaaaattcaaggacaacacaataccagataaagttaaaaaaaagtatttttctggccaaggaaagctcaggaagggcttatgtttaaagaagacagtctctctgtgtgacattactatcactcagatgctggaggaagattctaaccaggggcacctgattggtgatttttccaaggtatgtgcgctgccaaccgtgtcagggaaacaccaagatctgaagtatgtcaacccagaaacagtggctgccttactgtcggggaagttccagggtctgattgagaagttttatgtcattgattgtcgctatccatatgagtatctgggaggacacatccagggagccttaaacttatatagtcaggaagaactgtttaacttctttctgaagaagcccatcgtccctttggacacccagaagagaataatcatcgtgttccactgtgaattctcctcagagaggggcccccgaatgtgccgctgtctgcgtgaagaggacaggtctctgaaccagtatcctgcattgtactacccagagctatatatccttaaaggcggctacagagacttctttccagaatatatggaactgtgtgaaccacagagctactgccctatgcatcatcaggaccacaagactgagttgctgaggtgtcgaagccagagcaaagtgcaggaaggggagcggcagctgcgggagcagattgcccttctggtgaaggacatgagcccatgataacattccagccactggctgctaacaagtcaccaaaagacactgcagaaaccctgagcagaaagaggccttctggatggccaaacccaagattattaaaagatgtctctgcaaaccaacaggctaccaacttgtatccaggcctgggaatggattaggtttcagcagagctgaaagctggtggcagagtcctggagctggctctataaggcagccttgagttgcatagagatttgtattggttcagggaactctggcattccttttcccaactcctcatgtcttctcacaagccagccaactctttctctctgggcttcgggctatgcaagagcgttgtctaccttctttctttgtattttccttctttgtttccccctctttcttttttaaaaatggaaaaataaacactacagaatgag

SEQ ID NO: 975 - DNA, 1986 bp, Homo sapiens
  source 1..1986: mol_type = genomic DNA
ggtcaacgcctgcggctgttgatattcttgctcagaggccgtaactttggccttctgctcagggaagactctgagtccgacgttggcctacccagtcggaaggcagagctgcaatctagttaactacctcctttcccctagatttcctttcattctgctcaagtcttcgcctgtgtccgatccctatctactttctctcctcttgtaggcaagcctcagactccaggcttgagctaggttttgtttttctcctggtgagaattcgaagaccatgtctacggaactcttctcatccacaagagaggaaggaagctctggctcaggacccagttttaggtctaatcaaaggaaaatgttaaacctgctcctggagagagacacttcctttaccgtctgtccagatgtccctagaactccagtgggcaaatttcttggtgattctgcaaacctaagcattttgtctgggtcacctggattcttcaggacttcaggaagtgcatttagctgggatgcacagcttctttgtagcactccgaatggtttggaccgtggccatagaaagagagatgcaatgtgtagttcatctgcaaataaagaaaatgacaatggaaacttggtggacagtgaaatgaaatatttgggcagtcccattactactgttccaaaattggataaaaatccaaacctaggagaagaccaggcagaagagatttcagatgaattaatggagttttccctgaaagatcaagaagcaaaggtgagcagaagtggcctatatcgctccccgtcgatgccagagaacttgaacaggccaagactgaagcaggtggaaaaattcaaggacaacacaataccagataaagttaaaaaaaagtatttttctggccaaggaaagctcaggaagggcttatgtttaaagaagacagtctctctgtgtgacattactatcactcagatgctggaggaagattctaaccaggggcacctgattggtgatttttccaaggtatgtgcgctgccaaccgtgtcagggaaacaccaagatctgaagtatgtcaacccagaaacagtggctgccttactgtcggggaagttccagggtctgattgagaagttttatgtcattgattgtcgctatccatatgagtatctgggaggacacatccagggagccttaaacttatatagtcaggaagaactgtttaacttctttctgaagaagcccatcgtccctttggacacccagaagagaataatcatcgtgttccactgtgaattctcctcagagaggggcccccgaatgtgccgctgtctgcgtgaagaggacaggtctctgaaccagtatcctgcattgtactacccagagctatatatccttaaaggcggctacagagacttctttccagaatatatggaactgtgtgaaccacagagctactgccctatgcatcatcaggaccacaagactgagttgctgaggtgtcgaagccagagcaaagtgcaggaaggggagcggcagctgcgggagcagattgcccttctggtgaaggacatgagcccatgataacattccagccactggctgctaacaagtcaccaaaagacactgcagaaaccctgagcagaaagaggccttctggatggccaaacccaagattattaaaagatgtctctgcaaaccaacaggctaccaacttgtatccaggcctgggaatggattaggtttcagcagagctgaaagctggtggcagagtcctggagctggctctataaggcagccttgagttgcatagagatttgtattggttcagggaactctggcattccttttcccaactcctcatgtcttctcacaagccagccaactctttctctctgggcttcgggctatgcaagagcgttgtctaccttctttctttgtattttccttctttgtttccccctctttcttttttaaaaatggaaaaataaacactacagaatgag

SEQ ID NO: 976 - DNA, 1556 bp, Homo sapiens
  source 1..1556: mol_type = genomic DNA
agaggccgtaactttggccttctgctcagggaagactctgagtccgacgttggcctacccagtcggaaggcagagctgcaatctagttaactacctcctttcccctagatttcctttcattctgctcaagtcttcgcctgtgtccgatccctatctactttctctcctcttgtaggcaagcctcagactccaggcttgaggttttgtttttctcctggtgagaattcgaagaccatgtctacggaactcttctcatccacaagagaggaaggaagctctggctcaggacccagttttaggtctaatcaaaggaaaatgttaaacctgctcctggagagagacacttcctttaccgtctgtccagatgtccctagaactccagtgggcaaatttcttggtgattctgcaaacctaagcattttgtctgggtcacctggattcttcaggacttcaggaagtgcatttagctgggatgacaatggaaacttggtggacagtgaaatgaaatatttgggcagtcccattactactgttccaaaattggataaaaatccaaacctaggagaagaccaggcagaagagatttcagatgaattaatggagttttccctgaaagatcaagaagcaaaggtgagcagaagtggcctatatcgctccccgtcgatgccagagaacttgaacaggccaagactgaagcaggtggaaaaattcaaggacaacacaataccagataaagttaaaaaaaagtatttttctggccaaggaaagctcaggaagggcttatgtttaaagaagacagtctctctgtgtgacattactatcactcagatgctggaggaagattctaaccaggggcacctgattggtgatttttccaaggtatgtgcgctgccaaccgtgtcagggaaacaccaagatctgaagtatgtcaacccagaaacagtggctgccttactgtcggggaagttccagggtctgattgagaagttttatgtcattgattgtcgctatccatatgagtatctgggaggacacatccagggagccttaaacttatatagtcaggaagaactgtttaacttctttctgaagaagcccatcgtccctttggacacccagaagagaataatcatcgtgttccactgtgaattctcctcagagaggggcccccgaatgtgccgctgtctgcgtgaagaggacaggtctctgaaccagtatcctgcattgtactacccagagctatatatccttaaaggcggctacagagacttctttccagaatatatggaactgtgtgaaccacagagctactgccctatgcatcatcaggaccacaagactgagttgctgaggtgtcgaagccagagcaaagtgcaggaaggggagcggcagctgcgggagcagattgcccttctggtgaaggacatgagcccatgataacattccagccactggctgctaacaagtcaccaaaagacactgcagaaaccctgagcagaaagaggccttctggatggccaaacccaagattattaaaagatgtctctgcaaaccaa

SEQ ID NO: 977 - DNA, 1059 bp, Homo sapiens
  source 1..1059: mol_type = genomic DNA
agaggcgagcggggataggttactgggctggcggaaggtttgaatggtcaacgcctgcggctgttgatattcttgctcagaggccgtaactttggccttctgctcagggaagactctgagtccgacgttggcctacccagtcggaaggcagagctgcaatctagttaactacctcctttcccctagatttcctttcattctgctcaagtcttcgcctgtgtccgatccctatctactttctctcctcttgtaggcaagcctcagactccaggcttgaggttttgtttttctcctggtgagaattcgaagaccatgtctacggaactcttctcatccacaagagaggaaggaagctctggctcaggacccagttttaggtctaatcaaaggaaaatgttaaacctgctcctggagagagacacttcctttaccgtctgtccagatgtccctagaactccagtgggcaaatttcttggtgattctgcaaacctaagcattttgtctggaggaaccccaaaacgttgcctcgatctttcgaatcttagcagtggggagataactgccactcagcttaccacttctgcagaccttgatgaaactggtcacctggattcttcaggacttcaggaagtgcatttagctgggatgaatcatgaccagcacctaatgaaatgtagcccagcacagcttctttgtagcactccgaatggtttggaccgtggccatagaaagagagatgcaatgtgtagttcatctgcaaataaagaaaatgacaatggaaacttggtggacagtgaaatgaaatatttgggcagtcccattactactgttccaaaattggataaaaatccaaacctaggagaagaccaggcagaagagatttcagatgaattaatggagttttccctgaaagatcaagaagcaaaggtgagcagaagtggcctatatcgctccccgtcgatgccagagaacttgaacaggccaagactgaagcaggtggaaaaattcaaggacaacacaataccagataaagttaaaaaaaagtatttttctggccaa

SEQ ID NO: 978 - DNA, 1968 bp, Homo sapiens
  source 1..1968: mol_type = genomic DNA
gaggtgcccgccccgaggccccagcgccacctgccctccaccacctaccgcggttcctccagctcccagggccgcggccggagcagctctgagcgctcggttcgccccacggtgcccttaaaaggcgctggcgcgaaccaacgagtccctgaggagagtagggggacagctccggctcgcagaatccccccaagccacccatggagggcgcagctccgtgtcgtgtctctctcaaagtgtctctcggacagcgctgttgggaacgagcctggcgctttgatttagggatgggggtggtttcctcactaacgagtcaccccctccaaaatatcgcagaaagtggacggccccagttggaggcacatcttgaaacccgcgggggaggccatgtcggaagaaggttttgtttttctcctggtgagaattcgaagaccatgtctacggaactcttctcatccacaagagaggaaggaagctctggctcaggacccagttttaggtctaatcaaaggaaaatgttaaacctgctcctggagagagacacttcctttaccgtctgtccagatgtccctagaactccagtgggcaaatttcttggtgattctgcaaacctaagcattttgtctggaggaaccccaaaacgttgcctcgatctttcgaatcttagcagtggggagataactgccactcagcttaccacttctgcagaccttgatgaaactggtcacctggattcttcaggacttcaggaagtgcatttagctgggatgaatcatgaccagcacctaatgaaatgtagcccagcacagcttctttgtagcactccgaatggtttggaccgtggccatagaaagagagatgcaatgtgtagttcatctgcaaataaagaaaatgacaatggaaacttggtggacagtgaaatgaaatatttgggcagtcccattactactgttccaaaattggataaaaatccaaacctaggagaagaccaggcagaagagatttcagatgaattaatggagttttccctgaaagatcaagaagcaaaggtgagcagaagtggcctatatcgctccccgtcgatgccagagaacttgaacaggccaagactgaagcaggtggaaaaattcaaggacaacacaataccagataaagttaaaaaaaagtatttttctggccaaggaaagctcaggaagggcttatgtttaaagaagacagtctctctgtgtgacattactatcactcagatgctggaggaagattctaaccaggggcacctgattggtgatttttccaaggtatgtgcgctgccaaccgtgtcagggaaacaccaagatctgaagtatgtcaacccagaaacagtggctgccttactgtcggggaagttccagggtctgattgagaagttttatgtcattgattgtcgctatccatatgagtatctgggaggacacatccagggagccttaaacttatatagtcaggaagaactgtttaacttctttctgaagaagcccatcgtccctttggacacccagaagagaataatcatcgtgttccactgtgaattctcctcagagaggggcccccgaatgtgccgctgtctgcgtgaagaggacaggtctctgaaccagtatcctgcattgtactacccagagctatatatccttaaaggcggctacagagacttctttccagaatatatggaactgtgtgaaccacagagctactgccctatgcatcatcaggaccacaagactgagttgctgaggtgtcgaagccagagcaaagtgcaggaaggggagcggcagctgcgggagcagattgcccttctggtgaaggacatgagcccatgataacattccagccactggctgctaacaagtcaccaaaagacactgcagaaaccctgagcagaaagaggccttctggatggccaaacccaagattattaaaagatgtctctgc

SEQ ID NO: 979 - DNA, 1919 bp, Homo sapiens
  source 1..1919: mol_type = genomic DNA
agcgccacctgccctccaccacctaccgcggttcctccagctcccagggccgcggccggagcagctctgagcgctcggttcgccccacggtgcccttaaaaggcgctggcgcgaaccaacgagtccctgaggagagtagggggacagctccggctcgcagctccgtgtcgtgtctctctcaaagtgtctctcggacagcgctgttgggaacgagcctggcgctttgatttagggatgggggtggtttcctcactaacgagtcaccccctccaaaatatcgcagaaagtggacggccccagttggaggcacatcttgaaacccgcgggggaggccatgtcggaagaagctaggttttgtttttctcctggtgagaattcgaagaccatgtctacggaactcttctcatccacaagagaggaaggaagctctggctcaggacccagttttaggtctaatcaaaggaaaatgttaaacctgctcctggagagagacacttcctttaccgtctgtccagatgtccctagaactccagtgggcaaatttcttggtgattctgcaaacctaagcattttgtctggaggaaccccaaaacgttgcctcgatctttcgaatcttagcagtggggagataactgccactcagcttaccacttctgcagaccttgatgaaactggtcacctggattcttcaggacttcaggaagtgcatttagctgggatgaatcatgaccagcacctaatgaaatgtagcccagcacagcttctttgtagcactccgaatggtttggaccgtggccatagaaagagagatgcaatgtgtagttcatctgcaaataaagaaaatgacaatggaaacttggtggacagtgaaatgaaatatttgggcagtcccattactactgttccaaaattggataaaaatccaaacctaggagaagaccaggcagaagagatttcagatgaattaatggagttttccctgaaagatcaagaagcaaaggtgagcagaagtggcctatatcgctccccgtcgatgccagagaacttgaacaggccaagactgaagcaggtggaaaaattcaaggacaacacaataccagataaagttaaaaaaaagtatttttctggccaaggaaagctcaggaagggcttatgtttaaagaagacagtctctctgtgtgacattactatcactcagatgctggaggaagattctaaccaggggcacctgattggtgatttttccaaggtatgtgcgctgccaaccgtgtcagggaaacaccaagatctgaagtatgtcaacccagaaacagtggctgccttactgtcggggaagttccagggtctgattgagaagttttatgtcattgattgtcgctatccatatgagtatctgggaggacacatccagggagccttaaacttatatagtcaggaagaactgtttaacttctttctgaagaagcccatcgtccctttggacacccagaagagaataatcatcgtgttccactgtgaattctcctcagagaggggcccccgaatgtgccgctgtctgcgtgaagaggacaggtctctgaaccagtatcctgcattgtactacccagagctatatatccttaaaggcggctacagagacttctttccagaatatatggaactgtgtgaaccacagagctactgccctatgcatcatcaggaccacaagactgagttgctgaggtgtcgaagccagagcaaagtgcaggaaggggagcggcagctgcgggagcagattgcccttctggtgaaggacatgagcccatgataacattccagccactggctgctaacaagtcaccaaaagacactgcagaaaccctgagcagaaagaggccttctggatggccaaacccaagattattaaaagatgtctctgc

SEQ ID NO: 980 - DNA, 1442 bp, Homo sapiens
  source 1..1442: mol_type = genomic DNA
ggcaagcgccggtggggcggcggcgccagagctgctggagcgctcggggtccccgggcggcggcggcggcgcagaggaggaggcaggcggcggccccggtggctcccccccggacggtgcgcggcccggcccgtctcgcgaactcgcggtggtcgcgcggccccgcgctgctccgaccccgggcccctccgccgccgccatggctcggccgctagtgcccagctcgcagaaggcgctgctgctggagctcaaggggctgcaggaagagccggtcgagggattccgcgtgacactggtggacgagggcgatctatacaactgggaggtggccatcttcgggccccccaacacctactacgagggcggctacttcaaggcgcgcctcaagttccccatcgactacccatactctccaccagcctttcggttcctgaccaagatgtggcaccctaacatctacgagacgggggacgtgtgtatctccatcctccacccgccggtggacgacccccagagcggggagctgccctcagagaggtggaaccccacgcagaacgtcaggaccattctcctgagtgtgatctccctcctgaacgagcccaacaccttctcgcccgcaaacgtggacgcctccgtgatgtacaggaagtggaaagagagcaaggggaaggatcgggagtacacagacatcatccggaagcaggtcctggggaccaaggtggacgcggagcgtgacggcgtgaaggtgcccaccacgctggccgagtactgcgtgaagaccaaggcgccggcgcccgacgagggctcagacctcttctacgacgactactacgaggacggcgaggtggaggaggaggccgacagctgcttcggggacgatgaggatgactctggcacggaggagtcctgacaccaccagaataaacttgccgagtttacctcactagggccggacccgtggctccttagacgacagactacctcacggaggttttgtgctggtccccgtctcctctggttgtttcgttttggctttttctccctccccatgtctgttctgggttttcacgtgcttcagagaagaggggctgccccaccgccactcacgtcactcggggctcggtggacgggcccagggtgggagcggccggcccacctgtcccctcgggaggggagctgagcccgacttctaccggggtcccccagcttccggactggccgcaccccggaggagccacgggggcgctgctgggaacgtgggcggggggccgtttcctgacactaccagcctgggaggcccaggtgtagcggtccgaggggcccggtcctgcctgtcagctccaggtcctggagccacgtccagcacagagtggacggattcaccgtggccgactcttttccctgctttggtttgtttgaaatctaaataaaactactttatg

SEQ ID NO: 981 - DNA, 1452 bp, Homo sapiens
  source 1..1452: mol_type = genomic DNA
ggcagccgaggagaccccgcgcagtgctgccaacgccccggtggagaagctgaggtcatcatcagatttgaaatatttaaagtggatacaaaactatttcagcaatgcagacaattaagtgtgttgttgtgggcgatggtgctgttggtaaaacatgtctcctgatatcctacacaacaaacaaatttccatcggaatatgtaccgactgtttttgacaactatgcagtcacagttatgattggtggagaaccatatactcttggactttttgatactgcagggcaagaggattatgacagattacgaccgctgagttatccacaaacagatgtatttctagtctgtttttcagtggtctctccatcttcatttgaaaacgtgaaagaaaagtgggtgcctgagataactcaccactgtccaaagactcctttcttgcttgttgggactcaaattgatctcagagatgacccctctactattgagaaacttgccaagaacaaacagaagcctatcactccagagactgctgaaaagctggcccgtgacctgaaggctgtcaagtatgtggagtgttctgcacttacacagagaggtctgaagaatgtgtttgatgaggctatcctagctgccctcgagcctccggaaactcaacccaaaaggaagtgctgtatattctaaactgttttctccttcccttctttgctgctgcttcctgtcccactactgtagaaagatcgtttaaaaacaaaggaataaaaccatcctgtttgaaagcctctgcgtctttttactcaccaccttagagcaacctctgtattagtttttgatcaagaatgcaatatcatataaattttttgtgatcagtagtcaagttggacttgttttaacgttctgctgcttgagttgcctgatgctcagagctttttggtttggattactattgcaaaagggaacttggtctggctttaagaatgtcctcttggagaaaataacaagagttttaacacttctagatcttagttctagatggagaaagtaacacaaacatcattttactcttatgatcaattgttaattgtaattgcatgacaaaccttatggaaaaggggtgacctagtagagtgtaatggggaagggaggattcttttctggttttcctttgtgcggtgaaactttgtgttgctgttgctttggctgtctgtgctgtagtggagtatttgtcagtctggggtggggaagatattgatgtatctgctactgctttatgagttcatttgttacattatcttttaagaataacatccatttaaacagttgacttacagtttgttaatgctgagatgtaaagctgccacctttatattttcctgcttctgattttattgtgagggaaatatacaattgtggttaccttcaaattttgaaattaaaaatatacaaccgtttgtat

SEQ ID NO: 982 - DNA, 2254 bp, Homo sapiens
  source 1..2254: mol_type = genomic DNA
gtcaggtgcgtgcccctgtccggcagccgaggagaccccgcgcagtgctgccaacgccccggtggagaagctgagacggagtctcactgtgttgcccaggctggagtgcagtggcgccatcttggctcactgcagtgcgcctctgccccccgagttcaagcgattctcctgcctcaggctcctgagtagctgggactacaggtcatcatcagatttgaaatatttaaagtggatacaaaactatttcagcaatgcagacaattaagtgtgttgttgtgggcgatggtgctgttggtaaaacatgtctcctgatatcctacacaacaaacaaatttccatcggaatatgtaccgactgtttttgacaactatgcagtcacagttatgattggtggagaaccatatactcttggactttttgatactgcagggcaagaggattatgacagattacgaccgctgagttatccacaaacagatgtatttctagtctgtttttcagtggtctctccatcttcatttgaaaacgtgaaagaaaagtgggtgcctgagataactcaccactgtccaaagactcctttcttgcttgttgggactcaaattgatctcagagatgacccctctactattgagaaacttgccaagaacaaacagaagcctatcactccagagactgctgaaaagctggcccgtgacctgaaggctgtcaagtatgtggagtgttctgcacttacacagaaaggcctaaagaatgtatttgacgaagcaatattggctgccctggagcctccagaaccgaagaagagccgcaggtgtgtgctgctatgaacatctctccagagccctttctgcacagctggtgtcggcatcatactaaaagcaatgtttaaatcaaactaaagattaaaaattaaaattcgtttttgcaataatgacaaatgccctgcacctacccacatgcactcgtgtgagacaaggcccataggtatggccccccccttccccctcccagtactagttaattttgagtaattgtattgtcagaaaagtgattagtactatttttttttgttgtttcaaaaaaaaaatttttgtgtgtgtgtgttttttttttttttttttttgttgtttaaaagcaaggcatgcttgtggatgactctgtaacagactaattggaattgttgaagctgctccctggttccactctggagagtaatctgggacatcttagtgttttgttttgtttttttccctcctcttttttttgggggggagtgtgtgtggggtttgttttttagtcttgtttttttaattcattaaccagtggttagcccttaaggggaggaggacggattgattccacattccacttcctagatctagtttagaaaacatgttccccatctggtgctcttaggaaggagtatagtaaatgcctcatttaataacatactcctttttgaaagttgccttttctctccacccttgagtagatccagtatttgatgaaactcatgaaagtgggtggagcccatcttgcccctcctcttttctaggacgcactatatgtgactgtgactttcaaggacatttgtttgccatttgctgatttttttgggaagttaatttctaacttctttcactgataaatgaagaaaagtattgcacctttgaaatgcaccaaatgaattgagtttgtaattaaaaaaatttttttccctttcagtcattgtcttatatgcttagcatagatttgcagctcagtagtatatggtgttcctagaatgcagctgaagacctgttatgtagaggaaatacgaggggtggtgctagaagacagacatctgtggaatgattcacatcctctcaagttaggaggatggaggcctgcttcattaagaagctgggggtagggtgggggtggggagaacacttaacaacatggggaccagtcaggggaatccccttatttctgttttgcatatgaggaaccctagagcagccaggtgaggctctctagtttaataaaaatcatggaaagactcttaatgcagactcttcttaagtgttaatagggattttttcagcttattttggttgcagtttccaatttttaaaaatgttgaggtaatctttcccaccttcccaaacctaattcttgtagatgcattagtgttgaaccaatgctttctcatgtctcaattctttgtatatgcattcttttcagatgtattaaacaaacaaaaacccttcac

SEQ ID NO: 983 - DNA, 2148 bp, Homo sapiens
  source 1..2148: mol_type = genomic DNA
acttccgcgggcacccaactgtgcgtctcctgcgcgctgacgtcaggtgcgtgcccctgtccggcagccgaggagaccccgcgcagtgctgccaacgccccggtggagaagctgaggtcatcatcagatttgaaatatttaaagtggatacaaaactatttcagcaatgcagacaattaagtgtgttgttgtgggcgatggtgctgttggtaaaacatgtctcctgatatcctacacaacaaacaaatttccatcggaatatgtaccgactgtttttgacaactatgcagtcacagttatgattggtggagaaccatatactcttggactttttgatactgcagggcaagaggattatgacagattacgaccgctgagttatccacaaacagatgtatttctagtctgtttttcagtggtctctccatcttcatttgaaaacgtgaaagaaaagtgggtgcctgagataactcaccactgtccaaagactcctttcttgcttgttgggactcaaattgatctcagagatgacccctctactattgagaaacttgccaagaacaaacagaagcctatcactccagagactgctgaaaagctggcccgtgacctgaaggctgtcaagtatgtggagtgttctgcacttacacagaaaggcctaaagaatgtatttgacgaagcaatattggctgccctggagcctccagaaccgaagaagagccgcaggtgtgtgctgctatgaacatctctccagagccctttctgcacagctggtgtcggcatcatactaaaagcaatgtttaaatcaaactaaagattaaaaattaaaattcgtttttgcaataatgacaaatgccctgcacctacccacatgcactcgtgtgagacaaggcccataggtatggccccccccttccccctcccagtactagttaattttgagtaattgtattgtcagaaaagtgattagtactatttttttttgttgtttcaaaaaaaaaatttttgtgtgtgtgtgttttttttttttttttttttgttgtttaaaagcaaggcatgcttgtggatgactctgtaacagactaattggaattgttgaagctgctccctggttccactctggagagtaatctgggacatcttagtgttttgttttgtttttttccctcctcttttttttgggggggagtgtgtgtggggtttgttttttagtcttgtttttttaattcattaaccagtggttagcccttaaggggaggaggacggattgattccacattccacttcctagatctagtttagaaaacatgttccccatctggtgctcttaggaaggagtatagtaaatgcctcatttaataacatactcctttttgaaagttgccttttctctccacccttgagtagatccagtatttgatgaaactcatgaaagtgggtggagcccatcttgcccctcctcttttctaggacgcactatatgtgactgtgactttcaaggacatttgtttgccatttgctgatttttttgggaagttaatttctaacttctttcactgataaatgaagaaaagtattgcacctttgaaatgcaccaaatgaattgagtttgtaattaaaaaaatttttttccctttcagtcattgtcttatatgcttagcatagatttgcagctcagtagtatatggtgttcctagaatgcagctgaagacctgttatgtagaggaaatacgaggggtggtgctagaagacagacatctgtggaatgattcacatcctctcaagttaggaggatggaggcctgcttcattaagaagctgggggtagggtgggggtggggagaacacttaacaacatggggaccagtcaggggaatccccttatttctgttttgcatatgaggaaccctagagcagccaggtgaggctctctagtttaataaaaatcatggaaagactcttaatgcagactcttcttaagtgttaatagggattttttcagcttattttggttgcagtttccaatttttaaaaatgttgaggtaatctttcccaccttcccaaacctaattcttgtagatgcattagtgttgaaccaatgctttctcatgtctcaattctttgtatatgcattcttttcagatgtatt

SEQ ID NO: 984 - DNA, 597 bp, Homo sapiens
  source 1..597: mol_type = genomic DNA
cgcggcggggcggtggcaggagggcagctcgctggctgctcgcggcggtgcctgtccgagctcccctccgcgccggccgcgtcctctgggcggggtggccccgagccacggcctccaggctgctcttcctttcggaggtcatcatcagatttgaaatatttaaagtggatacaaaactatttcagcaatgcagacaattaagtgtgttgttgtgggcgatggtgctgttggtaaaacatgtctcctgatatcctacacaacaaacaaatttccatcggaatatgtaccgactgtttttgacaactatgcagtcacagttatgattggtggagaaccatatactcttggactttttgatactgcagggcaagaggattatgacagattacgaccgctgagttatccacaaacagatgtatttctagtctgtttttcagtggtctctccatcttcatttgaaaacgtgaaagaaaagtgggtgcctgagataactcaccactgtccaaagactcctttcttgcttgttgggactcaaattgatctcagagatgacccctctactattgagaaacttgccaagaacaaacagaagcctat

SEQ ID NO: 985 - DNA, 1106 bp, Homo sapiens
  source 1..1106: mol_type = genomic DNA
agtgctgccaacgccccggtggagaagctgaggtcatcatcagatttgaaatatttaaagtggatacaaaactatttcagcaatgcagacaattaagtgtgttgttgtgggcgatggtgctgttggtaaaacatgtctcctgatatcctacacaacaaacaaatttccatcggaatatgtaccgactatcttgacttctcatgggtaaattatatacactttaaacagctgaaaaatcagtggaaagtcagaaggggtgacacagggtttgcaagaagtgctgggaggcaaaactccagtagacaagattctaacgagtggtggtctcaatttggtgaagtatgccctacatcttggaatgaggtttttgacaactatgcagtcacagttatgattggtggagaaccatatactcttggactttttgatactgcagggcaagaggattatgacagattacgaccgctgagttatccacaaacagatgtatttctagtctgtttttcagtggtctctccatcttcatttgaaaacgtgaaagaaaagtgggtgcctgagataactcaccactgtccaaagactcctttcttgcttgttgggactcaaattgatctcagagatgacccctctactattgagaaacttgccaagaacaaacagaagcctatcactccagagactgctgaaaagctggcccgtgacctgaaggctgtcaagtatgtggagtgttctgcacttacacagaaaggcctaaagaatgtatttgacgaagcaatattggctgccctggagcctccagaaccgaagaagagccgcaggtgtgtgctgctatgaacatctctccagagccctttctgcacagctggtgtcggcatcatactaaaagcaatgtttaaatcaaactaaagattaaaaattaaaattcgtttttgcaataatgacaaatgccctgcacctacccacatgcactcgtgtgagacaaggcccataggtatggccccccccttccccctcccagtactagttaattttgagtaattgtattgtcagaaaagtgattagtactatttttttttgttgtttcaaaaaaaaaatttttgtgtgtg

SEQ ID NO: 986 - DNA, 3072 bp, Homo sapiens
  source 1..3072: mol_type = genomic DNA
gctttacccagagtcgccctgccgcaatcgcgcgtctttccaccgaggccccggatgtagattccctcccccgttcagtggtcgtggcctcacagcgactctaagacttggggctctctcattggctgtaactcttccactggattggtagcaaaaaaagaggcggtgcccaaggcgaaaggctctgtgactacagccaatcagaatcgaggccgggctttggcgggaggtgggaacgctgtggccattcggatttggcgcgagcgcggctggagtttgctgctgccgctgtgcagtttgttcaggggcttgtggtggtgagtccgagaggctgcgtgtgagagacgtgagaaggatcctgcactgaggaggtggaaagaagaggattgctcgaggaggcctggggtctgtgaggcagcggagctgggtgaaggctgcgggttccggcgaggcctgagctgtgctgtcgtcatgcctcaaacccgatcccaggcacaggctacaatcagttttccaaaaaggaagctgtctcgggcattgaacaaagctaaaaactccagtgatgccaaactagaaccaacaaatgtccaaaccgtaacctgttctcctcgtgtaaaagccctgcctctcagccccaggaaacgtctgggcgatgacaacctatgcaacactccccatttacctccttgttctccaccaaagcaaggcaagaaagagaatggtccccctcactcacatacacttaagggacgaagattggtatttgacaatcagctgacaattaagtctcctagcaaaagagaactagccaaagttcaccaaaacaaaatactttcttcagttagaaaaagtcaagagatcacaacaaattctgagcagagatgtccactgaagaaagaatctgcatgtgtgagactattcaagcaagaaggcacttgctaccagcaagcaaagctggtcctgaacacagctgtcccagatcggctgcctgccagggaaagggagatggatgtcatcaggaatttcttgagggaacacatctgtgggaaaaaagctggaagcctttacctttctggtgctcctggaactggaaaaactgcctgcttaagccggattctgcaagacctcaagaaggaactgaaaggctttaaaactatcatgctgaattgcatgtccttgaggactgcccaggctgtattcccagctattgctcaggagatttgtcaggaagaggtatccaggccagctgggaaggacatgatgaggaaattggaaaaacatatgactgcagagaagggccccatgattgtgttggtattggacgagatggatcaactggacagcaaaggccaggatgtattgtacacgctatttgaatggccatggctaagcaattctcacttggtgctgattggtattgctaataccctggatctcacagatagaattctacctaggcttcaagctagagaaaaatgtaagccacagctgttgaacttcccaccttataccagaaatcagatagtcactattttgcaagatcgacttaatcaggtatctagagatcaggttctggacaatgctgcagttcaattctgtgcccgcaaagtctctgctgtttcaggagatgttcgcaaagcactggatgtttgcaggagagctattgaaattgtagagtcagatgtcaaaagccagactattctcaaaccactgtctgaatgtaaatcaccttctgagcctctgattcccaagagggttggtcttattcacatatcccaagtcatctcagaagttgatggtaacaggatgaccttgagccaagaaggagcacaagattccttccctcttcagcagaagatcttggtttgctctttgatgctcttgatcaggcagttgaaaatcaaagaggtcactctggggaagttatatgaagcctacagtaaagtctgtcgcaaacagcaggtggcggctgtggaccagtcagagtgtttgtcactttcagggctcttggaagccaggggcattttaggattaaagagaaacaaggaaacccgtttgacaaaggtgtttttcaagattgaagagaaagaaatagaacatgctctgaaagataaagctttaattggaaatatcttagctactggattgccttaaattcttctcttacaccccacccgaaagtattcagctggcatttagagagctacagtcttcattttagtgctttacacattcgggcctgaaaacaaatatgaccttttttacttgaagccaatgaattttaatctatagattctttaatattagcacagaataatatctttgggtcttactatttttacccataaaagtgaccaggtagaccctttttaattacattcactacttctaccacttgtgtatctctagccaatgtgcttgcaagtgtacagatctgtgtagaggaatgtgtgtatatttacctcttcgtttgctcaaacatgagtgggtatttttttgtttgttttttttgttgttgttgtttttgaggcgcgtctcaccctgttgcccaggctggagtgcaatggcgcgttctctgctcactacagcacccgcttcccaggttgaagtgattctcttgcctcagcctcccgagtagctgggattacaggtgcccaccaccgcgcccagctaattttttaatttttagtagagacagggttttaccatgttggccaggctggtcttgaactcctgaccctcaagtgatctgcccaccttggcctccctaagtgctgggattataggcgtgagccaccatgctcagccattaaggtattttgttaagaactttaagtttagggtaagaagaatgaaaatgatccagaaaaatgcaagcaagtccacatggagatttggaggacactggttaaagaatttatttctttgtatagtatactatgttcatggtgcagatactacaacattgtggcattttagactcgttgagtttcttgggcactcccaagggcgttggggtcataaggagactataactctacagattgtgaatatatttattttcaagttgca

SEQ ID NO: 987 - DNA, 4969 bp, Homo sapiens
  source 1..4969: mol_type = genomic DNA
cggcggcctgggtggctactgcccctgctgctgtcgtaggcgaggacggctgttagtgctgctgctgttggttcgtcgcggcggcgaaggaggaggaggaagagggcgaggcgacaagagaagaaggaggcaggcgcggcggcagcggcggcgccccgagccggcggaggcgaggggggggaagatggcggacgtgcttagcgtcctgcgacagtacaacatccagaagaaggagattgtggtgaagggagacgaagtgatcttcggggagttctcctggcccaagaatgtgaagaccaactatgttgtttgggggactggaaaggaaggccaacccagagagtactacacattggattccattttatttctacttaataacgtgcacctttctcatcctgtttatgtccgacgtgcagctactgaaaatattcctgtggttagaagacctgatcgaaaagatctacttggatatctcaatggtgaagcgtcaacatcggcaagtatagacagaagcgctcccttagaaataggtcttcagcgatctactcaagtcaaacgagctgcagatgaagttttagcagaagcaaagaaaccacgaattgaggatgaagagtgtgtgcgccttgataaagagagattggctgcccgtttggagggtcacaaagaagggattgtacagactgaacagattaggtctttgtctgaagctatgtcagtggaaaaaattgctgcaatcaaagccaaaattatggctaagaaaagatctactatcaagactgatctagatgatgacataactgcccttaaacagaggagttttgtggatgctgaggtagatgtgacccgagatattgtcagcagagagagagtatggaggacacgaacaactatcttacaaagcacaggaaagaatttttccaagaacatttttgcaattcttcaatctgtaaaagccagagaagaagggcgtgcacctgaacagcgacctgccccaaatgcagcacctgtggatcccactttgcgcaccaaacagcctatcccagctgcctataacagatacgatcaggaaagattcaaaggaaaagaagaaacggaaggcttcaaaattgacactatgggaacctaccatggtatgacactgaaatctgtaacggagggtgcatctgcccggaagactcagactcctgcagcccagccagtaccaagaccagtttctcaagcaagacctcccccaaatcagaagaaaggatctcgaacacccattatcataattcctgcagctaccacctctttaataaccatgcttaatgcaaaagaccttctacaggacctgaaatttgtcccatcagatgaaaagaagaaacaaggttgtcaacgagaaaatgaaactctaatacaaagaagaaaagaccagatgcaaccagggggcactgcaattagtgttacagtaccttatagagtagtagaccagccccttaaacttatgcctcaagactgggaccgcgttgtagccgtttttgtgcagggtcctgcatggcagttcaaaggttggccatggcttttgcctgatggatcaccagttgatatatttgctaaaattaaagccttccatctgaagtatgatgaagttcgtctggatccaaatgttcagaaatgggatgtaacagtattagaactcagctatcacaaacgtcatttggatagaccagtgttcttacggttttgggaaacattggacaggtacatggtaaagcataaatcgcacttgagattctgaattatttggctcctccatttctggaaattgagactcaagctttatgaatttatcaagaacttaaaaatgaagaaggtcacagattgatcttttataagaccttatttgatgctttgtgcttcaaggagatgatacctgtcatccatataagcaaactttttggcttacaactatttttttaatattagccttctagtctgtaatggaaattgtatattttgatagaagttttttctccattggttaaattagcattacttaaaatttgtttctttagaaaataaatgcaggttataaatgtgtgtatatttagagattataaggctctctgagccatcttctgatttttcattgctctataattctttttactgaaaatactatgttatgaatggtattaaattttagtctctggaacatccaaaaccaagcaaagggatgtgactattttgaatgaatcagaatgtcaacttgtatgtacactatatctacacttactcattatttaaaaagaataatgaaaaatctagatcaattcttcaatttgattgaactgttcagccttttcaagatttctttatttacaaatgattacatttaaatgaatgtacattcttctcactgactttggtgattttgaaacctagaatgatgtgtttctatctgtaatatctttccatttgaaaaaaatctcaaaacacagattaaaaccacaataggctgtagtattttttattttgggagccagagtatgatttgggggaagaatatgtatcagccctattgcagtataactttaagctccttttctctttagtccacttttgattgtaatttttatggtataggattttgaatcttctattttaggcttgtcagtcttggagttcttatcttccattatccctaaatattgataaactcccaggcaccaaagaaaacatttgcttaattgtctgaaaagaaacaagagaaaaacactggtatttttatgtctgtattcaatatggtataaaatataaaaactatattttaacttagtgaaatattttactatttctctacttcagacaaaatgttgcatccaaggtacatcaagtgaccatttgccttgaaccttgatttcactttgttttttttttttccttaaaggcaactaggaagctttactttcctaaagtgtttttgccattggaatttttgctgatcacagtcttatgtcatttttttctctgtttttattcccagcaattttctcctaggttaacatatttttggtgaacgtttaggcctttcataggtattaagctgacattatctagcttcttaatgaaatttaacactgtcacaaaaatgagaagttattattttttaagtgatcacatagttcataccactagtaactagaaaagatatttattcacatgatatttacaaggctcttcagaagggaacagtcagcattttaaattactagattttagcatacttaacaaggtttgaacagattctacccctattttcctccctttttagcgtcttctttccttaaagataaaagaaaactcaaatttgtttacattaggctttcttagcatataaatatatttccaaaataaattacatgttgtgtaaactttctccatgatgaaatagtcaaggaccagaatctgtaatatttttatgtaagattacttgtcaagactactacaagtcagtatgaactaccttcccataaagatttttggtatttgtacttatttatgaactttacttgagacagaatatggttaaaattaggaacatctactttgaatgaggtttatttttctattttgaatttgccttatgtatattcaaaggcttatggaaatactgtaaaggaacattaggaaaaggacaaataggctataaccatctatcttaaaatcagacccttagtataagcacctctttttcttttcctctttgacaatttagtctcttatttaggtccatgtaattaatttcattccattattttttagctgtttattctaaaaaacaaaaattttcagccactcccatttattctcccatgacatggtcctatatagcagtacttaacacagtgccttgcacatagtaggcattcagtaaatacttacatgcatgaatgaataatgtattttcagtgtaacaaatttattataaaagtgtagttcgactcttcttggtcttggagtttgagagtacagaattacagggaatgaagagaggtataagtagatattttaatggaaatgaagtataaattaataacttgacttacccctccataagttactgctaactggagatacccttgtatgcccaacctgtaaaggaaaaagttctatttctatatttataggacattcttctcagtcaaggaacagtaagaaatatgtaggtttcaatcagttgctctcaaccctgactgcattttagaatcatttggagagtttttaaaaatatccatgcctgaatcttgattcccattttcatgtaatttgagacaagacctggtcatcagtattttttttaaagttctccaggtaatttgaatgtgcaggaaggattcagaatcactggtttaatttgttattgaaaacagtaccagtattaaatgtgtttcctcttccttcttttctgtatgtatgtgtggtttttgattttttgttgttgttgttgttttgtggccaccctttgcactagaccatcccttttattggtggtattggcctatattcccattgacaaatgcaatttttaattatttatttaatataggagtattttactgtttaatatttaaacaatgtttaatgtatttcattattaactagtattatagtttgtttttttcccatgtctccataacttttactaacatttgtttttagcagcacaacagtaatccatataaaaacaactaattcataatgaggaaaatctcataatttttaaggcagaaagaagtattaatttttgatctgccatgtagaatgagacaaatacagtttgcttatgaaaggaaagtggcatacttttaaattggtctacacagaaaagtaaaagtaaactattcatttaaataagattcattatctaataaatattgagggaatatttttcctaaataaaaatttttctgactgctaacaaaaa

SEQ ID NO: 988 - DNA, 1157 bp, Homo sapiens
  source 1..1157: mol_type = genomic DNA
ggcgaaggaggaggaggaagagggcgaggcgacaagagaagaaggaggcaggcgcggcggcagcggcggcgccccgagccggcggaggcgaggggggggaagatggcggacgtgcttagcgtcctgcgacagtacaacatccagaagaaggagattgtggtgaagggagacgaagtgatcttcggggagttctcctggcccaagaatgtgaagaccaactatgttgtttgggggactggaaaggaaggccaacccagagagtactacacattggattccattttatttctacttaataacgtgcacctttctcatcctgtttatgtccgacgtgcagctactgaaaatattcctgtggttagaagacctgatcgaaaagatctacttggatatctcaatggtgaagcgtcaacatcggcaagtatagacagaagcgctcccttagaaataggtcttcagcgatctactcaagtcaaacgagctgcagatgaagttttagcagaagcaaagaaaccacgaattgaggatgaagagtgtgtgcgccttgataaagagagattggctgcccgtttggagggtcacaaagaagggattgtacagactgaacagattaggtctttgtctgaagctatgtcagtggaaaaaattgctgcaatcaaagccaaaattatggctaagaaaagatctactatcaagactgatctagatgatgacataactgcccttaaacagaggagttttgtggatgctgaggtagatgtgacccgagatattgtcagcagagagagagtatggaggacacgaacaactatcttacaaagcacaggaaagaatttttccaagaacatttttgcaattcttcaatctgtaaaagccagagaagaagggcgtgcacctgaacagcgacctgccccaaatgcagcacctgtggatcccactttgcgcaccaaacagcctatcccagctgcctataacagatacgatcaggaaaggatctcgaacacccattatcataattcctgcagctaccacctctttaataaccatgcttaatgcaaaagaccttctacaggacctgaaatttgtcccatcagatgaaaagaagaaacaaggttgtcaacgagaaaatgaaactctaatacaaagaagaaaagacc

SEQ ID NO: 989 - DNA, 2374 bp, Homo sapiens
  source 1..2374: mol_type = genomic DNA
gctcatgggactcctgcctctcctgggcttggccgctcctgtcttggcaagccccagaccctgccttggatttctttctggcctccaagtgggcgcttggctcctggcacctggcagccttggctgtctccccagccccactgtcctgcctctctgcttgggacccatgggagctgccatctccccagccccagtgctgggatgacaggcatgagccaccacacccagacgagagggcacatttccaactgcattctgaaggcctggtggtgagaaagagcatatagaggtggcacagcccatagcagagatgaggccaaggacaagaagagaatgcaggatgccgctttccacctagaagaagtttaaaacctgcggttccagggttctccagcccctccctttttcacgctccgaagccgagaaggcccaaagcgaagacagagaggacccggaagtagggaaaacctctgagcacgtgatgggggaacacgcgggtgctgtcacgtgatccgacaaacggcctctgcatagtgcagaacattctgctgctcttaaaggtacaggcctcagggtccctgctgtagacggggcgggggagagtacgatgggtggggcgtggtgggtcgtagggcgctcgagatggagcccccagcttccttgatggatcgcggggcgcgagtgccctagacaagccggagctgggaccggcaatcgggcgttgatccttgtcacctgtcgcagaccctcatccctcccgtgggagccccctttggacactctatgaccctggaccctcgggggacctgaacttgatgcgatgggaggctgtgcaggctcgcggcggcgcttttcggattccgagggggaggagaccgtcccggagccccggctccctctgttggaccatcagggcgcgcattggaagaacgcggtgggcttctggctgctgggcctttgcaacaacttctcttatgtggtgatgctgagtgccgcccacgacatccttagccacaagaggacatcgggaaaccagagccatgtggacccaggcccaacgccgatcccccacaacagctcatcacgatttgactgcaactctgtctctacggctgctgtgctcctggcggacatcctccccacactcgtcatcaaattgttggctcctcttggccttcacctgctgccctacagcccccgggttctcgtcagtgggatttgtgctgctggaagcttcgtcctggttgccttttctcattctgtggggaccagcctgtgtggtgtggtcttcgctagcatctcatcaggccttggggaggtcaccttcctctccctcactgccttctaccccagggccgtgatctcctggtggtcctcagggactgggggagctgggctgctgggggccctgtcctacctgggcctcacccaggccggcctctcccctcagcagaccctgctgtccatgctgggtatccctgccctgctgctggccagctatttcttgttgctcacatctcctgaggcccaggaccctggaggggaagaagaagcagagagcgcagcccggcagcccctcataagaaccgaggccccggagtcgaagccaggctccagctccagcctctcccttcgggaaaggtggacagtgttcaagggtctgctgtggtacattgttcccttggtcgtagtttactttgccgagtatttcattaaccagggactttttgaactcctctttttctggaacacttccctgagtcacgctcagcaataccgctggtaccagatgctgtaccaggctggcgtctttgcctcccgctcttctctccgctgctgtcgcatccgtttcacctgggccctggccctgctgcagtgcctcaacctggtgttcctgctggcagacgtgtggttcggctttctgccaagcatctacctcgtcttcctgatcattctgtatgaggggctcctgggaggcgcagcctacgtgaacaccttccacaacatcgccctggagaccagtgatgagcaccgggagtttgcaatggcggccacctgcatctctgacacactggggatctccctgtcggggctcctggctttgcctctgcatgacttcctctgccagctctcctgatactcgggatcctcaggacgcaggtcacattcacctgtgggcagagggacaggtcagacacccaggcccaccccagagaccctccatgaactgtgctcccagccttcccggcaggtctgggagtagggaagggctgaagccttgtttcccttgcaggggggccagccattgtctcccacttggggagtttcttcctggcatcatgccttctgaataaatgccgattttatccatgga

SEQ ID NO: 990 - DNA, 1301 bp, Homo sapiens
  source 1..1301: mol_type = genomic DNA
acggcctctgcatagtgcagaacattctgctgctcttaaagaccctcatccctcccgtgggagccccctttggacactctatgaccctggaccctcgggggacctgaacttgatgcgatgggaggctgtgcaggctcgcggcggcgcttttcggattccgagggggaggagaccgtcccggagccccggctccctctgttggaccatcagggcgcgcattggaagaacgcggtgggcttctggctgctgggcctttgcaacaacttctcttatgtggtgatgctgagtgccgcccacgacatccttagccacaagaggacatcgggaaaccagagccatcccccgggttctcgtcagtgggatttgtgctgctggaagcttcgtcctggttgccttttctcattctgtggggaccagcctgtgtgctatttcttgttgctcacatctcctgaggcccaggaccctggaggggaagaagaagcagagagcgcagcccggcagcccctcataagaaccgaggccccggagtcgaagccaggctccagctccagcctctcccttcgggaaaggtggacagtgttcaagggtctgctgtggtacattgttcccttggtcgtagtttactttgccgagtatttcattaaccagggactttttgaactcctctttttctggaacacttccctgagtcacgctcagcaataccgctggtaccagatgctgtaccaggctggcgtctttgcctcccgctcttctctccgctgctgtcgcatccgtttcacctgggccctggccctgctgcagtgcctcaacctggtgttcctgctggcagacgtgtggttcggctttctgccaagcatctacctcgtcttcctgatcattctgtatgaggggctcctgggaggcgcagcctacgtgaacaccttccacaacatcgccctggagaccagtgatgagcaccgggagtttgcaatggcggccacctgcatctctgacacactggggatctccctgtcggggctcctggctttgcctctgcatgacttcctctgccagctctcctgatactcgggatcctcaggacgcaggtcacattcacctgtgggcagagggacaggtcagacacccaggcccaccccagagaccctccatgaactgtgctcccagccttcccggcaggtctgggagtagggaagggctgaagccttgtttcccttgcaggggggccagccattgtctcccacttggggagtttcttcctggcatcatgccttctgaataaatgccgattttatccatgg

SEQ ID NO: 991 - DNA, 1619 bp, Homo sapiens
  source 1..1619: mol_type = genomic DNA
acggcctctgcatagtgcagaacattctgctgctcttaaagaccctcatccctcccgtgggagccccctttggacactctatgaccctggaccctcgggggacctgaacttgatgcgatgggaggctgtgcaggctcgcggcggcgcttttcggattccgagggggaggagaccgtcccggagccccggctccctctgttggaccatcagggcgcgcattggaagaacgcggtgggcttctggctgctgggcctttgcaacaacttctcttatgtggtgatgctgagtgccgcccacgacatccttagccacaagaggacatcgggaaaccagagccatgtggacccaggcccaacgccgatcccccacaacagctcatcacgatttgactgcaactctgtctctacggctgctgtgctcctggcggacatcctccccacactcgtcatcaaattgttggctcctcttggccttcacctgctgccctacagcccccgggttctcgtcagtgggatttgtgctgctggaagcttcgtcctggttgccttttctcattctgtggggaccagcctgtgtggtgtggtcttcgctagcatctcatcaggccttggggaggtcaccttcctctccctcactgccttctaccccagggccgtgatctcctggtggtcctcagggactgggggagctgggctgctgggggccctgtcctacctgggcctcacccaggccggcctctcccctcagcagaccctgctgtccatgctgggtatccctgccctgctgctggccagctatttcttgttgctcacatctcctgaggcccaggaccctggaggggaagaagaagcagagagcgcagcccggcagcccctcataagaaccgaggccccggagtcgaagccaggctccagctccagcctctcccttcgggaaaggtggacagtgttcaaggttcggatgatggctgggtttgaactcctctttttctggaacacttccctgagtcacgctcagcaataccgctggtaccagatgctgtaccaggctggcgtctttgcctcccgctcttctctccgctgctgtcgcatccgtttcacctgggccctggccctgctgcagtgcctcaacctggtgttcctgctggcagacgtgtggttcggctttctgccaagcatctacctcgtcttcctgatcattctgtatgaggggctcctgggaggcgcagcctacgtgaacaccttccacaacatcgccctggagaccagtgatgagcaccgggagtttgcaatggcggccacctgcatctctgacacactggggatctccctgtcggggctcctggctttgcctctgcatgacttcctctgccagctctcctgatactcgggatcctcaggacgcaggtcacattcacctgtgggcagagggacaggtcagacacccaggcccaccccagagaccctccatgaactgtgctcccagccttcccggcaggtctgggagtagggaagggctgaagccttgtttcccttgcaggggggccagccattgtctcccacttggggagtttcttcctggcatcatgccttctgaataaatgccgattttatccatgg

SEQ ID NO: 992 - DNA, 1526 bp, Homo sapiens
  source 1..1526: mol_type = genomic DNA
acggcctctgcatagtgcagaacattctgctgctcttaaagaccctcatccctcccgtgggagccccctttggacactctatgaccctggaccctcgggggacctgaacttgatgcgatgggaggctgtgcaggctcgcggcggcgcttttcggattccgagggggaggagaccgtcccggagccccggctccctctgttggaccatcagggcgcgcattggaagaacgcggtgggcttctggctgctgggcctttgcaacaacttctcttatgtggtgatgctgagtgccgcccacgacatccttagccacaagaggacatcgggaaaccagagccatgtggacccaggcccaacgccgatcccccacaacagctcatcacgatttgactgcaactctgtctctacggctgctgtgctcctggcggacatcctccccacactcgtcatcaaattgttggctcctcttggccttcacctgctgccctacagcccccgggttctcgtcagtgggatttgtgctgctggaagcttcgtcctggttgccttttctcattctgtggggaccagcctgtgtggtgtggtcttcgctagcatctcatcaggccttggggaggtcaccttcctctccctcactgccttctaccccagctatttcttgttgctcacatctcctgaggcccaggaccctggaggggaagaagaagcagagagcgcagcccggcagcccctcataagaaccgaggccccggagtcgaagccaggctccagctccagcctctcccttcgggaaaggtggacagtgttcaagggtctgctgtggtacattgttcccttggtcgtagtttactttgccgagtatttcattaaccagggactttttgaactcctctttttctggaacacttccctgagtcacgctcagcaataccgctggtaccagatgctgtaccaggctggcgtctttgcctcccgctcttctctccgctgctgtcgcatccgtttcacctgggccctggccctgctgcagtgcctcaacctggtgttcctgctggcagacgtgtggttcggctttctgccaagcatctacctcgtcttcctgatcattctgtatgaggggctcctgggaggcgcagcctacgtgaacaccttccacaacatcgccctggagaccagtgatgagcaccgggagtttgcaatggcggccacctgcatctctgacacactggggatctccctgtcggggctcctggctttgcctctgcatgacttcctctgccagctctcctgatactcgggatcctcaggacgcaggtcacattcacctgtgggcagagggacaggtcagacacccaggcccaccccagagaccctccatgaactgtgctcccagccttcccggcaggtctgggagtagggaagggctgaagccttgtttcccttgcaggggggccagccattgtctcccacttggggagtttcttcctggcatcatgccttctgaataaatgccgattttatccatgg

SEQ ID NO: 993 - DNA, 879 bp, Homo sapiens
  source 1..879: mol_type = genomic DNA
acggcctctgcatagtgcagaacattctgctgctcttaaagaccctcatccctcccgtgggagccccctttggacactctatgaccctggaccctcgggggacctgaacttgatgcgatgggaggctgtgcaggctcgcggcggcgcttttcggattccgagggggaggagaccgtcccggagccccggctccctctgttggaccatcagggcgcgcattggaagaacgcggtgggcttctggctgctgggcctttgcaacaacttctcttatgtggtgatgctgagtgccgcccacgacatccttagccacaagaggacatcgggaaaccagagccatgtggacccaggcccaacgccgatcccccacaacagctcatcacgatttgactgcaactctgtctctacggctgctgtgctcctggcggacatcctccccacactcgtcatcaaattgttggctcctcttggccttcacctgctgccctacagcccccgggttctcgtcagtgggatttgtgctgctggaagcttcgtcctggttgccttttctcattctgtggggaccagcctgtgtggctccagctccagcctctcccttcgggaaaggtggacagtgttcaagggtctgctgtggtacattgttcccttggtcgtagtttactttgccgagtatttcattaaccagggactttttgaactcctctttttctggaacacttccctgagtcacgctcagcaataccgctggtaccagatgctgtaccaggctggcgtctttgcctcccgctcttctctccgctgctgtcgcatccgtttcacctgggccctggccctgctgcagatggagtctcgctctgttgcccaggctggaatgtag

SEQ ID NO: 994 - DNA, 1144 bp, Homo sapiens
  source 1..1144: mol_type = genomic DNA
gcgttgatccttgtcacctgtcgcagaccctcatccctcccgtgggagccccctttggacactctatgaccctggaccctcgggggacctgaacttgatgcgatgggaggctgtgcaggctcgcggcggcgcttttcggattccgagggggaggagaccgtcccggagccccggctccctctgttggaccatcagggcgcgcattggaagaacgcggtgggcttctggctgctgggcctttgcaacaacttctcttatgtggtgatgctgagtgccgcccacgacatccttagccacaagaggacatcgggaaaccagagccatgtggacccaggcccaacgccgatcccccacaacagctcatcacgatttgactgcaactctgtctctacggctcccccgggttctcgtcagtgggatttgtgctgctggaagcttcgtcctggttgccttttctcattctgtggggaccagcctgtgtgctatttcttgttgctcacatctcctgaggcccaggaccctggaggggaagaagaagcagagagcgcagcccggcagcccctcataagaaccgaggccccggagtcgaagccaggctccagctccagcctctcccttcgggaaaggtggacagtgttcaagggtctgctgtggtacattgttcccttggtcgtagtttactttgccgagtatttcattaaccagggactttttgaactcctctttttctggaacacttccctgagtcacgctcagcaataccgctggtaccagatgctgtaccaggctggcgtctttgcctcccgctcttctctccgctgctgtcgcatccgtttcacctgggccctggccctgctgcagtgcctcaacctggtgttcctgctggcagacgtgtggttcggctttctgccaagcatctacctcgtcttcctgatcattctgtatgaggggctcctgggaggcgcagcctacgtgaacaccttccacaacatcgccctggagaccagtgatgagcaccgggagtttgcaatggcggccacctgcatctctgacacactggggatctccctgtcggggctcctggctttgcctctgcatgacttcctctgccagctctcctgatactcgggatcctcaggacgca

SEQ ID NO: 995 - DNA, 1720 bp, Homo sapiens
  source 1..1720: mol_type = genomic DNA
gtccctgctgtagacggggcgggggagagtacgatgggtggggcgtggtgggtcgtagggcgctcgagatggagcccccagcttccttgatggatcgcggggcgcgagtgccctagacaagccggagctgggaccggcaatcgggcgttgatccttgtcacctgtcgcagaccctcatccctcccgtgggagccccctttggacactctatgaccctggaccctcgggggacctgaacttgatgcgatgggaggctgtgcaggctcgcggcggcgcttttcggattccgagggctgctgggcctttgcaacaacttctcttatgtggtgatgctgagtgccgcccacgacatccttagccacaagaggacatcgggaaaccagagccatgtggacccaggcccaacgccgatcccccacaacagctcatcacgatttgactgcaactctgtctctacggctgctgtgctcctggcggacatcctccccacactcgtcatcaaattgttggctcctcttggccttcacctgctgccctacagcccccgggttctcgtcagtgggatttgtgctgctggaagcttcgtcctggttgccttttctcattctgtggggaccagcctgtgtggtgtggtcttcgctagcatctcatcaggccttggggaggtcaccttcctctccctcactgccttctaccccagggccgtgatctcctggtggtcctcagggactgggggagctgggctgctgggggccctgtcctacctgggcctcacccaggccggcctctcccctcagcagaccctgctgtccatgctgggtatccctgccctgctgctggccagctatttcttgttgctcacatctcctgaggcccaggaccctggaggggaagaagaagcagagagcgcagcccggcagcccctcataagaaccgaggccccggagtcgaagccaggctccagctccagcctctcccttcgggaaaggtggacagtgttcaagggtctgctgtggtacattgttcccttggtcgtagtttactttgccgagtatttcattaaccagggactttttgaactcctctttttctggaacacttccctgagtcacgctcagcaataccgctggtaccagatgctgtaccaggctggcgtctttgcctcccgctcttctctccgctgctgtcgcatccgtttcacctgggccctggccctgctgcagtgcctcaacctggtgttcctgctggcagacgtgtggttcggctttctgccaagcatctacctcgtcttcctgatcattctgtatgaggggctcctgggaggcgcagcctacgtgaacaccttccacaacatcgccctggagaccagtgatgagcaccgggagtttgcaatggcggccacctgcatctctgacacactggggatctccctgtcggggctcctggctttgcctctgcatgacttcctctgccagctctcctgatactcgggatcctcaggacgcaggtcacattcacctgtgggcagagggacaggtcagacacccaggcccaccccagagaccctccatgaactgtgctcccagccttcccggcaggtctgggagtagggaagggctgaagccttgtttcccttgcaggggggccagccattgtctcccacttggggagtttcttcctggcatcatgccttctgaataaatgccgattttatccatgg

SEQ ID NO: 996 - DNA, 1827 bp, Homo sapiens
  source 1..1827: mol_type = genomic DNA
gctgctcttaaaggtacaggcctcagggtccctgctgtagacggggcgggggagagtacgatgggtggggcgtggtgggtcgtagggcgctcgagatggagcccccagcttccttgatggatcgcggggcgcgagtgccctagacaagccggagctgggaccggcaatcgggcgttgatccttgtcacctgtcgcagaccctcatccctcccgtgggagccccctttggacactctatgaccctggaccctcgggggacctgaacttgatgcgatgggaggctgtgcaggctcgcggcggcgcttttcggattccgagggggaggagaccgtcccggagccccggctccctctgttggaccatcagggcgcgcattggaagaacgcggtgggcttctggctgctgggcctttgcaacaacttctcttatgtggtgatgctgagtgccgcccacgacatccttagccacaagaggacatcgggaaaccagagccatgtggacccaggcccaacgccgatcccccacaacagctcatcacgatttgactgcaactctgtctctacggctgctgtgctcctggcggacatcctccccacactcgtcatcaaattgttggctcctcttggccttcacctgctgccctacagcccccgggttctcgtcagtgggatttgtgctgctggaagcttcgtcctggttgccttttctcattctgtggggaccagcctgtgtggtgtggtcttcgctagcatctcatcaggccttggggaggtcaccttcctctccctcactgccttctaccccagggccgtgatctcctggtggtcctcagggactgggggagctgggctgctgggggccctgtcctacctgggcctcacccaggccggcctctcccctcagcagaccctgctgtccatgctgggtatccctgccctgctgctggccagctatttcttgttgctcacatctcctgaggcccaggaccctggaggggaagaagaagcagagagcgcagcccggcagcccctcataagaaccgaggccccggagtcgaagccaggctccagctccagcctctcccttcgggaaaggtggacagtgttcaagggtctgctgtggtacattgttcccttggtcgtagtttactttgccgagtatttcattaaccagggactttttgaactcctctttttctggaacacttccctgagtcacgctcagcaataccgctggtaccagatgctgtaccaggctggcgtctttgcctcccgctcttctctccgctgctgtcgcatccgtttcacctgggccctggccctgctgcagtgcctcaacctggtgttcctgctggcagacgtgtggttcggctttctgccaagcatctacctcgtcttcctgatcattctgtatgaggggctcctgggaggcgcagcctacgtgaacaccttccacaacatcgccctggagaccagtgatgagcaccgggagtttgcaatggcggccacctgcatctctgacacactggggatctccctgtcggggctcctggctttgcctctgcatgacttcctctgccagctctcctgatactcgggatcctcaggacgcaggtcacattcacctgtgggcagagggacaggtcagacacccaggcccaccccagagaccctccatgaactgtgctcccagccttcccggcaggtctgggagtagggaagggctgaagccttgtttcccttgcaggggggccagccattgtctcccacttggggagtttcttcctggcatcatgccttctgaataaatgccgattttatccatgga

SEQ ID NO: 997 - DNA, 1913 bp, Homo sapiens
  source 1..1913: mol_type = genomic DNA
ataactggtgctggcaggctactgtctcggtcttgggcgccactgatctaaggtcacggctctgcttgctgctcccacccgctccagtttaaaacctgcggttccagggttctccagcccctccctttttcacgctccgaagccgagaaggcccaaagcgaagacagagaggacccggaagtagggaaaacctctgagcacgtgatgggggaacacgcgggtgctgtcacgtgatccgacaaacggcctctgcatagtgcagaacattctgctgctcttaaagaccctcatccctcccgtgggagccccctttggacactctatgaccctggaccctcgggggacctgaacttgatgcgatgggaggctgtgcaggctcgcggcggcgcttttcggattccgagggggaggagaccgtcccggagccccggctccctctgttggaccatcagggcgcgcattggaagaacgcggtgggcttctggctgctgggcctttgcaacaacttctcttatgtggtgatgctgagtgccgcccacgacatccttagccacaagaggacatcgggaaaccagagccatgtggacccaggcccaacgccgatcccccacaacagctcatcacgatttgactgcaactctgtctctacggctgctgtgctcctggcggacatcctccccacactcgtcatcaaattgttggctcctcttggccttcacctgctgccctacagcccccgggttctcgtcagtgggatttgtgctgctggaagcttcgtcctggttgccttttctcattctgtggggaccagcctgtgtggtgtggtcttcgctagcatctcatcaggccttggggaggtcaccttcctctccctcactgccttctaccccagggccgtgatctcctggtggtcctcagggactgggggagctgggctgctgggggccctgtcctacctgggcctcacccaggccggcctctcccctcagcagaccctgctgtccatgctgggtatccctgccctgctgctggccagctatttcttgttgctcacatctcctgaggcccaggaccctggaggggaagaagaagcagagagcgcagcccggcagcccctcataagaaccgaggccccggagtcgaagccaggctccagctccagcctctcccttcgggaaaggtggacagtgttcaagggtctgctgtggtacattgttcccttggtcgtagtttactttgccgagtatttcattaaccagggactttttgaactcctctttttctggaacacttccctgagtcacgctcagcaataccgctggtaccagatgctgtaccaggctggcgtctttgcctcccgctcttctctccgctgctgtcgcatccgtttcacctgggccctggccctgctgcagtgcctcaacctggtgttcctgctggcagacgtgtggttcggctttctgccaagcatctacctcgtcttcctgatcattctgtatgaggggctcctgggaggcgcagcctacgtgaacaccttccacaacatcgccctggagaccagtgatgagcaccgggagtttgcaatggcggccacctgcatctctgacacactggggatctccctgtcggggctcctggctttgcctctgcatgacttcctctgccagctctcctgatactcgggatcctcaggacgcaggtcacattcacctgtgggcagagggacaggtcagacacccaggcccaccccagagaccctccatgaactgtgctcccagccttcccggcaggtctgggagtagggaagggctgaagccttgtttcccttgcaggggggccagccattgtctcccacttggggagtttcttcctggcatcatgccttctgaataaatgccgattttatccatgga

SEQ ID NO: 998 - DNA, 1577 bp, Homo sapiens
  source 1..1577: mol_type = genomic DNA
aaaggtacaggcctcagggtccctgctgtagacggggcgggggagagtacgatgggtggggcgtggtgggtcgtagggcgctcgagatggagcccccagcttccttgatggatcgcggggcgcgagtgccctagacaagccggagctgggaccggcaatcgggcgttgatccttgtcacctgtcgcagaccctcatccctcccgtgggagccccctttggacactctatgaccctggaccctcgggggacctgaacttgatgcgatgggaggctgtgcaggctcgcggcggcgcttttcggattccgagggctgctgggcctttgcaacaacttctcttatgtggtgatgctgagtgccgcccacgacatccttagccacaagaggacatcgggaaaccagagccatgtggacccaggcccaacgccgatcccccacaacagctcatcacgatttgactgcaactctgtctctacggctcccccgggttctcgtcagtgggatttgtgctgctggaagcttcgtcctggttgccttttctcattctgtggggaccagcctgtgtggtgtggtcttcgctagcatctcatcaggccttggggaggtcaccttcctctccctcactgccttctaccccagggccgtgatctcctggtggtcctcagggactgggggagctgggctgctgggggccctgtcctacctgggcctcacccaggccggcctctcccctcagcagaccctgctgtccatgctgggtatccctgccctgctgctggccagctatttcttgttgctcacatctcctgaggcccaggaccctggaggggaagaagaagcagagagcgcagcccggcagcccctcataagaaccgaggccccggagtcgaagccaggctccagctccagcctctcccttcgggaaaggtggacagtgttcaagggtctgctgtggtacattgttcccttggtcgtagtttactttgccgagtatttcattaaccagggactttttgaactcctctttttctggaacacttccctgagtcacgctcagcaataccgctggtaccagatgctgtaccaggctggcgtctttgcctcccgctcttctctccgctgctgtcgcatccgtttcacctgggccctggccctgctgcagtgcctcaacctggtgttcctgctggcagacgtgtggttcggctttctgccaagcatctacctcgtcttcctgatcattctgtatgaggggctcctgggaggcgcagcctacgtgaacaccttccacaacatcgccctggagaccagtgatgagcaccgggagtttgcaatggcggccacctgcatctctgacacactggggatctccctgtcggggctcctggctttgcctctgcatgacttcctctgccagctctcctgatactcgggatcctcaggacgcaggtcacattcacctgtgggcagagggacaggtcagacacccaggcccaccccagagaccctccatgaactgtgctcccagccttcccggcaggtctgggagtagggaagggctgaagccttgtttcccttgca

SEQ ID NO: 999 - DNA, 1712 bp, Homo sapiens
  source 1..1712: mol_type = genomic DNA
cctcagggtccctgctgtagacggggcgggggagagtacgatgggtggggcgtggtgggtcgtagggcgctcgagatggagcccccagcttccttgatggatcgcggggcgcgagtgccctagacaagccggagctgggaccggcaatcgggcgttgatccttgtcacctgtcgcagaccctcatccctcccgtgggagccccctttggacactctatgaccctggaccctcgggggacctgaacttgatgcgatgggaggctgtgcaggctcgcggcggcgcttttcggattccgagggctgctgggcctttgcaacaacttctcttatgtggtgatgctgagtgccgcccacgacatccttagccacaagaggacatcgggaaaccagagccatgctgtgctcctggcggacatcctccccacactcgtcatcaaattgttggctcctcttggccttcacctgctgccctacagcccccgggttctcgtcagtgggatttgtgctgctggaagcttcgtcctggttgccttttctcattctgtggggaccagcctgtgtggtgtggtcttcgctagcatctcatcaggccttggggaggtcaccttcctctccctcactgccttctaccccagggccgtgatctcctggtggtcctcagggactgggggagctgggctgctgggggccctgtcctacctgggcctcacccaggccggcctctcccctcagcagaccctgctgtccatgctgggtatccctgccctgctgctggccagctatttcttgttgctcacatctcctgaggcccaggaccctggaggggaagaagaagcagagagcgcagcccggcagcccctcataagaaccgaggccccggagtcgaagccaggctccagctccagcctctcccttcgggaaaggtggacagtgttcaagggtctgctgtggtacattgttcccttggtcgtagtttactttgccgagtatttcattaaccagggactttttgaactcctctttttctggaacacttccctgagtcacgctcagcaataccgctggtaccagatgctgtaccaggctggcgtctttgcctcccgctcttctctccgctgctgtcgcatccgtttcacctgggccctggccctgctgcagtgcctcaacctggtgttcctgctggcagacgtgtggttcggctttctgccaagcatctacctcgtcttcctgatcattctgtatgaggggctcctgggaggcgcagcctacgtgaacaccttccacaacatcgccctggagaccagtgatgagcaccgggagtttgcaatggcggccacctgcatctctgacacactggggatctccctgtcggggctcctggctttgcctctgcatgacttcctctgccagctctcctgatactcgggatcctcaggacgcaggtcacattcacctgtgggcagagggacaggttatcaatagtctggctgtctatcgtcatcgtgagactgactttggtgtaggagttcgagaccaccctggccaacatggcaaaaccccatctccacaaaaattggataatttgataattatcattattgggtttctgagacgttacacatttaacgttctcttctgcacaagttgcctttgtgtgagtatactaactttctgtagaggtatacttgtaatcacaaataagaataaattat

SEQ ID NO: 1000 - DNA, 1713 bp, Homo sapiens
  source 1..1713: mol_type = genomic DNA
gccgaggtgctcggtggagtcatggcagtgccctttgtggaagactgggacttggtgcaaaccctgggagaaggtgcctatggagaagttcaacttgctgtgaatagagtaactgaagaagcagtcgcagtgaagattgtagatatgaagcgtgccgtagactgtccagaaaatattaagaaagagatctgtatcaataaaatgctaaatcatgaaaatgtagtaaaattctatggtcacaggagagaaggcaatatccaatatttatttctggagtactgtagtggaggagagctttttgacagaatagagccagacataggcatgcctgaaccagatgctcagagattcttccatcaactcatggcaggggtggtttatctgcatggtattggaataactcacagggatattaaaccagaaaatcttctgttggatgaaagggataacctcaaaatctcagactttggcttggcaacagtatttcggtataataatcgtgagcgtttgttgaacaagatgtgtggtactttaccatatgttgctccagaacttctgaagagaagagaatttcatgcagaaccagttgatgtttggtcctgtggaatagtacttactgcaatgctcgctggagaattgccatgggaccaacccagtgacagctgtcaggagtattctgactggaaagaaaaaaaaacatacctcaacccttggaaaaaaatcgattctgctcctctagctctgctgcataaaatcttagttgagaatccatcagcaagaattaccattccagacatcaaaaaagatagatggtacaacaaacccctcaagaaaggggcaaaaaggccccgagtcacttcaggtggtgtgtcagagtctcccagtggattttctaagcacattcaatccaatttggacttctctccagtaaacagtgcttctagtgaagaaaatgtgaagtactccagttctcagccagaaccccgcacaggtctttccttatgggataccagcccctcatacattgataaattggtacaagggatcagcttttcccagcccacatgtcctgatcatatgcttttgaatagtcagttacttggcaccccaggatcctcacaggttactatatcaacaactgataggagaaacaataaactcattttcaaagtgaatttgttagaaatggatgataaaatattggttgacttccggctttctaagggtgatggattggagttcaagagacacttcctgaagattaaagggaagctgattgatattgtgagcagccagaagatttggcttcctgccacatgatcggaccatcggctctggggaatcctggtgaatatagtgctgctatgttgacattattcttcctagagaagattatcctgtcctgcaaactgcaaatagtagttcctgaagtgttcacttccctgtttatccaaacatcttccaatttattttgtttgttcggcatacaaataatacctatatcttaattgtaagcaaaactttggggaaaggatgaatagaattcatttgattatttcttcatgtgtgtttagtatctgaatttgaaactcatctggtggaaaccaagtttcaggggacatgagttttccagcttttatacacacgtatctcatttttatcaaaacattttgtttaattcaaaaagtacatattccatgttgatttaattct

SEQ ID NO: 1001 - DNA, 1845 bp, Homo sapiens
  source 1..1845: mol_type = genomic DNA
gcatttggattcctgcagtggtgggcaaaggacagtccgccgaggtgctcggtggagtcatggcagtgccctttgtggaagactgggacttggtgcaaaccctgggagaaggtgcctatggagaagttcaacttgctgtgaatagagtaactgaagaagcagtcgcagtgaagattgtagatatgaagcgtgccgtagactgtccagaaaatattaagaaagagatctgtatcaataaaatgctaaatcatgaaaatgtagtaaaattctatggtcacaggagagaaggcaatatccaatatttatttctggagtactgtagtggaggagagctttttgacagaatagagccagacataggcatgcctgaaccagatgctcagagattcttccatcaactcatggcaggggtggtttatctgcatggtattggaataactcacagggatattaaaccagaaaatcttctgttggatgaaagggataacctcaaaatctcagactttggcttggcaacagtatttcggtataataatcgtgagcgtttgttgaacaagatgtgtggtactttaccatatgttgctccagaacttctgaagagaagagaatttcatgcagaaccagttgatgtttggtcctgtggaatagtacttactgcaatgctcgctggagaattgccatgggaccaacccagtgacagctgtcaggagtattctgactggaaagaaaaaaaaacatacctcaacccttggaaaaaaatcgattctgctcctctagctctgctgcataaaatcttagttgagaatccatcagcaagaattaccattccagacatcaaaaaagatagatggtacaacaaacccctcaagaaaggggcaaaaaggccccgagtcacttcaggtggtgtgtcagagtctcccagtggattttctaagcacattcaatccaatttggacttctctccagtaaacagtgcttctagtgaagaaaatgtgaagtactccagttctcagccagaaccccgcacaggtctttccttatgggataccagcccctcatacattgataaattggtacaagggatcagcttttcccagcccacatgtcctgatcatatgcttttgaatagtcagttacttggcaccccaggatcctcacagaacccctggcagcggttggtcaaaagaatgacacgattctttaccaaattggatgcagacaaatcttatcaatgcctgaaagagacttgtgagaagttgggctatcaatggaagaaaagttgtatgaatcaggttactatatcaacaactgataggagaaacaataaactcattttcaaagtgaatttgttagaaatggatgataaaatattggttgacttccggctttctaagggtgatggattggagttcaagagacacttcctgaagattaaagggaagctgattgatattgtgagcagccagaagatttggcttcctgccacatgatcggaccatcggctctggggaatcctgatggagtttcactcttgtctcccaggctggagtacaatggcatgatctcagcttactgcaacctccgtctcctgggttcaagcgattctcctgcctcagccttccaagtagctgggattacaggtgcccaccaccacacctggctaggttttgtatttttagtagagatggggttttttcatgttggccaggctgatctggaactcctgacctcaagtgatccacctgccttggcctcccaaagtgctgggattttaggtgtgagccacctcgcctggcaagggattctgttcttagtccttgaaaaaataaagttctgaatcttcaa

SEQ ID NO: 1002 - DNA, 2748 bp, Homo sapiens
  source 1..2748: mol_type = genomic DNA
aaatttgcgttgtaagatttattttggctctccccgcctgttctttgcacattaaaaatgaaaaagtttgtagaactaagctaagcagatggtcttcctgcaaaaagaccgggctgaagtaaagcattgttttggagctggttcacagaaaaaaggcaaaactggttatcctgacttcaagctccaacataaactgctcgctttctccgggaaacttgccccgccacacacacttgactgcgtggccagttctttcgaagcctctcgctcccaacacggagttcctcccatttcttcacagtcggctctcagcagctgctgctggtttctcggctccagcaccacgagtaccgcactctgaggtttacaaagcactctgcttcaccgactgtgatcctcacagtcctgtccggtggcctcacgcaggtggcggtgcagcctttcaggcccagagcggccaggagcgaagcccgcagccccgcctggaagcgcagcgcggtcggtcgcgcgcccctgaggcttggaggcctgggcttcccccagcagcgctcgagcaccgcccagtcgagcctcacaccggatgccacttcatatttgggcccagagctcaattcgcgccgatgcggtccgccgtccttaaatctcttcagccaggatctctccccgactgcaaagcagccctgggcgggagcggcaacatctccacgtcacccttttggagccgccgacattcagaggggcaggacacgggaacgcgcgctgtcttgctttacggcgcgggtgcgcgagtttgcggcagcgtgacgccctcaagttttggcgggaaaagcgctgcatttggattcctgcagtggtgggcaaaggacagtccgccgaggtgctcggtggagtcatggcagtgccctttgtggaagactgggacttggtgcaaaccctgggagaaggtgcctatggagaagttcaacttgctgtgaatagagtaactgaagaagcagtcgcagtgaagattgtagatatgaagcgtgccgtagactgtccagaaaatattaagaaagagatctgtatcaataaaatgctaaatcatgaaaatgtagtaaaattctatggtcacaggagagaaggcaatatccaatatttatttctggagtactgtagtggaggagagctttttgacagaatagagccagacataggcatgcctgaaccagatgctcagagattcttccatcaactcatggcaggggtggtttatctgcatggtattggaataactcacagggatattaaaccagaaaatcttctgttggatgaaagggataacctcaaaatctcagactttggcttggcaacagtatttcggtataataatcgtgagcgtttgttgaacaagatgtgtggtactttaccatatgttgctccagaacttctgaagagaagagaatttcatgcagaaccagttgatgtttggtcctgtggaatagtacttactgcaatgctcgctggagaattgccatgggaccaacccagtgacagctgtcaggagtattctgactggaaagaaaaaaaaacatacctcaacccttggaaaaaaatcgattctgctcctctagctctgctgcataaaatcttagttgagaatccatcagcaagaattaccattccagacatcaaaaaagatagatggtacaacaaacccctcaagaaaggggcaaaaaggccccgagtcacttcaggtggtgtgtcagagtctcccagtggattttctaagcacattcaatccaatttggacttctctccagtaaacagtgcttctagtgaagaaaatgtgaagtactccagttctcagccagaaccccgcacaggtctttccttatgggataccagcccctcatacattgataaattggtacaagggatcagcttttcccagcccacatgtcctgatcatatgcttttgaatagtcagttacttggcaccccaggatcctcacagaacccctggcagcggttggtcaaaagaatgacacgattctttaccaaattggatgcagacaaatcttatcaatgcctgaaagagacttgtgagaagttgggctatcaatggaagaaaagttgtatgaatcaggttactatatcaacaactgataggagaaacaataaactcattttcaaagtgaatttgttagaaatggatgataaaatattggttgacttccggctttctaagggtgatggattggagttcaagagacacttcctgaagattaaagggaagctgattgatattgtgagcagccagaagatttggcttcctgccacatgatcggaccatcggctctggggaatcctggtgaatatagtgctgctatgttgacattattcttcctagagaagattatcctgtcctgcaaactgcaaatagtagttcctgaagtgttcacttccctgtttatccaaacatcttccaatttattttgtttgttcggcatacaaataatacctatatcttaattgtaagcaaaactttggggaaaggatgaatagaattcatttgattatttcttcatgtgtgtttagtatctgaatttgaaactcatctggtggaaaccaagtttcaggggacatgagttttccagcttttatacacacgtatctcatttttatcaaaacattttgtttaattcaaaaagtacatattccatgttgatttaattctaagatgaaccaataaagacataattcttgtga

SEQ ID NO: 1003 - DNA, 1799 bp, Homo sapiens
  source 1..1799: mol_type = genomic DNA
gatttacacgacaaaatggtcaggtttagaatagttgttcgtggttgaaagacttggataaatgtggatgagatagaaggggaaggcaagagctgttaattttcgtgggcaatcctggggagaggcggggctcagtggcttcactggtgatcttacactctacatcttttctggattcctgccttttacagccgaggtgctcggtggagtcatggcagtgccctttgtggaagactgggacttggtgcaaaccctgggagaaggtgcctatggagaagttcaacttgctgtgaatagagtaactgaagaagcagtcgcagtgaagattgtagatatgaagcgtgccgtagactgtccagaaaatattaagaaagagatctgtatcaataaaatgctaaatcatgaaaatgtagtaaaattctatggtcacaggagagaaggcaatatccaatatttatttctggagtactgtagtggaggagagctttttgacagaatagagccagacataggcatgcctgaaccagatgctcagagattcttccatcaactcatggcaggggtggtttatctgcatggtattggaataactcacagggatattaaaccagaaaatcttctgttggatgaaagggataacctcaaaatctcagactttggcttggcaacagtatttcggtataataatcgtgagcgtttgttgaacaagatgtgtggtactttaccatatgttgctccagaacttctgaagagaagagaatttcatgcagaaccagttgatgtttggtcctgtggaatagtacttactgcaatgctcgctggagaattgccatgggaccaacccagtgacagctgtcaggagtattctgactggaaagaaaaaaaaacatacctcaacccttggaaaaaaatcgattctgctcctctagctctgctgcataaaatcttagttgagaatccatcagcaagaattaccattccagacatcaaaaaagatagatggtacaacaaacccctcaagaaaggggcaaaaaggccccgagtcacttcaggtggtgtgtcagagtctcccagtggattttctaagcacattcaatccaatttggacttctctccagtaaacagtgcttctagtgaagaaaatgtgaagtactccagttctcagccagaaccccgcacaggtctttccttatgggataccagcccctcatacattgataaattggtacaagggatcagcttttcccagcccacatgtcctgatcatatgcttttgaatagtcagttacttggcaccccaggatcctcacagaacccctggcagcggttggtcaaaagaatgacacgattctttaccaaattggatgcagacaaatcttatcaatgcctgaaagagacttgtgagaagttgggctatcaatggaagaaaagttgtatgaatcaggttactatatcaacaactgataggagaaacaataaactcattttcaaagtgaatttgttagaaatggatgataaaatattggttgacttccggctttctaagggtgatggattggagttcaagagacacttcctgaagattaaagggaagctgattgatattgtgagcagccagaagatttggcttcctgccacatgatcggaccatcggctctggggaatcctggttgaggccttggctcctgcctgtagtcccagctacttaggaggctgagagaggaggatcgcgtgaacctggaagtttgaggctgtagtgagctatgattgcaccagtgcactccagcttggatgacaga

SEQ ID NO: 1004 - DNA, 769 bp, Homo sapiens
  source 1..769: mol_type = genomic DNA
aggcctgggcttcccccagcagcgctcgagcaccgcccagtcgagcctcacaccggatgccacttcatatttgggcccagagctcaattcgcgccgatgcggtccgccgtccttaaatctcttcagccaggatctctccccgactgcaaagcagccctgggcgggagcggcaacatctccacgtcacccttttggagccgccgacattcagaggggcaggacacgggaacgcgcgctgtcttgctttacggcgcgggtgcgcgagtttgcggcagcgtgacgccctcaagttttggcgggaaaagcgctgcatttggattcctgcagtggtgggcaaaggacagtccgccgaggtgctcggtggagtcatggcagtgccctttgtggaagactgggacttggtgcaaaccctgggagaaggtgcctatggagaagttcaacttgctgtgaatagagtaactgaagaagcagtcgcagtgaagattgtagatatgaagcgtgccgtagactgtccagaaaatattaagaaagagatctgtatcaataaaatgctaaatcatgaaaatgtagtaaaattctatggtcacaggagagaaggcaatatccaatatttatttctggagtactgtagtggaggagagctttttgacagaatagagccagacataggcatgcctgaaccagatgctcagagattcttccatcaactcatggcaggggtggtttatctgcatggtattggaataactcacagggatattaaaccaga

SEQ ID NO: 1005 - DNA, 562 bp, Homo sapiens
  source 1..562: mol_type = genomic DNA
acagtccggtgaggaagggcggccggtagaccgaggtgctcggtggagtcatggcagtgccctttgtggaagactgggacttggtgcaaaccctgggagaaggtgcctatggagaagttcaacttgctgtgaatagagtaactgaagaagcagtcgcagtgaagattgtagatatgaagcgtgccgtagactgtccagaaaatattaagaaagagatctgtatcaataaaatgctaaatcatgaaaatgtagtaaaattctatggtcacaggagagaaggcaatatccaatatttatttctggagtactgtagtggaggagagctttttgacagaatagagccagacataggcatgcctgaaccagatgctcagagattcttccatcaactcatggcaggggtggtttatctgcatggtattggaataactcacagggatattaaaccagaaaatcttctgttggatgaaagggataacctcaaaatctcagactttggcttggcaacagtatttcggtataataatcgtgagcgtttgttgaacaagatgtgtggtacttt

SEQ ID NO: 1006 - DNA, 661 bp, Homo sapiens
  source 1..661: mol_type = genomic DNA
aggacagtccggtgaggaagggcggccgccgaggtgctcggtggagtcatggcagtgccctttgtggaagactgggacttggtgcaaaccctgggagaaggtgcctatggagaagttcaacttgctgtgaatagagtaactgaagaagcagtcgcagtgaagattgtagatatgaagcgtgccgtagactgtccagaaaatattaagaaagagatctgtatcaataaaatgctaaatcatgaaaatgtagtaaaattctatggtcacaggagagaaggcaatatccaatatttatttctggagtactgtagtggaggagagctttttgacagaatagagccagacataggcatgcctgaaccagatgctcagagattcttccatcaactcatggcaggggtggtttatctgcatggtattggaataactcacagggatattaaaccagaaaatcttctgttggatgaaagggataacctcaaaatctcagactttggcttggcaacagtatttcggtataataatcgtgagcgtttgttgaacaagatgtgtggtactttaccatatgttgctccagaacttctgaagagaagagaatttcatgcagaaccagttgatgtttggtcctgtggaatagtacttactgcaatgctcgctggag

SEQ ID NO: 1007 - DNA, 570 bp, Homo sapiens
  source 1..570: mol_type = genomic DNA
aagaaccccaaggaagagtcccagcccttcctttcgcctctgggggcagtttggccccgccccggcctttgggacgggtggggctgtggatggggatgggaattggaattgagcaattgggaggaggcgctgccgcaggcgttttctgccccataccgctccctatatcctcttcctctcttccccagacccccacctctccctcctccttccccagtcgttcgccggaaagcatttgtctcccacctcttcataacaacaattaatttcctctggggcctgaggagggcagaatttcaaccttcggtgtgcttgggagtggcgattgtgatttacacgacaaaatggtcaggtttagaatagttgttcgtggttgaaagacttggataaatgtggatgagatagaaggggaaggcaagagctccgaggtgctcggtggagtcatggcagtgccctttgtggaagactgggacttggtgcaaaccctgggagaaggtgcctatggagaagttcaacttgctgtgaatagagtaactgaagaagcagtcgcagtgaagattgtagatatga

SEQ ID NO: 1008 - DNA, 3502 bp, Homo sapiens
  source 1..3502: mol_type = genomic DNA
gcaattgggaggaggcgctgccgcaggcgttttctgccccataccgctccctatatcctcttcctctcttccccagacccccacctctccctcctccttccccagtcgttcgccggaaagcatttgtctcccacctcttcataacaacaattaatttcctctggggcctgaggagggcagaatttcaaccttcggtgtgcttgggagtggcgattgtgatttacacgacaaaatgccgaggtgctcggtggagtcatggcagtgccctttgtggaagactgggacttggtgcaaaccctgggagaaggtgcctatggagaagttcaacttgctgtgaatagagtaactgaagaagcagtcgcagtgaagattgtagatatgaagcgtgccgtagactgtccagaaaatattaagaaagagatctgtatcaataaaatgctaaatcatgaaaatgtagtaaaattctatggtcacaggagagaaggcaatatccaatatttatttctggagtactgtagtggaggagagctttttgacagaatagagccagacataggcatgcctgaaccagatgctcagagattcttccatcaactcatggcaggggtggtttatctgcatggtattggaataactcacagggatattaaaccagaaaatcttctgttggatgaaagggataacctcaaaatctcagactttggcttggcaacagtatttcggtataataatcgtgagcgtttgttgaacaagatgtgtggtactttaccatatgttgctccagaacttctgaagagaagagaatttcatgcagaaccagttgatgtttggtcctgtggaatagtacttactgcaatgctcgctggagaattgccatgggaccaacccagtgacagctgtcaggagtattctgactggaaagaaaaaaaaacatacctcaacccttggaaaaaaatcgattctgctcctctagctctgctgcataaaatcttagttgagaatccatcagcaagaattaccattccagacatcaaaaaagatagatggtacaacaaacccctcaagaaaggggcaaaaaggccccgagtcacttcaggtggtgtgtcagagtctcccagtggattttctaagcacattcaatccaatttggacttctctccagtaaacagtgcttctagtgaagaaaatgtgaagtactccagttctcagccagaaccccgcacaggtctttccttatgggataccagcccctcatacattgataaattggtacaagggatcagcttttcccagcccacatgtcctgatcatatgcttttgaatagtcagttacttggcaccccaggatcctcacagaacccctggcagcggttggtcaaaagaatgacacgattctttaccaaattggatgcagacaaatcttatcaatgcctgaaagagacttgtgagaagttgggctatcaatggaagaaaagttgtatgaatcaggttactatatcaacaactgataggagaaacaataaactcattttcaaagtgaatttgttagaaatggatgataaaatattggttgacttccggctttctaagggtgatggattggagttcaagagacacttcctgaagattaaagggaagctgattgatattgtgagcagccagaagatttggcttcctgccacatgatcggaccatcggctctggggaatcctggtgaatatagtgctgctatgttgacattattcttcctagagaagattatcctgtcctgcaaactgcaaatagtagttcctgaagtgttcacttccctgtttatccaaacatcttccaatttattttgtttgttcggcatacaaataatacctatatcttaattgtaagcaaaactttggggaaaggatgaatagaattcatttgattatttcttcatgtgtgtttagtatctgaatttgaaactcatctggtggaaaccaagtttcaggggacatgagttttccagcttttatacacacgtatctcatttttatcaaaacattttgtttaattcaaaaagtacatattccatgttgatttaattctaagatgaaccaataaagacataattcttgtgacttttggacagtagatttatcagtctgtgaagcgaagccagcttcaaaacatatccccaagatttgtacttatattttcaaaagggcctggccagttatataaacctgtttttgaattataatgattaattaaaattgcaagtaggtgttttttccagtgtagttagtaaaatacttgtattttacagtgttgcataaactctagtgcttaactaactttactctaaaaattactgttgaacatcttaaatatttttctatattttctactttcatagccatattttaaccttttcaacttactggtgaccaagcttttaggtgataaagaataaaagagggaagggaagagtaaggaagctataagaaaaatagatctgattctttgttcctttacctgttagacttacaaaaagtttgtttttctaataaaatttgtatcaactttggggcatattaggttgaggccttggctcctgcctgtagtcccagctacttaggaggctgagagaggaggatcgcgtgaacctggaagtttgaggctgtagtgagctatgattgcaccagtgcactccagcttggatgacagagtaagaccctacctctaataaaaatttttaaaattgtaaaacattataaaattaatcagttattttaatctgaagccaagaacatgtagaatgttatgattagagtttatcacatattaatgtatactggcaaattgtgttactggagtatacccataggaggaataaattcaaacctgttttatttatttgaacctatttacggtatgcttaagaattgaatcagtataaattctcaaatatgggagaaattttgttcttgagaattatctgagtcattaatatttttcaaaaacagctctcactgacttgaacctcttctgtaagctctaaccttttacctgctttacatttccacttgaatgtctagtaggcatctcttgaccaaaaacagcttttgattcctgttctccaacctgttcctctcctagttttctccatctcagaaatgttacttcctctgcaaagtctttccctgacttatctaaaataataacctcctctgtttgctgtgggaatttgtatagaatggtgggaaaatttcaagtttcatatttggattagctctgacatttatttatctgaacactggtaattgcctcagtaaagacactgataataagtaccttttagagttattttaatctttaatgctttaatgtgtaggaagagtatagtgtcctgttttgcacagaaaggcattctgtaaataataagttgccttaattttcctgtaatgttcattatattgttgtgggaaggtatttactcctattattaaaaataaaaatgtgtaaaatt

SEQ ID NO: 1009 - DNA, 583 bp, Homo sapiens
  source 1..583: mol_type = genomic DNA
agtccggtgaggaagggcggccgacccccacctctccctcctccttccccagtcgttcgccggaaagcatttgtctcccacctcttcataacaacaattaatttcctctggggcctgaggagggcagaatttcaaccttcggtgtgcttgggagtggcgattgtgatttacacgacaaaatgccgaggtgctcggtggagtcatggcagtgccctttgtggaagactgggacttggtgcaaaccctgggagaaggtgcctatggagaagttcaacttgctgtgaatagagtaactgaagaagcagtcgcagtgaagattgtagatatgaagcgtgccgtagactgtccagaaaatattaagaaagagatctgtatcaataaaatgctaaatcatgaaaatgtagtaaaattctatggtcacaggagagaaggcaatatccaatatttatttctggagtactgtagtggaggagagctttttgacagaatagagccagacataggcatgcctgaaccagatgctcagagattcttccatcaactcatggcaggggtggtttatctgcatggtattggaataact

SEQ ID NO: 1010 - DNA, 1568 bp, Homo sapiens
  source 1..1568: mol_type = genomic DNA
ggattcctgcagtggtgggcaaaggacagtccgccgaggtgctcggtggagtcatggcagtgccctttgtggaagactgggacttggtgcaaaccctgggagaaggtgcctatggagaagttcaacttgctgtgaatagagtaactgaagaagcagtcgcagtgaagattgtagatatgaagcgtgccgtagactgtccagaaaatattaagaaagagatctgtatcaataaaatgctaaatcatgaaaatgtagtaaaattctatggtcacaggagagaaggcaatatccaatatttatttctggagtactgtagtggaggagagctttttgacagaatagagccagacataggcatgcctgaaccagatgctcagagattcttccatcaactcatggcaggggtggtttatctgcatggtattggaataactcacagggatattaaaccagaaaatcttctgttggatgaaagggataacctcaaaatctcagactttggcttggcaacagtatttcggtataataatcgtgagcgtttgttgaacaagatgtgtggtactttaccatatgttgctccagaacttctgaagagaagagaatttcatgcagaaccagttgatgtttggtcctgtggaatagtacttactgcaatgctcgctggagaattgccatgggaccaacccagtgacagctgtcaggagtattctgactggaaagaaaaaaaaacatacctcaacccttggaaaaaaatcgattctgctcctctagctctgctgcataaaatcttagttgagaatccatcagcaagaattaccattccagacatcaaaaaagatagatggtacaacaaacccctcaagaaaggggcaaaaaggccccgagtcacttcaggtggtgtgtcagagtctcccagtggattttctaagcacattcaatccaatttggacttctctccagtaaacagtgcttctagtgaagaaaatgtgaagtactccagttctcagccagaaccccgcacaggtctttccttatgggataccagcccctcatacattgataaattggtacaagggatcagcttttcccagcccacatgtcctgatcatatgcttttgaatagtcagttacttggcaccccaggatcctcacagaacccctggcagcggttggtcaaaagaatgacacgattctttaccaaattggatgcagacaaatcttatcaatgcctgaaagagacttgtgagaagttgggctatcaatggaagaaaagttgtatgaatcagggtgatggattggagttcaagagacacttcctgaagattaaagggaagctgattgatattgtgagcagccagaagatttggcttcctgccacatgatcggaccatcggctctggggaatcctggtgaatatagtgctgctatgttgacattattcttcctagagaagattatcctgtcctgcaaactgcaaatagtagttcctgaagtgttcacttccctgtttatccaaacatcttccaatttattttgtttgttcggcatacaaataatacctatatctt

SEQ ID NO: 1011 - DNA, 1867 bp, Homo sapiens
  source 1..1867: mol_type = genomic DNA
gtttgtatctgcaggtttagcgccactctgctggctgaggctgcggagagtgtgcggctccaggtgggctcacgcggtcgtgatgtctcgggagtcggatgttgaggctcagcagtctcatggcagcagtgcctgttcacagccccatggcagcgttacccagtcccaaggctcctcctcacagtcccagggcatatccagctcctctaccagcacgatgccaaactccagccagtcctctcactccagctctgggacactgagctccttagagacagtgtccactcaggaactctattctattcctgaggaccaagaacctgaggaccaagaacctgaggagcctacccctgccccctgggctcgattatgggcccttcaggatggatttgccaatcttgaatgtgtgaatgacaactactggtttgggagggacaaaagctgtgaatattgctttgatgaaccactgctgaaaagaacagataaataccgaacatacagcaagaaacactttcggattttcagggaagtgggtcctaaaaactcttacattgcatacatagaagatcacagtggcaatggaacctttgtaaatacagagcttgtagggaaaggaaaacgccgtcctttgaataacaattctgaaattgcactgtcactaagcagaaataaagtttttgtcttttttgatctgactgtagatgatcagtcagtttatcctaaggcattaagagatgaatacatcatgtcaaaaactcttggaagtggtgcctgtggagaggtaaagctggctttcgagaggaaaacatgtaagaaagtagccataaagatcatcagcaaaaggaagtttgctattggttcagcaagagaggcagacccagctctcaatgttgaaacagaaatagaaattttgaaaaagctaaatcatccttgcatcatcaagattaaaaacttttttgatgcagaagattattatattgttttggaattgatggaagggggagagctgtttgacaaagtggtggggaataaacgcctgaaagaagctacctgcaagctctatttttaccagatgctcttggctgtgcagtaccttcatgaaaacggtattatacaccgtgacttaaagccagagaatgttttactgtcatctcaagaagaggactgtcttataaagattactgattttgggcactccaagattttgggagagacctctctcatgagaaccttatgtggaacccccacctacttggcgcctgaagttcttgtttctgttgggactgctgggtataaccgtgctgtggactgctggagtttaggagttattctttttatctgccttagtgggtatccacctttctctgagcataggactcaagtgtcactgaaggatcagatcaccagtggaaaatacaacttcattcctgaagtctgggcagaagtctcagagaaagctctggaccttgtcaagaagttgttggtagtggatccaaaggcacgttttacgacagaagaagccttaagacacccgtggcttcaggatgaagacatgaagagaaagtttcaagatcttctgtctgaggaaaatgaatccacagctctaccccaggttctagcccagccttctactagtcgaaagcggccccgtgaaggggaagccgagggtgccgagaccacaaagcgcccagctgtgtgtgctgctgtgttgtgaactccgtggtttgaacacgaaagaaatgtaccttctttcactctgtcatctttcttttctttgagtctgtttttttatagtttgtattttaattatgggaataattgctttttcacagtcactgatgtacaattaaaaacctgatggaacctg

SEQ ID NO: 1012 - DNA, 1771 bp, Homo sapiens
  source 1..1771: mol_type = genomic DNA
gcaggtttagcgccactctgctggctgaggctgcggagagtgtgcggctccaggtgggctcacgcggtcgtgatgtctcgggagtcggatgttgaggctcagcagtctcatggcagcagtgcctgttcacagccccatggcagcgttacccagtcccaaggctcctcctcacagtcccagggcatatccagctcctctaccagcacgatgccaaactccagccagtcctctcactccagctctgggacactgagctccttagagacagtgtccactcaggaactctattctattcctgaggaccaagaacctgaggaccaagaacctgaggagcctacccctgccccctgggctcgattatgggcccttcaggatggatttgccaatcttgaatgtgtgaatgacaactactggtttgggagggacaaaagctgtgaatattgctttgatgaaccactgctgaaaagaacagataaataccgaacatacagcaagaaacactttcggattttcagggaagtgggtcctaaaaactcttacattgcatacatagaagatcacagtggcaatggaacctttgtaaatacagagcttgtagggaaaggaaaacgccgtcctttgaataacaattctgaaattgcactgtcactaagcagaaataaagtttttgtcttttttgatctgactgtagatgatcagtcagtttatcctaaggcattaagagatgaatacatcatgtcaaaaactcttggaagtggtgcctgtggagaggtaaagctggctttcgagaggaaaacatgtaagaaagtagccataaagatcatcagcaaaaggaagtttgctattggttcagcaagagaggcagacccagctctcaatgttgaaacagaaatagaaattttgaaaaagctaaatcatccttgcatcatcaagattaaaaacttttttgatgcagaagattattatattgttttggaattgatggaagggggagagctgtttgacaaagtggtggggaataaacgcctgaaagaagctacctgcaagctctatttttaccagatgctcttggctgtgcagattactgattttgggcactccaagattttgggagagacctctctcatgagaaccttatgtggaacccccacctacttggcgcctgaagttcttgtttctgttgggactgctgggtataaccgtgctgtggactgctggagtttaggagttattctttttatctgccttagtgggtatccacctttctctgagcataggactcaagtgtcactgaaggatcagatcaccagtggaaaatacaacttcattcctgaagtctgggcagaagtctcagagaaagctctggaccttgtcaagaagttgttggtagtggatccaaaggcacgttttacgacagaagaagccttaagacacccgtggcttcaggatgaagacatgaagagaaagtttcaagatcttctgtctgaggaaaatgaatccacagctctaccccaggttctagcccagccttctactagtcgaaagcggccccgtgaaggggaagccgagggtgccgagaccacaaagcgcccagctgtgtgtgctgctgtgttgtgaactccgtggtttgaacacgaaagaaatgtaccttctttcactctgtcatctttcttttctttgagtctgtttttttatagtttgtattttaattatgggaataattgctttttcacagtcactgatgtacaattaaaaacctgatggaacctgg

SEQ ID NO: 1013 - DNA, 835 bp, Homo sapiens
  source 1..835: mol_type = genomic DNA
atgtctcgggagtcggatgttgaggctcagcagtctcatggcagcagtgcctgttcacagccccatggcagcgttacccagtcccaaggctcctcctcacagtcccagggcatatccagctcctctaccagcacgatgccaaactccagccagtcctctcactccagctctgggacactgagctccttagagacagtgtccactcaggaactctattctattcctcctgaagttcttgtttctgttgggactgctgggtataaccgtgctgtggactgctggagtttaggagttattctttttatctgccttagtgggtatccacctttctctgagcataggactcaagtgtcactgaaggatcagatcaccagtggaaaatacaacttcattcctgaagtctgggcagaagtctcagagaaagctctggaccttgtcaagaagttgttggtagtggatccaaaggcacgttttacgacagaagaagccttaagacacccgtggcttcaggatgaagacatgaagagaaagtttcaagatcttctgtctgaggaaaatgaatccacagctctaccccaggttctagcccagccttctactagtcgaaagcggccccgtgaaggggaagccgagggtgccgagaccacaaagcgcccagctgtgtgtgctgctgtgttgtgaactccgtggtttgaacacgaaagaaatgtaccttctttcactctgtcatctttcttttctttgagtctgtttttttatagtttgtattttaattatgggaataattgctttttcacagtcactgatgtacaattaaaaacctgatggaacctgg

SEQ ID NO: 1014 - DNA, 718 bp, Homo sapiens
  source 1..718: mol_type = genomic DNA
gcaggtttagcgccactctgctggctgaggctgcggagagtgtgcggctccaggtgggctcacgcggtcgtgatgtctcgggagtcggatgttgaggctcagcagtctcatggcagcagtgcctgttcacagccccatggcagcgttacccagtcccaaggctcctcctcacagtcccagggcatatccagctcctctaccagcacgatgccaaactccagccagtcctctcactccagctctgggacactgagctccttagagacagtgtccactcaggaactctattctattcctgaggaccaagaacctgaggaccaagaacctgaggagcctacccctgccccctgggctcgattatgggcccttcaggatggatttgccaatcttggagatgaagacatgaagagaaagtttcaagatcttctgtctgaggaaaatgaatccacagctctaccccaggttctagcccagccttctactagtcgaaagcggccccgtgaaggggaagccgagggtgccgagaccacaaagcgcccagctgtgtgtgctgctgtgttgtgaactccgtggtttgaacacgaaagaaatgtaccttctttcactctgtcatctttcttttctttgagtctgtttttttatagtttgtattttaattatgggaataattgctttttcacagtcactgatgtacaattaaaaacctgatggaacctgg

SEQ ID NO: 1015 - DNA, 1796 bp, Homo sapiens
  source 1..1796: mol_type = genomic DNA
gcaggtttagcgccactctgctggctgaggctgcggagagtgtgcggctccaggtgggctcacgcggtcgtgatgtctcgggagtcggatgttgaggctcagcagtctcatggcagcagtgcctgttcacagccccatggcagcgttacccagtcccaaggctcctcctcacagtcccagggcatatccagctcctctaccagcacgatgccaaactccagccagtcctctcactccagctctgggacactgagctccttagagacagtgtccactcaggaactctattctattcctgaggaccaagaacctgaggaccaagaacctgaggagcctacccctgccccctgggctcgattatgggcccttcaggatggatttgccaatcttgaatgtgtgaatgacaactactggtttgggagggacaaaagctgtgaatattgctttgatgaaccactgctgaaaagaacagataaataccgaacatacagcaagaaacactttcggattttcagggaagtgggtcctaaaaactcttacattgcatacatagaagatcacagtggcaatggaacctttgtaaatacagagcttgtagggaaaggaaaacgccgtcctttgaataacaattctgaaattgcactgtcactaagcagaaataaagtttttgtcttttttgatctgactgtagatgatcagtcagtttatcctaaggcattaagagatgaatacatcatgtcaaaaactcttggaagtggtgcctgtggagaggtaaagctggctttcgagaggaaaacatgtaagaaagtagccataaagatcatcagcaaaaggaagtttgctattggttcagcaagagaggcagacccagctctcaatgttgaaacagaaatagaaattttgaaaaagctaaatcatgatggaagggggagagctgtttgacaaagtggtggggaataaacgcctgaaagaagctacctgcaagctctatttttaccagatgctcttggctgtgcagtaccttcatgaaaacggtattatacaccgtgacttaaagccagagaatgttttactgtcatctcaagaagaggactgtcttataaagattactgattttgggcactccaagattttgggagagacctctctcatgagaaccttatgtggaacccccacctacttggcgcctgaagttcttgtttctgttgggactgctgggtataaccgtgctgtggactgctggagtttaggagttattctttttatctgccttagtgggtatccacctttctctgagcataggactcaagtgtcactgaaggatcagatcaccagtggaaaatacaacttcattcctgaagtctgggcagaagtctcagagaaagctctggaccttgtcaagaagttgttggtagtggatccaaaggcacgttttacgacagaagaagccttaagacacccgtggcttcaggatgaagacatgaagagaaagtttcaagatcttctgtctgaggaaaatgaatccacagctctaccccaggttctagcccagccttctactagtcgaaagcggccccgtgaaggggaagccgagggtgccgagaccacaaagcgcccagctgtgtgtgctgctgtgttgtgaactccgtggtttgaacacgaaagaaatgtaccttctttcactctgtcatctttcttttctttgagtctgtttttttatagtttgtattttaattatgggaataattgctttttcacagtcactgatgtacaattaaaaacctgatggaacctgg

SEQ ID NO: 1016 - DNA, 1585 bp, Homo sapiens
  source 1..1585: mol_type = genomic DNA
gcaggtttagcgccactctgctggctgaggctgcggagagtgtgcggctccaggtgggctcacgcggtcgtgatgtctcgggagtcggatgttgaggctcagcagtctcatggcagcagtgcctgttcacagccccatggcagcgttacccagtcccaaggctcctcctcacagtcccagggcatatccagctcctctaccagcacgatgccaaactccagccagtcctctcactccagctctgggacactgagctccttagagacagtgtccactcaggaactctattctattcctgaggaccaagaacctgaggaccaagaacctgaggagcctacccctgccccctgggctcgattatgggcccttcaggatggatttgccaatcttgtttttgtcttttttgatctgactgtagatgatcagtcagtttatcctaaggcattaagagatgaatacatcatgtcaaaaactcttggaagtggtgcctgtggagaggtaaagctggctttcgagaggaaaacatgtaagaaagtagccataaagatcatcagcaaaaggaagtttgctattggttcagcaagagaggcagacccagctctcaatgttgaaacagaaatagaaattttgaaaaagctaaatcatccttgcatcatcaagattaaaaacttttttgatgcagaagattattatattgttttggaattgatggaagggggagagctgtttgacaaagtggtggggaataaacgcctgaaagaagctacctgcaagctctatttttaccagatgctcttggctgtgcagtaccttcatgaaaacggtattatacaccgtgacttaaagccagagaatgttttactgtcatctcaagaagaggactgtcttataaagattactgattttgggcactccaagattttgggagagacctctctcatgagaaccttatgtggaacccccacctacttggcgcctgaagttcttgtttctgttgggactgctgggtataaccgtgctgtggactgctggagtttaggagttattctttttatctgccttagtgggtatccacctttctctgagcataggactcaagtgtcactgaaggatcagatcaccagtggaaaatacaacttcattcctgaagtctgggcagaagtctcagagaaagctctggaccttgtcaagaagttgttggtagtggatccaaaggcacgttttacgacagaagaagccttaagacacccgtggcttcaggatgaagacatgaagagaaagtttcaagatcttctgtctgaggaaaatgaatccacagctctaccccaggttctagcccagccttctactagtcgaaagcggccccgtgaaggggaagccgagggtgccgagaccacaaagcgcccagctgtgtgtgctgctgtgttgtgaactccgtggtttgaacacgaaagaaatgtaccttctttcactctgtcatctttcttttctttgagtctgtttttttatagtttgtattttaattatgggaataattgctttttcacagtcactgatgtacaattaaaaacctgatggaacctgg

SEQ ID NO: 1017 - DNA, 1971 bp, Homo sapiens
  source 1..1971: mol_type = genomic DNA
atctgcaggtttagcgccactctgctggctgaggctgcggagagtgtgcggctccaggtgggctcacgcggtcgtgatgtctcgggagtcggatgttgaggctcagcagtctcatggcagcagtgcctgttcacagccccatggcagcgttacccagtcccaaggctcctcctcacagtcccagggcatatccagctcctctaccagcacgatgccaaactccagccagtcctctcactccagctctgggacactgagctccttagagacagtgtccactcaggaactctattctattcctgaggaccaagaacctgaggaccaagaacctgaggagcctacccctgccccctgggctcgattatgggcccttcaggatggatttgccaatcttgagacagagtctggccatgttacccaatctgatcttgaactcctgctgtcatctgatcctcctgcctcagcctcccaaagtgctgggataagaggtgtgaggcaccatccccggccagtttgcagtctaaaatgtgtgaatgacaactactggtttgggagggacaaaagctgtgaatattgctttgatgaaccactgctgaaaagaacagataaataccgaacatacagcaagaaacactttcggattttcagggaagtgggtcctaaaaactcttacattgcatacatagaagatcacagtggcaatggaacctttgtaaatacagagcttgtagggaaaggaaaacgccgtcctttgaataacaattctgaaattgcactgtcactaagcagaaataaagtttttgtcttttttgatctgactgtagatgatcagtcagtttatcctaaggcattaagagatgaatacatcatgtcaaaaactcttggaagtggtgcctgtggagaggtaaagctggctttcgagaggaaaacatgtaagaaagtagccataaagatcatcagcaaaaggaagtttgctattggttcagcaagagaggcagacccagctctcaatgttgaaacagaaatagaaattttgaaaaagctaaatcatccttgcatcatcaagattaaaaacttttttgatgcagaagattattatattgttttggaattgatggaagggggagagctgtttgacaaagtggtggggaataaacgcctgaaagaagctacctgcaagctctatttttaccagatgctcttggctgtgcagtaccttcatgaaaacggtattatacaccgtgacttaaagccagagaatgttttactgtcatctcaagaagaggactgtcttataaagattactgattttgggcactccaagattttgggagagacctctctcatgagaaccttatgtggaacccccacctacttggcgcctgaagttcttgtttctgttgggactgctgggtataaccgtgctgtggactgctggagtttaggagttattctttttatctgccttagtgggtatccacctttctctgagcataggactcaagtgtcactgaaggatcagatcaccagtggaaaatacaacttcattcctgaagtctgggcagaagtctcagagaaagctctggaccttgtcaagaagttgttggtagtggatccaaaggcacgttttacgacagaagaagccttaagacacccgtggcttcaggatgaagacatgaagagaaagtttcaagatcttctgtctgaggaaaatgaatccacagctctaccccaggttctagcccagccttctactagtcgaaagcggccccgtgaaggggaagccgagggtgccgagaccacaaagcgcccagctgtgtgtgctgctgtgttgtgaactccgtggtttgaacacgaaagaaatgtaccttctttcactctgtcatctttcttttctttgagtctgtttttttatagtttgtattttaattatgggaataattgctttttcacagtcactgatgtacaatt

SEQ ID NO: 1018 - DNA, 1545 bp, Homo sapiens
  source 1..1545: mol_type = genomic DNA
atgtctcgggagtcggatgttgaggctcagcagtctcatggcagcagtgcctgttcacagccccatggcagcgttacccagtcccaaggctcctcctcacagtcccagggcatatccagctcctctaccagcacgatgccaaactccagccagtcctctcactccagctctgggacactgagctccttagagacagtgtccactcaggaactctattctattcctgaggaccaagaacctgaggaccaagaacctgaggagcctacccctgccccctgggctcgattatgggcccttcaggatggatttgccaatcttgaatgtgtgaatgacaactactggtttgggagggacaaaagctgtgaatattgctttgatgaaccactgctgaaaagaacagataaataccgaacatacagcaagaaacactttcggattttcagggaagtgggtcctaaaaactcttacattgcatacatagaagatcacagtggcaatggaacctttgtaaatacagagcttgtagggaaaggaaaacgccgtcctttgaataacaattctgaaattgcactgtcactaagcagaaataaagtttttgtcttttttgatctgactgtagatgatcagtcagtttatcctaaggcattaagagatgaatacatcatgtcaaaaactcttggaagtggtgcctgtggagaggtaaagctggctttcgagaggaaaacatgtaagaaagtagccataaagatcatcagcaaaaggaagtttgctattggttcagcaagagaggcagacccagctctcaatgttgaaacagaaatagaaattttgaaaaagctaaatcatccttgcatcatcaagattaaaaacttttttgatgcagaagattattatattgttttggaattgatggaagggggagagctgtttgacaaagtggtggggaataaacgcctgaaagaagctacctgcaagctctatttttaccagatgctcttggctgtgcagattactgattttgggcactccaagattttgggagagacctctctcatgagaaccttatgtggaacccccacctacttggcgcctgaagttcttgtttctgttgggactgctgggtataaccgtgctgtggactgctggagtttaggagttattctttttatctgccttagtgggtatccacctttctctgagcataggactcaagtgtcactgaaggatcagatcaccagtggaaaatacaacttcattcctgaagtctgggcagaagtctcagagaaagctctggaccttgtcaagaagttgttggtagtggatccaaaggcacgttttacgacagaagaagccttaagacacccgtggcttcaggatgaagacatgaagagaaagtttcaagatcttctgtctgaggaaaatgaatccacagctctaccccaggttctagcccagccttctactagtcgaaagcggccccgtgaaggggaagccgagggtgccgagaccacaaagcgcccagctgtgtgtgctgctgtgttgtga

SEQ ID NO: 1019 - DNA, 1359 bp, Homo sapiens
  source 1..1359: mol_type = genomic DNA
atgtctcgggagtcggatgttgaggctcagcagtctcatggcagcagtgcctgttcacagccccatggcagcgttacccagtcccaaggctcctcctcacagtcccagggcatatccagctcctctaccagcacgatgccaaactccagccagtcctctcactccagctctgggacactgagctccttagagacagtgtccactcaggaactctattctattcctgaggaccaagaacctgaggaccaagaacctgaggagcctacccctgccccctgggctcgattatgggcccttcaggatggatttgccaatcttgtttttgtcttttttgatctgactgtagatgatcagtcagtttatcctaaggcattaagagatgaatacatcatgtcaaaaactcttggaagtggtgcctgtggagaggtaaagctggctttcgagaggaaaacatgtaagaaagtagccataaagatcatcagcaaaaggaagtttgctattggttcagcaagagaggcagacccagctctcaatgttgaaacagaaatagaaattttgaaaaagctaaatcatccttgcatcatcaagattaaaaacttttttgatgcagaagattattatattgttttggaattgatggaagggggagagctgtttgacaaagtggtggggaataaacgcctgaaagaagctacctgcaagctctatttttaccagatgctcttggctgtgcagtaccttcatgaaaacggtattatacaccgtgacttaaagccagagaatgttttactgtcatctcaagaagaggactgtcttataaagattactgattttgggcactccaagattttgggagagacctctctcatgagaaccttatgtggaacccccacctacttggcgcctgaagttcttgtttctgttgggactgctgggtataaccgtgctgtggactgctggagtttaggagttattctttttatctgccttagtgggtatccacctttctctgagcataggactcaagtgtcactgaaggatcagatcaccagtggaaaatacaacttcattcctgaagtctgggcagaagtctcagagaaagctctggaccttgtcaagaagttgttggtagtggatccaaaggcacgttttacgacagaagaagccttaagacacccgtggcttcaggatgaagacatgaagagaaagtttcaagatcttctgtctgaggaaaatgaatccacagctctaccccaggttctagcccagccttctactagtcgaaagcggccccgtgaaggggaagccgagggtgccgagaccacaaagcgcccagctgtgtgtgctgctgtgttgtga

SEQ ID NO: 1020 - DNA, 1785 bp, Homo sapiens
  source 1..1785: mol_type = genomic DNA
atgtctcgggagtcggatgttgaggctcagcagtctcatggcagcagtgcctgttcacagccccatggcagcgttacccagtcccaaggctcctcctcacagtcccagggcatatccagctcctctaccagcacgatgccaaactccagccagtcctctcactccagctctgggacactgagctccttagagacagtgtccactcaggaactctattctattcctgaggaccaagaacctgaggaccaagaacctgaggagcctacccctgccccctgggctcgattatgggcccttcaggatggatttgccaatcttgaatgtgtgaatgacaactactggtttgggagggacaaaagctgtgaatattgctttgatgaaccactgctgaaaagaacagataaataccgaacatacagcaagaaacactttcggattttcagggaagtgggtcctaaaaactcttacattgcatacatagaagatcacagtggcaatggaacctttgtaaatacagagcttgtagggaaaggaaaacgccgtcctttgaataacaattctgaaattgcactgtcactaagcagaaataaagtttttgtcttttttgatctgactgtagatgatcagtcagtttatcctaaggcattaagagatgaatacatcatgtcaaaaactcttggaagtggtgcctgtggagaggtaaagctggctttcgagaggaaaacatgtaagaaagtagccataaagatcatcagcaaaaggaagtttgctattggttcagcaagagaggcagacccagctctcaatgttgaaacagaaatagaaattttgaaaaagctaaatcatccttgcatcatcaagattaaaaacttttttgatgcagaagattattatattgttttggaattgatggaagggggagagctgtttgacaaagtggtggggaataaacgcctgaaagaagctacctgcaagctctatttttaccagatgctcttggctgtgcagtaccttcatgaaaacggtattatacaccgtgacttaaagccagagaatgttttactgtcatctcaagaagaggactgtcttataaagattactgattttgggcactccaagattttgggagagacctctctcatgagaaccttatgtggaacccccacctacttggcgcctgaagttcttgtttctgttgggactgctgggtataaccgtgctgtggactgctggagtttaggagttattctttttatctgccttagtgggtatccacctttctctgagcataggactcaagtgtcactgaaggatcagatcaccagtggaaaatacaacttcattcctgaagtctgggcagaagtctcagagaaagctctggaccttgtcaagaagttgttggtagtggatccaaaggcacgttttacgacagaagaagccttaagacacccgtggcttcaggatgaagacatgaagagaaagtttcaagatcttctgtctgaggaaaatgaatccacagctctaccccaggttctagcccagccttctactagtcgaaagcggccccgtgaaggggaagccgagggtgccgagaccacaaagcgcccagctgtgtgtgctgctgtgttgtgaactccgtggtttgaacacgaaagaaatgtaccttctttcactctgtcatctttcttttctttgagtctgtttttttatagtttgtattttaattatgggaataattgctttttcacagtcactgatgtacaattaaaaacctgatggaacctg

SEQ ID NO: 1021 - DNA, 1959 bp, Homo sapiens
  source 1..1959: mol_type = genomic DNA
ggagagtgtgcggctccaggtgggctcacgcgatactggatttcaccatggtgcccaggctggtcttgaattcctgggctcaagcaatctacctgcgttggcctcccaaagtgctgggattacagacatgaaccaccacacctggcagaacctttgtatcttgaaagctgtgtaaatacaatcagtgtcgtgatgtctcgggagtcggatgttgaggctcagcagtctcatggcagcagtgcctgttcacagccccatggcagcgttacccagtcccaaggctcctcctcacagtcccagggcatatccagctcctctaccagcacgatgccaaactccagccagtcctctcactccagctctgggacactgagctccttagagacagtgtccactcaggaactctattctattcctgaggaccaagaacctgaggaccaagaacctgaggagcctacccctgccccctgggctcgattatgggcccttcaggatggatttgccaatcttgaatgtgtgaatgacaactactggtttgggagggacaaaagctgtgaatattgctttgatgaaccactgctgaaaagaacagataaataccgaacatacagcaagaaacactttcggattttcagggaagtgggtcctaaaaactcttacattgcatacatagaagatcacagtggcaatggaacctttgtaaatacagagcttgtagggaaaggaaaacgccgtcctttgaataacaattctgaaattgcactgtcactaagcagaaataaagtttttgtcttttttgatctgactgtagatgatcagtcagtttatcctaaggcattaagagatgaatacatcatgtcaaaaactcttggaagtggtgcctgtggagaggtaaagctggctttcgagaggaaaacatgtaagaaagtagccataaagatcatcagcaaaaggaagtttgctattggttcagcaagagaggcagacccagctctcaatgttgaaacagaaatagaaattttgaaaaagctaaatcatccttgcatcatcaagattaaaaacttttttgatgcagaagattattatattgttttggaattgatggaagggggagagctgtttgacaaagtggtggggaataaacgcctgaaagaagctacctgcaagctctatttttaccagatgctcttggctgtgcagtaccttcatgaaaacggtattatacaccgtgacttaaagccagagaatgttttactgtcatctcaagaagaggactgtcttataaagattactgattttgggcactccaagattttgggagagacctctctcatgagaaccttatgtggaacccccacctacttggcgcctgaagttcttgtttctgttgggactgctgggtataaccgtgctgtggactgctggagtttaggagttattctttttatctgccttagtgggtatccacctttctctgagcataggactcaagtgtcactgaaggatcagatcaccagtggaaaatacaacttcattcctgaagtctgggcagaagtctcagagaaagctctggaccttgtcaagaagttgttggtagtggatccaaaggcacgttttacgacagaagaagccttaagacacccgtggcttcaggatgaagacatgaagagaaagtttcaagatcttctgtctgaggaaaatgaatccacagctctaccccaggttctagcccagccttctactagtcgaaagcggccccgtgaaggggaagccgagggtgccgagaccacaaagcgcccagctgtgtgtgctgctgtgttgtgaactccgtggtttgaacacgaaagaaatgtaccttctttcactctgtcatctttcttttctttgagtctgtttttttatagtttgtattttaattatgggaataattgctttttcacagtcactgatgtacaatta

SEQ ID NO: 1022 - DNA, 2560 bp, Homo sapiens
  source 1..2560: mol_type = genomic DNA
cttccgccagccagatccgtcctcccctctcgcaggccagacctcgacgtgtctctcgcccgggcccgtttcccgaaaccgtcgctcgtaccagtccataaggctgaagtagtctcgagtggggtcaggtgcctgcagcgctcggcactgtgggcagaagaacctgtcctcccgcccggggccccatgggccgccgcagttccaacagcggggataattgcttcccgcctgcgacgcagcatcgcagcttagcggtctccttctgggaacccctgtcggccaaaacccccacacccggagcaaagccccggctctcccccgccacatctggccggcggcctatctagccgtggtcactcgtggggaaaagcaaagagagcgtctaaccagactaatgttgctgattggctggggagtcgagggggcgggatcacccgaggggaacccgggttctaagttccgctctcccttctaaactacaactcccaggaggcattgaggcggcgcctgacggccacatctgctgctcctcattggtccggcggcaggggagggggttttgattggctgagggtggagtttgtatctgcaggtttagcgccactctgctggctgaggctgcggagagtgtgcggctccaggtgggctcacgcggtcgtgatgtctcgggagtcggatgttgaggctcagcagtctcatggcagcagtgcctgttcacagccccatggcagcgttacccagtcccaaggctcctcctcacagtcccagggcatatccagctcctctaccagcacgatgccaaactccagccagtcctctcactccagctctgggacactgagctccttagagacagtgtccactcaggaactctattctattcctgaggaccaagaacctgaggaccaagaacctgaggagcctacccctgccccctgggctcgattatgggcccttcaggatggatttgccaatcttgaatgtgtgaatgacaactactggtttgggagggacaaaagctgtgaatattgctttgatgaaccactgctgaaaagaacagataaataccgaacatacagcaagaaacactttcggattttcagggaagtgggtcctaaaaactcttacattgcatacatagaagatcacagtggcaatggaacctttgtaaatacagagcttgtagggaaaggaaaacgccgtcctttgaataacaattctgaaattgcactgtcactaagcagaaataaagagaaaatacttaaaatctactctctcagctgattttcaaaaatacggcggggcgcggtggctcacgtctttaatcccagcactttgggaggccgaggctggcagatcacctgagtttttgtcttttttgatctgactgtagatgatcagtcagtttatcctaaggcattaagagatgaatacatcatgtcaaaaactcttggaagtggtgcctgtggagaggtaaagctggctttcgagaggaaaacatgtaagaaagtagccataaagatcatcagcaaaaggaagtttgctattggttcagcaagagaggcagacccagctctcaatgttgaaacagaaatagaaattttgaaaaagctaaatcatccttgcatcatcaagattaaaaacttttttgatgcagaagattattatattgttttggaattgatggaagggggagagctgtttgacaaagtggtggggaataaacgcctgaaagaagctacctgcaagctctatttttaccagatgctcttggctgtgcagtaccttcatgaaaacggtattatacaccgtgacttaaagccagagaatgttttactgtcatctcaagaagaggactgtcttataaagattactgattttgggcactccaagattttgggagagacctctctcatgagaaccttatgtggaacccccacctacttggcgcctgaagttcttgtttctgttgggactgctgggtataaccgtgctgtggactgctggagtttaggagttattctttttatctgccttagtgggtatccacctttctctgagcataggactcaagtgtcactgaaggatcagatcaccagtggaaaatacaacttcattcctgaagtctgggcagaagtctcagagaaagctctggaccttgtcaagaagttgttggtagtggatccaaaggcacgttttacgacagaagaagccttaagacacccgtggcttcaggatgaagacatgaagagaaagtttcaagatcttctgtctgaggaaaatgaatccacagctctaccccaggttctagcccagccttctactagtcgaaagcggccccgtgaaggggaagccgagggtgccgagaccacaaagcgcccagctgtgtgtgctgctgtgttgtgaactccgtggtttgaacacgaaagaaatgtaccttctttcactctgtcatctttcttttctttgagtctgtttttttatagtttgtattttaattatgggaataattgctttttcacagtcactgatgtacaattaaaaacctgatggaacctgg

SEQ ID NO: 1023 - DNA, 2560 bp, Homo sapiens; identical to SEQ ID NO: 1022
  source 1..2560: mol_type = genomic DNA

SEQ ID NO: 1024 - DNA, 795 bp, Homo sapiens
  source 1..795: mol_type = genomic DNA
agagaggctgagaccaacccagaaaccaccacctctcacgccaaagctcacaccttcagcctccaacatgaaggtctccgcagcacttctgtggctgctgctcatagcagctgccttcagcccccaggggctcgctgggccagcttctgtcccaaccacctgctgctttaacctggccaataggaagataccccttcagcgactagagagctacaggagaatcaccagtggcaaatgtccccagaaagctgtgatcttcaagaccaaactggccaaggatatctgtgccgaccccaagaagaagtgggtgcaggattccatgaagtatctggaccaaaaatctccaactccaaagccataaataatcaccatttttgaaaccaaaccagagcctgagtgttgcctaatttgttttcccttcttacaatgcattctgaggtaacctcattatcagtccaaagggcatgggttttattatatatatatatttttttttttaaaaaaaaaacgtattgcatttaatttattgaggctttaaaacttatcctccatgaatatcagttatttttaaactgtaaagctttgtgcagattctttaccccctgggagccccaattcgatcccctgtcacgtgtgggcaatgttccccctctcctctcttcctccctggaatcttgtaaaggtcctggcaaagatgatcagtatgaaaatgtcattgttcttgtgaacccaaagtgtgactcattaaatggaagtaaatgttgttttaggaatacataaagtatgtgcatattt

SEQ ID NO: 1025 - DNA, 732 bp, Homo sapiens
  source 1..732: mol_type = genomic DNA
agactaacccagaaacatccaattctcaaactgaagctcgcactctcgcctccagcatgaaagtctctgccgcccttctgtgcctgctgctcatagcagccaccttcattccccaagggctcgctcagccagatgcaatcaatgccccagtcacctgctgttataacttcaccaataggaagatctcagtgcagaggctcgcgagctatagaagaatcaccagcagcaagtgtcccaaagaagctgtgatcttcaagaccattgtggccaaggagatctgtgctgaccccaagcagaagtgggttcaggattccatggaccacctggacaagcaaacccaaactccgaagacttgaacactcactccacaacccaagaatctgcagctaacttattttcccctagctttccccagacaccctgttttattttattataatgaattttgtttgttgatgtgaaacattatgccttaagtaatgttaattcttatttaagttattgatgttttaagtttatctttcatggtactagtgttttttagatacagagacttggggaaattgcttttcctcttgaaccacagttctacccctgggatgttttgagggtctttgcaagaatcattaatacaaagaattttttttaacattccaatgcattgctaaaatattattgtggaaatgaatattttgtaactattacaccaaataaatatatttttgtacaaaa

SEQ ID NO: 1026 - DNA, 778 bp, Homo sapiens
  source 1..778: mol_type = genomic DNA
aaggacacgggcagcagacagtggtcagtcctttcttggctctgctgacactcgagcccacattccgtcacctgctcagaatcatgcaggtctccactgctgcccttgctgtcctcctctgcaccatggctctctgcaaccagttctctgcatcacttgctgctgacacgccgaccgcctgctgcttcagctacacctcccggcagattccacagaatttcatagctgactactttgagacgagcagccagtgctccaagcccggtgtcatcttcctaaccaagcgaagccggcaggtctgtgctgaccccagtgaggagtgggtccagaaatatgtcagcgacctggagctgagtgcctgaggggtccagaagcttcgaggcccagcgacctcggtgggcccagtggggaggagcaggagcctgagccttgggaacatgcgtgtgacctccacagctacctcttctatggactggttgttgccaaacagccacactgtgggactcttcttaacttaaattttaatttatttatactatttagtttttgtaatttattttcgatttcacagtgtgtttgtgattgtttgctctgagagttcccctgtcccctcccccttccctcacaccgcgtctggtgacaaccgagtggctgtcatcagcctgtgtaggcagtcatggcaccaaagccaccagactgacaaatgtgtatcggatgcttttgttcagggctgtgatcggcctggggaaataataaagatgctcttttaaaaggtaaa

SEQ ID NO: 1027 - DNA, 1352 bp, Homo sapiens
  source 1..1352: mol_type = genomic DNA
atttcagttttcttttccgttttgtgcaatttcacttatgataccggccaatgcttggttgctattttggaaactccccttaggggatgcccctcaactggccctataaagggccagcctgagctgcagaggattcctgcagaggatcaagacagcacgtggacctcgcacagcctctcccacaggtaccatgaaggtctccgcggcagccctcgctgtcatcctcattgctactgccctctgcgctcctgcatctgcctccccatattcctcggacaccacaccctgctgctttgcctacattgcccgcccactgccccgtgcccacatcaaggagtatttctacaccagtggcaagtgctccaacccagcagtcgtctttgtcacccgaaagaaccgccaagtgtgtgccaacccagagaagaaatgggttcgggagtacatcaactctttggagatgagctaggatggagagtccttgaacctgaacttacacaaatttgcctgtttctgcttgctcttgtcctagcttgggaggcttcccctcactatcctaccccacccgctccttgaagggcccagattctaccacacagcagcagttacaaaaaccttccccaggctggacgtggtggctcacgcctgtaatcccagcactttgggaggccaaggtgggtggatcacttgaggtcaggagttcgagaccagcctggccaacatgatgaaaccccatctctactaaaaatacaaaaaattagccgggcgtggtagcgggcgcctgtagtcccagctactcgggaggctgaggcaggagaatggcgtgaacccgggaggcggagcttgcagtgagccgagatcgcgccactgcactccagcctgggcgacagagcgagactccgtctcaaaaaaaaaaaaaaaaaaaaaaatacaaaaattagccgggcgtggtggcccacgcctgtaatcccagctactcgggaggctaaggcaggaaaattgtttgaacccaggaggtggaggctgcagtgagctgagattgtgccacttcactccagcctgggtgacaaagtgagactccgtcacaacaacaacaacaaaaagcttccccaactaaagcctagaagagcttctgaggcgctgctttgtcaaaaggaagtctctaggttctgagctctggctttgccttggctttgccagggctctgtgaccaggaaggaagtcagcatgcctctagaggcaaggaggggaggaacactgcactcttaagcttccgccgtctcaacccctcacaggagcttactggcaaacatgaaaaatcggcttaccattaaagttctcaatgcaaccataaa

SEQ ID NO: 1028 - DNA, 1244 bp, Homo sapiens
  source 1..1244: mol_type = genomic DNA
tggatgagggaaaggaggtaagatctgtaatgaataagcaggaactttgaagactcagtgactcacctctcccacaggtaccatgaaggtctccgcggcagccctcgctgtcatcctcattgctactgccctctgcgctcctgcatctgcctccccatattcctcggacaccacaccctgctgctttgcctacattgcccgcccactgccccgtgcccacatcaaggagtatttctacaccagtggcaagtgctccaacccagcagtcgtctttgtcacccgaaagaaccgccaagtgtgtgccaacccagagaagaaatgggttcgggagtacatcaactctttggagatgagctaggatggagagtccttgaacctgaacttacacaaatttgcctgtttctgcttgctcttgtcctagcttgggaggcttcccctcactatcctaccccacccgctccttgaagggcccagattctaccacacagcagcagttacaaaaaccttccccaggctggacgtggtggctcacgcctgtaatcccagcactttgggaggccaaggtgggtggatcacttgaggtcaggagttcgagaccagcctggccaacatgatgaaaccccatctctactaaaaatacaaaaaattagccgggcgtggtagcgggcgcctgtagtcccagctactcgggaggctgaggcaggagaatggcgtgaacccgggaggcggagcttgcagtgagccgagatcgcgccactgcactccagcctgggcgacagagcgagactccgtctcaaaaaaaaaaaaaaaaaaaaaaatacaaaaattagccgggcgtggtggcccacgcctgtaatcccagctactcgggaggctaaggcaggaaaattgtttgaacccaggaggtggaggctgcagtgagctgagattgtgccacttcactccagcctgggtgacaaagtgagactccgtcacaacaacaacaacaaaaagcttccccaactaaagcctagaagagcttctgaggcgctgctttgtcaaaaggaagtctctaggttctgagctctggctttgccttggctttgccagggctctgtgaccaggaaggaagtcagcatgcctctagaggcaaggaggggaggaacactgcactcttaagcttccgccgtctcaacccctcacaggagcttactggcaaacatgaaaaatcggcttaccattaaagttctcaatgcaaccataaa

SEQ ID NO: 1029 - DNA, 804 bp, Homo sapiens
  source 1..804: mol_type = genomic DNA
agcagaggggctgagaccaaaccagaaacctccaattctcatgtggaagcccatgccctcaccctccaacatgaaagcctctgcagcacttctgtgtctgctgctcacagcagctgctttcagcccccaggggcttgctcagccagttgggattaatacttcaactacctgctgctacagatttatcaataagaaaatccctaagcagaggctggagagctacagaaggaccaccagtagccactgtccccgggaagctgtaatcttcaagaccaaactggacaaggagatctgtgctgaccccacacagaagtgggtccaggactttatgaagcacctggacaagaaaacccaaactccaaagctttgaacattcatgactgaactgaaaacaagccatgacttgagaaacaaataatttgtataccctgtcctttctcagagtggttctgagattattttaatctaattctaaggaatatgagctttatgtaataatgtgaatcatggtttttcttagtagattttaaaagttattaatattttaatttaatcttccatggattttggtgggttttgaacataaagccttggatgtatatgtcatctcagtgctgtaaaaactgtgggatgctcctcccttctctacctcatgggggtattgtataagtccttgcaagaatcagtgcaaagatttgctttaattgttaagatatgatgtccctatggaagcatattgttattatataattacatatttgcatatgtatgactcccaaattttcacataaaatagatttttgt

SEQ ID NO: 1030 - DNA, 810 bp, Homo sapiens
  source 1..810: mol_type = genomic DNA
agcagaggggctgagaccaaaccagaaacctccaattctcatgtggaagcccatgccctcaccctccaacatgaaagcctctgcagcacttctgtgtctgctgctcacagcagctgctttcagcccccaggggcttgctcagccagttgggattaatacttcaactacctgctgctacagatttatcaataagaaaatccctaagcagaggctggagagctacagaaggaccaccagtagccactgtccccgggaagctgtaatcttcaagaccaaactggacaaggagatctgtgctgaccccacacagaagtgggtccaggactttatgaagcacctggacaagaaaacccaaactccaaagctttgaacattcatgactgaactgaaaacaagccatgacttgagaaacaaataatttgtataccctgtcctttctcagagtggttctgagattattttaatctaattctaaggaatatgagctttatgtaataatgtgaatcatggtttttcttagtagattttaaaagttattaatattttaatttaatcttccatggattttggtgggttttgaacataaagccttggatgtatatgtcatctcagtgctgtaaaaactgtgggatgctcctcccttctctacctcatgggggtattgtataagtccttgcaagaatcagtgcaaagatttgctttaattgttaagatatgatgtccctatggaagcatattgttattatataattacatatttgcatatgtatgactcccaaattttcacataaaatagatttttgtataaca

SEQ ID NO: 1031 - DNA, 696 bp, Homo sapiens
  source 1..696: mol_type = genomic DNA
agaggggctgagaccaaaccagaaacctccaattctcatgtggaagcccatgccctcaccctccaacatgaaagcctctgcagcacttctgtgtctgctgctcacagcagctgctttcagcccccaggggcttgctcagccagaaagacccaggacacaccctcaatggacttttcttcttgttgtttcattgcagttgggattaatacttcaactacctgctgctacagatttatcaataagaaaatccctaagcagaggctggagagctacagaaggaccaccagtagccactgtccccgggaagctgtaatcttcaagaccaaactggacaaggagatctgtgctgaccccacacagaagtgggtccaggactttatgaagcacctggacaagaaaacccaaactccaaagctttgaacattcatgactgaactgaaaacaagccatgacttgagaaacaaataatttgtataccctgtcctttctcagagtggttctgagattattttaatctaattctaaggaatatgagctttatgtaataatgtgaatcatggtttttcttagtagattttaaaagttattaatattttaatttaatcttccatggattttggtgggttttgaacataaagccttggatgtatatgtcatctcagtgctgtaaaaactgtgggatgctcctcccttctc

SEQ ID NO: 1032 - DNA, 687 bp, Homo sapiens
  source 1..687: mol_type = genomic DNA
agaggggctgagaccaaaccagaaacctccaattctcatgtggaagcccatgccctcaccctccaacatgaaagcctctgcagcacttctgtgtctgctgctcacagcagctgctttcagcccccaggggcttgctcagccagcttcaagaccaaactggacaaggagatctgtgctgaccccacacagaagtgggtccaggactttatgaagcacctggacaagaaaacccaaactccaaagctttgaacattcatgactgaactgaaaacaagccatgacttgagaaacaaataatttgtataccctgtcctttctcagagtggttctgagattattttaatctaattctaaggaatatgagctttatgtaataatgtgaatcatggtttttcttagtagattttaaaagttattaatattttaatttaatcttccatggattttggtgggttttgaacataaagccttggatgtatatgtcatctcagtgctgtaaaaactgtgggatgctcctcccttctctacctcatgggggtattgtataagtccttgcaagaatcagtgcaaagatttgctttaattgttaagatatgatgtccctatggaagcatattgttattatataattacatatttgcatatgtatgactcccaaattttcacataaaatagatttttgtataa

SEQ ID NO: 1033 - DNA, 1173 bp, Homo sapiens
  source 1..1173: mol_type = genomic DNA
gagacattcctcaattgcttagacatattctgagcctacagcagaggaacctccagtctcagcaccatgaatcaaactgccattctgatttgctgccttatctttctgactctaagtggcattcaaggagtacctctctctagaactgtacgctgtacctgcatcagcattagtaatcaacctgttaatccaaggtctttagaaaaacttgaaattattcctgcaagccaattttgtccacgtgttgagatcattgctacaatgaaaaagaagggtgagaagagatgtctgaatccagaatcgaaggccatcaagaatttactgaaagcagttagcaaggaaaggtctaaaagatctccttaaaaccagaggggagcaaaatcgatgcagtgcttccaaggatggaccacacagaggctgcctctcccatcacttccctacatggagtatatgtcaagccataattgttcttagtttgcagttacactaaaaggtgaccaatgatggtcaccaaatcagctgctactactcctgtaggaaggttaatgttcatcatcctaagctattcagtaataactctaccctggcactataatgtaagctctactgaggtgctatgttcttagtggatgttctgaccctgcttcaaatatttccctcacctttcccatcttccaagggtactaaggaatctttctgctttggggtttatcagaattctcagaatctcaaataactaaaaggtatgcaatcaaatctgctttttaaagaatgctctttacttcatggacttccactgccatcctcccaaggggcccaaattctttcagtggctacctacatacaattccaaacacatacaggaaggtagaaatatctgaaaatgtatgtgtaagtattcttatttaatgaaagactgtacaaagtagaagtcttagatgtatatatttcctatattgttttcagtgtacatggaataacatgtaattaagtactatgtatcaatgagtaacaggaaaattttaaaaatacagatagatatatgctctgcatgttacataagataaatgtgctgaatggttttcaaaataaaaatgaggtactctcctggaaatattaagaaagactatctaaatgttgaaagatcaaaaggttaataaagtaattataact

SEQ ID NO: 1034 - DNA, 1857 bp, Homo sapiens
  source 1..1857: mol_type = genomic DNA
actttcactctccgtcagccgcattgcccgctcggcgtccggcccccgacccgcgctcgtccgcccgcccgcccgcccgcccgcgccatgaacgccaaggtcgtggtcgtgctggtcctcgtgctgaccgcgctctgcctcagcgacgggaagcccgtcagcctgagctacagatgcccatgccgattcttcgaaagccatgttgccagagccaacgtcaagcatctcaaaattctcaacactccaaactgtgcccttcagattgtagcccggctgaagaacaacaacagacaagtgtgcattgacccgaagctaaagtggattcaggagtacctggagaaagctttaaacaagtaagcacaacagccaaaaaggactttccgctagacccactcgaggaaaactaaaaccttgtgagagatgaaagggcaaagacgtgggggagggggccttaaccatgaggaccaggtgtgtgtgtggggtgggcacattgatctgggatcgggcctgaggtttgccagcatttagaccctgcatttatagcatacggtatgatattgcagcttatattcatccatgccctgtacctgtgcacgttggaacttttattactggggtttttctaagaaagaaattgtattatcaacagcattttcaagcagttagttccttcatgatcatcacaatcatcatcattctcattctcattttttaaatcaacgagtacttcaagatctgaatttggcttgtttggagcatctcctctgctcccctggggagtctgggcacagtcaggtggtggcttaacagggagctggaaaaagtgtcctttcttcagacactgaggctcccgcagcagcgcccctcccaagaggaaggcctctgtggcactcagataccgactggggctgggcgccgccactgccttcacctcctctttcaacctcagtgattggctctgtgggctccatgtagaagccactattactgggactgtgctcagagacccctctcccagctattcctactctctccccgactccgagagcatgcttaatcttgcttctgcttctcatttctgtagcctgatcagcgccgcaccagccgggaagagggtgattgctggggctcgtgccctgcatccctctcctcccagggcctgccccacagctcgggccctctgtgagatccgtctttggcctcctccagaatggagctggccctctcctggggatgtgtaatggtccccctgcttacccgcaaaagacaagtctttacagaatcaaatgcaattttaaatctgagagctcgctttgagtgactgggttttgtgattgcctctgaagcctatgtatgccatggaggcactaacaaactctgaggtttccgaaatcagaagcgaaaaaatcagtgaataaaccatcatcttgccactaccccctcctgaagccacagcagggtttcaggttccaatcagaactgttggcaaggtgacatttccatgcataaatgcgatccacagaaggtcctggtggtatttgtaactttttgcaaggcatttttttatatatatttttgtgcacatttttttttacgtttctttagaaaacaaatgtatttcaaaatatatttatagtcgaacaattcatatatttgaagtggagccatatgaatgtcagtagtttatacttctctattatctcaaactactggcaatttgtaaagaaatatatatgatatataaatgtgattgcagcttttcaatgttagccacagtgtattttttcacttgtactaaaattgtatcaaatgtgacattatatgcactagcaataaaatgctaattgtttcatggta

SEQ ID NO: 1035 - DNA, 470 bp, Homo sapiens
  source 1..470: mol_type = genomic DNA
cccgcgctcgtccgcccgcccgcccgcccgcccgcgccatgaacgccaaggtcgtggtcgtgctggtcctcgtgctgaccgcgctctgcctcagcgacgggaagcccgtcagcctgagctacagatgcccatgccgattcttcgaaagccatgttgccagagccaacgtcaagcatctcaaaattctcaacactccaaactgtgcccttcagattgtagcccggctgaagaacaacaacagacaagtgtgcattgacccgaagctaaagtggattcaggagtacctggagaaagctttaaacaaggggcgcagagaagaaaaagtggggaaaaaagaaaagataggaaaaaagaagcgacagaagaagagaaaggctgcccagaaaaggaaaaactagttatctgccacctcgagatggaccacagttcacttgctctcggcgctttgtaaatttgctcgatcctcctcc

SEQ ID NO: 1036 - DNA, 3532 bp, Homo sapiens
  source 1..3532: mol_type = genomic DNA
actttcactctccgtcagccgcattgcccgctcggcgtccggcccccgacccgcgctcgtccgcccgcccgcccgcccgcccgcgccatgaacgccaaggtcgtggtcgtgctggtcctcgtgctgaccgcgctctgcctcagcgacgggaagcccgtcagcctgagctacagatgcccatgccgattcttcgaaagccatgttgccagagccaacgtcaagcatctcaaaattctcaacactccaaactgtgcccttcagattgtagcccggctgaagaacaacaacagacaagtgtgcattgacccgaagctaaagtggattcaggagtacctggagaaagctttaaacaagaggttcaagatgtgagagggtcagacgcctgaggaacccttacagtaggagcccagctctgaaaccagtgttagggaagggcctgccacagcctcccctgccagggcagggccccaggcattgccaagggctttgttttgcacactttgccatattttcaccatttgattatgtagcaaaatacatgacatttatttttcatttagtttgattattcagtgtcactggcgacacgtagcagcttagactaaggccattattgtacttgccttattagagtgtctttccacggagccactcctctgactcagggctcctgggttttgtattctctgagctgtgcaggtggggagactgggctgagggagcctggccccatggtcagccctagggtggagagccaccaagagggacgcctgggggtgccaggaccagtcaacctgggcaaagcctagtgaaggcttctctctgtgggatgggatggtggagggccacatgggaggctcacccccttctccatccacatgggagccgggtctgcctcttctgggagggcagcagggctaccctgagctgaggcagcagtgtgaggccagggcagagtgagacccagccctcatcccgagcacctccacatcctccacgttctgctcatcattctctgtctcatccatcatcatgtgtgtccacgactgtctccatggccctgcaaaaggactctcaggaccaaagctttcatgtaaactgtgcaccaagcaggaaatgaaaatgtcttgtgttacctgaaaacactgtgcacatctgtgtcttgtttggaatattgtccattgtccaatcctatgtttttgttcaaagccagcgtcctcctctgtgaccaatgtcttgatgcatgcactgttccccctgtgcagccgctgagcgaggagatgctccttgggccctttgagtgcagtcctgatcagagccgtggtcctttggggtgaactaccttggttcccccactgatcacaaaaacatggtgggtccatgggcagagcccaagggaattcggtgtgcaccagggttgaccccagaggattgctgccccatcagtgctccctcacatgtcagtaccttcaaactagggccaagcccagcactgcttgaggaaaacaagcattcacaacttgtttttggtttttaaaacccagtccacaaaataaccaatcctggacatgaagattctttcccaattcacatctaacctcatcttcttcaccatttggcaatgccatcatctcctgccttcctcctgggccctctctgctctgcgtgtcacctgtgcttcgggcccttcccacaggacatttctctaagagaacaatgtgctatgtgaagagtaagtcaacctgcctgacatttggagtgttccccttccactgagggcagtcgatagagctgtattaagccacttaaaatgttcacttttgacaaaggcaagcacttgtgggtttttgttttgtttttcattcagtcttacgaatacttttgccctttgattaaagactccagttaaaaaaaattttaatgaagaaagtggaaaacaaggaagtcaaagcaaggaaactatgtaacatgtaggaagtaggaagtaaattatagtgatgtaatcttgaattgtaactgttcttgaatttaataatctgtagggtaattagtaacatgtgttaagtattttcataagtatttcaaattggagcttcatggcagaaggcaaacccatcaacaaaaattgtcccttaaacaaaaattaaaatcctcaatccagctatgttatattgaaaaaatagagcctgagggatctttactagttataaagatacagaactctttcaaaaccttttgaaattaacctctcactataccagtataattgagttttcagtggggcagtcattatccaggtaatccaagatattttaaaatctgtcacgtagaacttggatgtacctgcccccaatccatgaaccaagaccattgaattcttggttgaggaaacaaacatgaccctaaatcttgactacagtcaggaaaggaatcatttctatttctcctccatgggagaaaatagataagagtagaaactgcagggaaaattatttgcataacaattcctctactaacaatcagctccttcctggagactgcccagctaaagcaatatgcatttaaatacagtcttccatttgcaagggaaaagtctcttgtaatccgaatctctttttgctttcgaactgctagtcaagtgcgtccacgagctgtttactagggatccctcatctgtccctccgggacctggtgctgcctctacctgacactcccttgggctccctgtaacctcttcagaggccctcgctgccagctctgtatcaggacccagaggaaggggccagaggctcgttgactggctgtgtgttgggattgagtctgtgccacgtgtttgtgctgtggtgtgtccccctctgtccaggcactgagataccagcgaggaggctccagagggcactctgcttgttattagagattacctcctgagaaaaaaggttccgcttggagcagaggggctgaatagcagaaggttgcacctcccccaaccttagatgttctaagtctttccattggatctcattggacccttccatggtgtgatcgtctgactggtgttatcaccgtgggctccctgactgggagttgatcgcctttcccaggtgctacacccttttccagctggatgagaatttgagtgctctgatccctctacagagcttccctgactcattctgaaggagccccattcctgggaaatattccctagaaacttccaaatcccctaagcagaccactgataaaaccatgtagaaaatttgttattttgcaacctcgctggactctcagtctctgagcagtgaatgattcagtgttaaatgtgatgaatactgtattttgtattgtttcaattgcatctcccagataatgtgaaaatggtccaggagaaggccaattcctatacgcagcgtgctttaaaaaataaataagaaacaactctttgagaaacaacaatttctactttgaagtcataccaatgaaaaaatgtatatgcacttataattttcctaataaagttctgtactcaaatgta

SEQ ID NO: 1037 - DNA, 1052 bp, Homo sapiens
  source 1..1052: mol_type = genomic DNA
ccccgacccgcgctcgtccgcccgcccgcccgcccgcccgcgccatgaacgccaaggtcgtggtcgtgctggtcctcgtgctgaccgcgctctgcctcagcgacgggaagcccgtcagcctgagctacagatgcccatgccgattcttcgaaagccatgttgccagagccaacgtcaagcatctcaaaattctcaacactccaaactgtgcccttcagattgtagcccggctgaagaacaacaacagacaagtgtgcattgacccgaagctaaagtggattcaggagtacctggagaaagctttaaacaacctgatcagcgccgcaccagccgggaagagggtgattgctggggctcgtgccctgcatccctctcctcccagggcctgccccacagctcgggccctctgtgagatccgtctttggcctcctccagaatggagctggccctctcctggggatgtgtaatggtccccctgcttacccgcaaaagacaagtctttacagaatcaaatgcaattttaaatctgagagctcgctttgagtgactgggttttgtgattgcctctgaagcctatgtatgccatggaggcactaacaaactctgaggtttccgaaatcagaagcgaaaaaatcagtgaataaaccatcatcttgccactaccccctcctgaagccacagcagggtttcaggttccaatcagaactgttggcaaggtgacatttccatgcataaatgcgatccacagaaggtcctggtggtatttgtaactttttgcaaggcatttttttatatatatttttgtgcacatttttttttacgtttctttagaaaacaaatgtatttcaaaatatatttatagtcgaacaattcatatatttgaagtggagccatatgaatgtcagtagtttatacttctctattatctcaaactactggcaatttgtaaagaaatatatatgatatataaatgtgattgcagcttttcaatgttagccacagtgtattttttcacttgtactaaaattgtatcaaatgtgacattatatgca

SEQ ID NO: 1038 - DNA, 618 bp, Homo sapiens
  source 1..618: mol_type = genomic DNA
ccccgacccgcgctcgtccgcccgcccgcccgcccgcccgcgccatgaacgccaaggtcgtggtcgtgctggtcctcgtgctgaccgcgctctgcctcagcgacgggaagcccgtcagcctgagctacagatgcccatgccgattcttcgaaagccatgttgccagagccaacgtcaagcatctcaaaattctcaacactccaaactgtgcccttcagattgtagcccggctgaagaacaacaacagacaagtgtgcattgacccgaagctaaagtggattcaggagtacctggagaaagctttaaacaattgctagaatatggctgtacggcaatgctgagacatcacgctgagcgagagtggacatcctcattttattcctacccttaccgtggatctctcctgtgcttcaccactcagtataatgctggctgagctcttctgacaaataccttccaagatgtgaggaaaacacacgtaggtgcagttgttgaattgtatgatctgccactgaagtaattagtgtgataattacttggattttctcctttaacaaattattgttataaattatattaatatatgtcatgctaataaattatttccatattcctagg

SEQ ID NO: 1039 - DNA, 1203 bp, Homo sapiens
  source 1..1203: mol_type = genomic DNA
gagaagatgtttgaaaaaactgactctgctaatgagcctggactcagagctcaagtctgaactctacctccagacagaatgaagttcatctcgacatctctgcttctcatgctgctggtcagcagcctctctccagtccaaggtgttctggaggtctattacacaagcttgaggtgtagatgtgtccaagagagctcagtctttatccctagacgcttcattgatcgaattcaaatcttgccccgtgggaatggttgtccaagaaaagaaatcatagtctggaagaagaacaagtcaattgtgtgtgtggaccctcaagctgaatggatacaaagaatgatggaagtattgagaaaaagaagttcttcaactctaccagttccagtgtttaagagaaagattccctgatgctgatatttccactaagaacacctgcattcttcccttatccctgctctggattttagttttgtgcttagttaaatcttttccaggaaaaagaacttccccatacaaataagcatgagactatgtaaaaataaccttgcagaagctgatggggcaaactcaagcttcttcactcacagcaccctatatacacttggagtttgcattcttattcatcagggaggaaagtttctttgaaaatagttattcagttataagtaatacaggattattttgattatatacttgttgtttaatgtttaaaatttcttagaaaacaatggaatgagaatttaagcctcaaatttgaacatgtggcttgaattaagaagaaaattatggcatatattaaaagcaggcttctatgaaagactcaaaaagctgcctgggaggcagatggaacttgagcctgtcaagaggcaaaggaatccatgtagtagatatcctctgcttaaaaactcactacggaggagaattaagtcctacttttaaagaatttctttataaaatttactgtctaagattaatagcattcgaagatccccagacttcatagaatactcagggaaagcatttaaagggtgatgtacacatgtatcctttcacacatttgccttgacaaacttctttcactcacatctttttcactgactttttttgtggggggcggggccggggggactctggtatctaattctttaatgattcctataaatctaatgacattcaataaagttgagcaaacattttacttaa

SEQ ID NO: 1040 - DNA, 1718 bp, Homo sapiens
  source 1..1718: mol_type = genomic DNA
aggcagctcctcccagccacccaccccaccaattcccatcctcccgcccccctccaccaaccccttctttccacactgccccctgagttcagggaatttccccagcatcccaaagcttgagtttcctgccagtcgggagggatgaatgcagataaagggagtgcagaaggcacgaggaaaccaaagtgctctgtatcctccagtctccgcgcctccacccagctcaggaacccgcgaaccctctcttgaccactatgagcctcccgtccagccgcgcggcccgtgtcccgggtccttcgggctccttgtgcgcgctgctcgcgctgctgctcctgctgacgccgccggggcccctcgccagcgctggtcctgtctctgctgtgctgacagagctgcgttgcacttgtttacgcgttacgctgagagtaaaccccaaaacgattggtaaactgcaggtgttccccgcaggcccgcagtgctccaaggtggaagtggtagcctccctgaagaacgggaagcaagtttgtctggacccggaagccccttttctaaagaaagtcatccagaaaattttggacagtggaaacaagaaaaactgagtaacaaaaaagaccatgcatcataaaattgcccagtcttcagcggagcagttttctggagatccctggacccagtaagaataagaaggaagggttggtttttttccattttctacatggattccctactttgaagagtgtgggggaaagcctacgcttctccctgaagtttacagctcagctaatgaagtactaatatagtatttccactatttactgttattttacctgataagttattgaaccctttggcaattgaccatattgtgagcaaagaatcactggttattagtctttcaatgaatattgaattgaagataactattgtatttctatcatacattccttaaagtcttaccgaaaaggctgtggatttcgtatggaaataatgttttattagtgtgctgttgagggaggtatcctgttgttcttactcactcttctcataaaataggaaatattttagttctgtttcttggggaatatgttactctttaccctaggatgctatttaagttgtactgtattagaacactgggtgtgtcataccgttatctgtgcagaatatatttccttattcagaatttctaaaaatttaagttctgtaagggctaatatattctcttcctatggttttagacgtttgatgtcttcttagtatggcataatgtcatgatttactcattaaactttgattttgtatgctattttttcactataggatgactataattctggtcactaaatatacactttagatagatgaagaagcccaaaaacagataaattcctgattgctaatttacatagaaatgtattctcttggttttttaaataaaagcaaaattaacaatgatctgtgctctgaaagttttgaaaatatatttgaacaatttgaatataaattcatcatttagtcctcaaaatatatatagcattgctaagattttcagatatctattgtggatcttttaaaggttttgaccattttgttatgaggaattatacatgtatcacattcactatattaaaattgcacttttattttttcctgtgtgtcatgttggtttttggtacttgtattgtcatttggagaaacaataaaagatttctaaacca

SEQ ID NO: 1041 - DNA, 2740 bp, Homo sapiens
  source 1..2740: mol_type = genomic DNA
atccaatacaggagtgacttggaactccattctatcactatgaagaaaagtggtgttcttttcctcttgggcatcatcttgctggttctgattggagtgcaaggaaccccagtagtgagaaagggtcgctgttcctgcatcagcaccaaccaagggactatccacctacaatccttgaaagaccttaaacaatttgccccaagcccttcctgcgagaaaattgaaatcattgctacactgaagaatggagttcaaacatgtctaaacccagattcagcagatgtgaaggaactgattaaaaagtgggagaaacaggtcagccaaaagaaaaagcaaaagaatgggaaaaaacatcaaaaaaagaaagttctgaaagttcgaaaatctcaacgttctcgtcaaaagaagactacataagagaccacttcaccaataagtattctgtgttaaaaatgttctattttaattataccgctatcattccaaaggaggatggcatataatacaaaggcttattaatttgactagaaaatttaaaacattactctgaaattgtaactaaagttagaaagttgattttaagaatccaaacgttaagaattgttaaaggctatgattgtctttgttcttctaccacccaccagttgaatttcatcatgcttaaggccatgattttagcaatacccatgtctacacagatgttcacccaaccacatcccactcacaacagctgcctggaagagcagccctaggcttccacgtactgcagcctccagagagtatctgaggcacatgtcagcaagtcctaagcctgttagcatgctggtgagccaagcagtttgaaattgagctggacctcaccaagctgctgtggccatcaacctctgtatttgaatcagcctacaggcctcacacacaatgtgtctgagagattcatgctgattgttattgggtatcaccactggagatcaccagtgtgtggctttcagagcctcctttctggctttggaagccatgtgattccatcttgcccgctcaggctgaccactttatttctttttgttcccctttgcttcattcaagtcagctcttctccatcctaccacaatgcagtgcctttcttctctccagtgcacctgtcatatgctctgatttatctgagtcaactcctttctcatcttgtccccaacaccccacagaagtgctttcttctcccaattcatcctcactcagtccagcttagttcaagtcctgcctcttaaataaacctttttggacacacaaattatcttaaaactcctgtttcacttggttcagtaccacatgggtgaacactcaatggttaactaattcttgggtgtttatcctatctctccaaccagattgtcagctccttgagggcaagagccacagtatatttccctgtttcttccacagtgcctaataatactgtggaactaggttttaataattttttaattgatgttgttatgggcaggatggcaaccagaccattgtctcagagcaggtgctggctctttcctggctactccatgttggctagcctctggtaacctcttacttattatcttcaggacactcactacagggaccagggatgatgcaacatccttgtctttttatgacaggatgtttgctcagcttctccaacaataagaagcacgtggtaaaacacttgcggatattctggactgtttttaaaaaatatacagtttaccgaaaatcatataatcttacaatgaaaaggactttatagatcagccagtgaccaaccttttcccaaccatacaaaaattccttttcccgaaggaaaagggctttctcaataagcctcagctttctaagatctaacaagatagccaccgagatccttatcgaaactcattttaggcaaatatgagttttattgtccgtttacttgtttcagagtttgtattgtgattatcaattaccacaccatctcccatgaagaaagggaacggtgaagtactaagcgctagaggaagcagccaagtcggttagtggaagcatgattggtgcccagttagcctctgcaggatgtggaaacctccttccaggggaggttcagtgaattgtgtaggagaggttgtctgtggccagaatttaaacctatactcactttcccaaattgaatcactgctcacactgctgatgatttagagtgctgtccggtggagatcccacccgaacgtcttatctaatcatgaaactccctagttccttcatgtaacttccctgaaaaatctaagtgtttcataaatttgagagtctgtgacccacttaccttgcatctcacaggtagacagtatataactaacaaccaaagactacatattgtcactgacacacacgttataatcatttatcatatatatacatacatgcatacactctcaaagcaaataatttttcacttcaaaacagtattgacttgtataccttgtaatttgaaatattttctttgttaaaatagaatggtatcaataaatagaccattaatcagaaaacagatcttgattttttttctcttgaatgtacccttcaactgttgaatgtttaatagtaaatcttatatgtccttatttactttttagctttctctcaaataaagtgtaacactagttgagataacacatgaaagctctttaaagggtcgatcgggaacaggaaaaaaaacctatggaaaatatgacaacac

SEQ ID NO: 1042 - DNA, 2879 bp, Homo sapiens
  source 1..2879: mol_type = genomic DNA
aggaagtgcaggttcaaaacattcagagacagaaggtggatagacaaatctccaccttcagactggtaggctcctccagaagccatcagacaggaagatgtgaaaatccccagcactcatcccagaatcactaagtggcacctgtcctgggccaaagtcccaggacagacctcattgttcctctgtgggaatacctccccaggagggcatcctggatttcccccttgcaacccaggtcagaagtttcatcgtcaaggttgtttcatcttttttttcctgtctaacagctctgactaccacccaaccttgaggcacagtgaagacatcggtggccactccaataacagcaggtcacagctgctcttctggaggtgtcctacaggtgaaaagcccagcgacccagtcaggatttaagtttacctcaaaaatggaagattttaacatggagagtgacagctttgaagatttctggaaaggtgaagatcttagtaattacagttacagctctaccctgcccccttttctactagatgccgccccatgtgaaccagaatccctggaaatcaacaagtattttgtggtcattatctatgccctggtattcctgctgagcctgctgggaaactccctcgtgatgctggtcatcttatacagcagggtcggccgctccgtcactgatgtctacctgctgaacctagccttggccgacctactctttgccctgaccttgcccatctgggccgcctccaaggtgaatggctggatttttggcacattcctgtgcaaggtggtctcactcctgaaggaagtcaacttctatagtggcatcctgctactggcctgcatcagtgtggaccgttacctggccattgtccatgccacacgcacactgacccagaagcgctacttggtcaaattcatatgtctcagcatctggggtctgtccttgctcctggccctgcctgtcttacttttccgaaggaccgtctactcatccaatgttagcccagcctgctatgaggacatgggcaacaatacagcaaactggcggatgctgttacggatcctgccccagtcctttggcttcatcgtgccactgctgatcatgctgttctgctacggattcaccctgcgtacgctgtttaaggcccacatggggcagaagcaccgggccatgcgggtcatctttgctgtcgtcctcatcttcctgctctgctggctgccctacaacctggtcctgctggcagacaccctcatgaggacccaggtgatccaggagacctgtgagcgccgcaatcacatcgaccgggctctggatgccaccgagattctgggcatccttcacagctgcctcaaccccctcatctacgccttcattggccagaagtttcgccatggactcctcaagattctagctatacatggcttgatcagcaaggactccctgcccaaagacagcaggccttcctttgttggctcttcttcagggcacacttccactactctctaagacctcctgcctaagtgcagccccgtggggttcctcccttctcttcacagtcacattccaagcctcatgtccactggttcttcttggtctcagtgtcaatgcagcccccattgtggtcacaggaagtagaggaggccacgttcttactagtttcccttgcatggtttagaaagcttgccctggtgcctcaccccttgccataattactatgtcatttgctggagctctgcccatcctgcccctgagcccatggcactctatgttctaagaagtgaaaatctacactccagtgagacagctctgcatactcattaggatggctagtatcaaaagaaagaaaatcaggctggccaacggggtgaaaccctgtctctactaaaaatacaaaaaaaaaaaaaaattagccgggcgtggtggtgagtgcctgtaatcacagctacttgggaggctgagatgggagaatcacttgaacccgggaggcagaggttgcagtgagccgagattgtgcccctgcactccagcctgagcgacagtgagactctgtctcagtccatgaagatgtagaggagaaactggaactctcgagcgttgctgggggggattgtaaaatggtgtgaccactgcagaagacagtatggcagctttcctcaaaacttcagacatagaattaacacatgatcctgcaattccacttataggaattgacccacaagaaatgaaagcagggacttgaacccatatttgtacaccaatattcatagcagcttattcacaagacccaaaaggcagaagcaacccaaatgttcatcaatgaatgaatgaatggctaagcaaaatgtgatatgtacctaacgaagtatccttcagcctgaaagaggaatgaagtactcatacatgttacaacacggacgaaccttgaaaactttatgctaagtgaaataagccagacatcaacagataaatagtttatgattccacctacatgaggtactgagagtgaacaaatttacagagacagaaagcagaacagtgattaccagggactgaggggaggggagcatgggaagtgacggtttaatgggcacagggtttatgtttaggatgttgaaaaagttctgcagataaacagtagtgatagttgtaccgcaatgtgacttaatgccactaaattgacacttaaaaatggtttaaatggtcaattttgttatgtatattttatatcaatttaaaaaaaaacctgagccccaaaaggtattttaatcaccaaggctgattaaaccaaggctagaaccacctgcctatattttttgttaaatgatttcattcaatatcttttttttaataaaccatttttacttgggtgtttata

SEQ ID NO: 1043 - DNA, 585 bp, Homo sapiens
  source 1..585: mol_type = genomic DNA
gcagtgtctttgttgagcagcagaggggagctctgactaccacccaaccttgaggcacagtgaagacatcggtggccactccaataacagcaggtcacagctgctcttctggaggtgtcctacaggtgaaaagcccagcgacccagtcaggatttaagtttacctcaaaaatggaagattttaacatggagagtgacagctttgaagatttctggaaaggtgaagatcttagtaattacagttacagctctaccctgcccccttttctactagatgccgccccatgtgaaccagaatccctggaaatcaacaagtattttgtggtcattatctatgccctggtattcctgctgagcctgctgggaaactccctcgtgatgctggtcatcttatacagcagggtcggccgctccgtcactgatgtctacctgctgaacctagccttggccgacctactctttgccctgaccttgcccatctgggccgcctccaaggtgaatggctggatttttggcacattcctgtgcaaggtggtctcactcctgaaggaagtcaacttctatagtggcatcctgctactggcct

SEQ ID NO: 1044 - DNA, 223 bp, Homo sapiens
  source 1..223: mol_type = genomic DNA
gacctggttctccttgctgagttctctaccttctgtcctgacttgcatgctctccctctggaacctgaagctgacccataatgcctgggagcatgagctcacccatacacctccagcccacccccagcacagctgagcactggattatccacagtcaggatttaagtttacctcaaaaatggaagattttaacatggagagtgacagctttgaagatttctgg

SEQ ID NO: 1045 - DNA, 621 bp, Homo sapiens
  source 1..621: mol_type = genomic DNA
gttctcaccaccacctccctttcataggtcacagctgctcttctggaggtgtcctacaggtgaaaagcccagcgacccagtcaggatttaagtttacctcaaaaatggaagattttaacatggagagtgacagctttgaagatttctggaaaggtgaagatcttagtaattacagttacagctctaccctgcccccttttctactagatgccgccccatgtgaaccagaatccctggaaatcaacaagtattttgtggtcattatctatgccctggtattcctgctgagcctgctgggaaactccctcgtgatgctggtcatcttatacagcagggtcggccgctccgtcactgatgtctacctgctgaacctagccttggccgacctactctttgccctgaccttgcccatctgggccgcctccaaggtgaatggctggatttttggcacattcctgtgcaaggtggtctcactcctgaaggaagtcaacttctatagtggcatcctgctactggcctgcatcagtgtggaccgttacctggccattgtccatgccacacgcacactgacccagaagcgctacttggtcaaattcatatgtctcagcatctggggtctgt

SEQ ID NO: 1046 - DNA, 262 bp, Homo sapiens
  source 1..262: mol_type = genomic DNA
ggggaggtgaggaagtggagagagcagctgtggtggctgaagggtgctaggacagagggagcatgataaagccataactctgactaccacccaaccttgaggcacagtgaagacatcggtggccactccaataacagcaggtcacagctgctcttctggaggtgtcctacaggtgaaaagcccagcgacccagtcaggatttaagtttacctcaaaaatggaagattttaacatggagagtgacagctttgaagatttctgg

SEQ ID NO: 1047 - DNA, 813 bp, Homo sapiens
  source 1..813: mol_type = genomic DNA
taagcagtggtgatagctgagaatatgcagccgttttctccttcctgggtacagtgctattctgcctagagctctgactaccacccaaccttgaggcacagtgaagacatcggtggccactccaataacagcaggtcacagctgctcttctggaggtgtcctacaggtgaaaagcccagcgacccagtcaggatttaagtttacctcaaaaatggaagattttaacatggagagtgacagctttgaagatttctggaaaggtgaagatcttagtaattacagttacagctctaccctgcccccttttctactagatgccgccccatgtgaaccagaatccctggaaatcaacaagtattttgtggtcattatctatgccctggtattcctgctgagcctgctgggaaactccctcgtgatgctggtcatcttatacagcagggtcggccgctccgtcactgatgtctacctgctgaacctagccttggccgacctactctttgccctgaccttgcccatctgggccgcctccaaggtgaatggctggatttttggcacattcctgtgcaaggtggtctcactcctgaaggaagtcaacttctatagtggcatcctgctactggcctgcatcagtgtggaccgttacctggccattgtccatgccacacgcacactgacccagaagcgctacttggtcaaattcatatgtctcagcatctggggtctgtccttgctcctggccctgcctgtcttacttttccgaaggaccgtctactcatccaatgttagcccagcctgctatgaggacatggg

SEQ ID NO: 1048 - DNA, 597 bp, Homo sapiens
  source 1..597: mol_type = genomic DNA
aaaacattcagagacagaaggtggatagacaaatctccaccttcagactgctctgactaccacccaaccttgaggcacagtgaagacatcggtggccactccaataacagcaggtcacagctgctcttctggaggtgtcctacaggtgaaaagcccagcgacccagtcaggatttaagtttacctcaaaaatggaagattttaacatggagagtgacagctttgaagatttctggaaaggtgaagatcttagtaattacagttacagctctaccctgcccccttttctactagatgccgccccatgtgaaccagaatccctggaaatcaacaagtattttgtggtcattatctatgccctggtattcctgctgagcctgctgggaaactccctcgtgatgctggtcatcttatacagcagggtcggccgctccgtcactgatgtctacctgctgaacctagccttggccgacctactctttgccctgaccttgcccatctgggccgcctccaaggtgaatggctggatttttggcacattcctgtgcaaggtggtctcactcctgaaggaagtcaacttctatagtggcatcctgct

SEQ ID NO: 1049 - DNA, 1682 bp, Homo sapiens
  source 1..1682: mol_type = genomic DNA
cgcggccagaaacttcagtttgttggctgcggcagcaggtagcaaagtgacgccgagggcctgagtgctccagtagccaccgcatctggagaaccagcggttaccatggaggggatcagtatatacacttcagataactacaccgaggaaatgggctcaggggactatgactccatgaaggaaccctgtttccgtgaagaaaatgctaatttcaataaaatcttcctgcccaccatctactccatcatcttcttaactggcattgtgggcaatggattggtcatcctggtcatgggttaccagaagaaactgagaagcatgacggacaagtacaggctgcacctgtcagtggccgacctcctctttgtcatcacgcttcccttctgggcagttgatgccgtggcaaactggtactttgggaacttcctatgcaaggcagtccatgtcatctacacagtcaacctctacagcagtgtcctcatcctggccttcatcagtctggaccgctacctggccatcgtccacgccaccaacagtcagaggccaaggaagctgttggctgaaaaggtggtctatgttggcgtctggatccctgccctcctgctgactattcccgacttcatctttgccaacgtcagtgaggcagatgacagatatatctgtgaccgcttctaccccaatgacttgtgggtggttgtgttccagtttcagcacatcatggttggccttatcctgcctggtattgtcatcctgtcctgctattgcattatcatctccaagctgtcacactccaagggccaccagaagcgcaaggccctcaagaccacagtcatcctcatcctggctttcttcgcctgttggctgccttactacattgggatcagcatcgactccttcatcctcctggaaatcatcaagcaagggtgtgagtttgagaacactgtgcacaagtggatttccatcaccgaggccctagctttcttccactgttgtctgaaccccatcctctatgctttccttggagccaaatttaaaacctctgcccagcacgcactcacctctgtgagcagagggtccagcctcaagatcctctccaaaggaaagcgaggtggacattcatctgtttccactgagtctgagtcttcaagttttcactccagctaacacagatgtaaaagacttttttttatacgataaataacttttttttaagttacacatttttcagatataaaagactgaccaatattgtacagtttttattgcttgttggatttttgtcttgtgtttctttagtttttgtgaagtttaattgacttatttatataaattttttttgtttcatattgatgtgtgtctaggcaggacctgtggccaagttcttagttgctgtatgtctcgtggtaggactgtagaaaagggaactgaacattccagagcgtgtagtgaatcacgtaaagctagaaatgatccccagctgtttatgcatagataatctctccattcccgtggaacgtttttcctgttcttaagacgtgattttgctgtagaagatggcacttataaccaaagcccaaagtggtatagaaatgctggtttttcagttttcaggagtgggttgatttcagcacctacagtgtacagtcttgtattaagttgttaataaaagtacatgttaaact

SEQ ID NO: 1050 - DNA, 1895 bp, Homo sapiens
  source 1..1895: mol_type = genomic DNA
ttttttttcttccctctagtgggcggggcagaggagttagccaagatgtgactttgaaaccctcagcgtctcagtgcccttttgttctaaacaaagaattttgtaattggttctaccaaagaaggatataatgaagtcactatgggaaaagatggggaggagagttgtaggattctacattaattctcttgtgcccttagcccactacttcagaatttcctgaagaaagcaagcctgaattggttttttaaattgctttaaaaattttttttaactgggttaatgcttgctgaattggaagtgaatgtccattcctttgcctcttttgcagatatacacttcagataactacaccgaggaaatgggctcaggggactatgactccatgaaggaaccctgtttccgtgaagaaaatgctaatttcaataaaatcttcctgcccaccatctactccatcatcttcttaactggcattgtgggcaatggattggtcatcctggtcatgggttaccagaagaaactgagaagcatgacggacaagtacaggctgcacctgtcagtggccgacctcctctttgtcatcacgcttcccttctgggcagttgatgccgtggcaaactggtactttgggaacttcctatgcaaggcagtccatgtcatctacacagtcaacctctacagcagtgtcctcatcctggccttcatcagtctggaccgctacctggccatcgtccacgccaccaacagtcagaggccaaggaagctgttggctgaaaaggtggtctatgttggcgtctggatccctgccctcctgctgactattcccgacttcatctttgccaacgtcagtgaggcagatgacagatatatctgtgaccgcttctaccccaatgacttgtgggtggttgtgttccagtttcagcacatcatggttggccttatcctgcctggtattgtcatcctgtcctgctattgcattatcatctccaagctgtcacactccaagggccaccagaagcgcaaggccctcaagaccacagtcatcctcatcctggctttcttcgcctgttggctgccttactacattgggatcagcatcgactccttcatcctcctggaaatcatcaagcaagggtgtgagtttgagaacactgtgcacaagtggatttccatcaccgaggccctagctttcttccactgttgtctgaaccccatcctctatgctttccttggagccaaatttaaaacctctgcccagcacgcactcacctctgtgagcagagggtccagcctcaagatcctctccaaaggaaagcgaggtggacattcatctgtttccactgagtctgagtcttcaagttttcactccagctaacacagatgtaaaagacttttttttatacgataaataacttttttttaagttacacatttttcagatataaaagactgaccaatattgtacagtttttattgcttgttggatttttgtcttgtgtttctttagtttttgtgaagtttaattgacttatttatataaattttttttgtttcatattgatgtgtgtctaggcaggacctgtggccaagttcttagttgctgtatgtctcgtggtaggactgtagaaaagggaactgaacattccagagcgtgtagtgaatcacgtaaagctagaaatgatccccagctgtttatgcatagataatctctccattcccgtggaacgtttttcctgttcttaagacgtgattttgctgtagaagatggcacttataaccaaagcccaaagtggtatagaaatgctggtttttcagttttcaggagtgggttgatttcagcacctacagtgtacagtcttgtattaagttgttaataaaagtacatgttaaactta

SEQ ID NO: 1051 - DNA, 1347 bp, Homo sapiens
  source 1..1347: mol_type = genomic DNA
agtttgttggctgcggcagcaggtagcaaagtgacgccgagggcctgagtgctccagtagccaccgcatctggagaaccagcggttaccatggaggggatcagtatatacacttcagataactacaccgaggaaatgggctcaggggactatgactccatgaaggaaccctgtttccgtgaagaaaatgctaatttcaataaaatcttcctgcccaccatctactccatcatcttcttaactggcattgtgggcaatggattggtcatcctggtcatgggttaccagaagaaactgagaagcatgacggacaagtacaggctgcacctgtcagtggccgacctcctctttgtcatcacgcttcccttctgggcagttgatgccgtggcaaactggtactttgggaacttcctatgcaaggcagtccatgtcatctacacagtcaacctctacagcagtgtcctcatcctggatccctgccctcctgctgactattcccgacttcatctttgccaacgtcagtgaggcagatgacagatatatctgtgaccgcttctaccccaatgacttgtgggtggttgtgttccagtttcagcacatcatggttggccttatcctgcctggtattgtcatcctgtcctgctattgcattatcatctccaagctgtcacactccaagggccaccagaagcgcaaggccctcaagaccacagtcatcctcatcctggctttcttcgcctgttggctgccttactacattgggatcagcatcgactccttcatcctcctggaaatcatcaagcaagggtgtgagtttgagaacactgtgcacaagtggatttccatcaccgaggccctagctttcttccactgttgtctgaaccccatcctctatgctttccttggagccaaatttaaaacctctgcccagcacgcactcacctctgtgagcagagggtccagcctcaagatcctctccaaaggaaagcgaggtggacattcatctgtttccactgagtctgagtcttcaagttttcactccagctaacacagatgtaaaagacttttttttatacgataaataacttttttttaagttacacatttttcagatataaaagactgaccaatattgtacagtttttattgcttgttggatttttgtcttgtgtttctttagtttttgtgaagtttaattgacttatttatataaattttttttgtttcatattgatgtgtgtctaggcaggacctgtggccaagttcttagttgctgtatgtctcgtggtaggactgtagaaaagggaactgaacattccagagcgtgtagtgaatcacgtaaagctag

SEQ ID NO: 1052 - DNA, 4025 bp, Homo sapiens
  source 1..4025: mol_type = genomic DNA
tcccagatggatccaccccagacttttcaaagaagacacctccttcatcttgtgttctaaaaccttgcaagttcaggaagaaaccatctgcatccatattgaaaacctgacacaatgtatgcagcaggctcagtgtgagtgaactggaggcttctctacaacatgacccaaaggagcattgcaggtcctatttgcaacctgaagtttgtgactctcctggttgccttaagttcagaactcccattcctgggagctggagtacagcttcaagacaatgggtataatggattgctcattgcaattaatcctcaggtacctgagaatcagaacctcatctcaaacattaaggaaatgataactgaagcttcattttacctatttaatgctaccaagagaagagtatttttcagaaatataaagattttaatacctgccacatggaaagctaataataacagcaaaataaaacaagaatcatatgaaaaggcaaatgtcatagtgactgactggtatggggcacatggagatgatccatacaccctacaatacagagggtgtggaaaagagggaaaatacattcatttcacacctaatttcctactgaatgataacttaacagctggctacggatcacgaggccgagtgtttgtccatgaatgggcccacctccgttggggtgtgttcgatgagtataacaatgacaaacctttctacataaatgggcaaaatcaaattaaagtgacaaggtgttcatctgacatcacaggcatttttgtgtgtgaaaaaggtccttgcccccaagaaaactgtattattagtaagctttttaaagaaggatgcacctttatctacaatagcacccaaaatgcaactgcatcaataatgttcatgcaaagtttatcttctgtggttgaattttgtaatgcaagtacccacaaccaagaagcaccaaacctacagaaccagatgtgcagcctcagaagtgcatgggatgtaatcacagactctgctgactttcaccacagctttcccatgaatgggactgagcttccacctcctcccacattctcgcttgtacaggctggtgacaaagtggtctgtttagtgctggatgtgtccagcaagatggcagaggctgacagactccttcaactacaacaagccgcagaattttatttgatgcagattgttgaaattcataccttcgtgggcattgccagtttcgacagcaaaggagagatcagagcccagctacaccaaattaacagcaatgatgatcgaaagttgctggtttcatatctgcccaccactgtatcagctaaaacagacatcagcatttgttcagggcttaagaaaggatttgaggtggttgaaaaactgaatggaaaagcttatggctctgtgatgatattagtgaccagcggagatgataagcttcttggcaattgcttacccactgtgctcagcagtggttcaacaattcactccattgccctgggttcatctgcagccccaaatctggaggaattatcacgtcttacaggaggtttaaagttctttgttccagatatatcaaactccaatagcatgattgatgctttcagtagaatttcctctggaactggagacattttccagcaacatattcagcttgaaagtacaggtgaaaatgtcaaacctcaccatcaattgaaaaacacagtgactgtggataatactgtgggcaacgacactatgtttctagttacgtggcaggccagtggtcctcctgagattatattatttgatcctgatggacgaaaatactacacaaataattttatcaccaatctaacttttcggacagctagtctttggattccaggaacagctaagcctgggcactggacttacaccctgaacaatacccatcattctctgcaagccctgaaagtgacagtgacctctcgcgcctccaactcagctgtgcccccagccactgtggaagcctttgtggaaagagacagcctccattttcctcatcctgtgatgatttatgccaatgtgaaacagggattttatcccattcttaatgccactgtcactgccacagttgagccagagactggagatcctgttacgctgagactccttgatgatggagcaggtgctgatgttataaaaaatgatggaatttactcgaggtattttttctcctttgctgcaaatggtagatatagcttgaaagtgcatgtcaatcactctcccagcataagcaccccagcccactctattccagggagtcatgctatgtatgtaccaggttacacagcaaacggtaatattcagatgaatgctccaaggaaatcagtaggcagaaatgaggaggagcgaaagtggggctttagccgagtcagctcaggaggctccttttcagtgctgggagttccagctggcccccaccctgatgtgtttccaccatgcaaaattattgacctggaagctgtaaaagtagaagaggaattgaccctatcttggacagcacctggagaagactttgatcagggccaggctacaagctatgaaataagaatgagtaaaagtctacagaatatccaagatgactttaacaatgctattttagtaaatacatcaaagcgaaatcctcagcaagctggcatcagggagatatttacgttctcaccccaaatttccacgaatggacctgaacatcagccaaatggagaaacacatgaaagccacagaatttatgttgcaatacgagcaatggataggaactccttacagtctgctgtatctaacattgcccaggcgcctctgtttattccccccaattctgatcctgtacctgccagagattatcttatattgaaaggagttttaacagcaatgggtttgataggaatcatttgccttattatagttgtgacacatcatactttaagcaggaaaaagagagcagacaagaaagagaatggaacaaaattattataaataaatatccaaagtgtcttccttcttagatataagacccatggccttcgactacaaaaacatactaacaaagtcaaattaacatcaaaactgtattaaaatgcattgagtttttgtacaatacagataagatttttacatggtagatcaacaaattctttttgggggtagattagaaaacccttacactttggctatgaacaaataataaaaattattctttaaagtaatgtctttaaaggcaaagggaagggtaaagtcggaccagtgtcaaggaaagtttgttttattgaggtggaaaaatagccccaagcagagaaaaggagggtaggtctgcattataactgtctgtgtgaagcaatcatttagttactttgattaatttttcttttctccttatctgtgcagaacaggttgcttgtttacaactgaagatcatgctatattttatatatgaagcccctaatgcaaagctctttacctcttgctattttgttatatatattacagatgaaatctcactgctaatgctcagagatcttttttcactgtaagaggtaacctttaacaatatgggtattacctttgtctcttcataccggttttatgacaaaggtctattgaatttatttgtttgtaagtttctactcccatcaaagcagctttctaagttattgccttggttattatggatgatagttatagcccttataatgccttaactaaggaagaaaagatgttattctgagtttgttttaatacatatatgaacatatagttttattcaattaaaccaaagaagaggtcagcagggagatactaacctttggaaatgattagctggctctgttttttggttaaataagagtctttaatcctttctccatcaagagttacttaccaagggcaggggaagggggatatagaggtcacaaggaaataaaaatcatctttcatctttaattttactccttcctcttatttttttaaaagattatcgaacaataaaatcatttgcctttttaattaaa

SEQ ID NO: 1053 - DNA, 585 bp, Homo sapiens
  source 1..585: mol_type = genomic DNA
tcccagatggatccaccccagacttttcaaagaagacacctccttcatcttgtgttctaaaaccttgcaagttcaggaagaaaccatctgcatccatattgaaaacctgacacaatgtatgcagcaggctcagtgtgagtgaactggaggcttctctacaacatgacccaaaggagcattgcaggtcctatttgcaacctgaagtttgtgactctcctggttgccttaagttcagaactcccattcctgggagctggagtacagcttcaagacaatgggtataatggattgctcattgcaattaatcctcaggtacctgagaatcagaacctcatctcaaacattaaggaaatgataactgaagcttcattttacctatttaatgctaccaagagaagagtatttttcagaaatataaagattttaatacctgccacatggaaagctaataataacagcaaaataaaacaagaatcatatgaaaaggcaaatgtcatagtgactgactggtatggggcacatggagatgatcagggtgtggaaaagagggaaaatacattcatttcacacctaatttcctactga

SEQ ID NO: 1054 - DNA, 2713 bp, Homo sapiens
  source 1..2713: mol_type = genomic DNA
attgttagagacctgtcattgatagcagttgctagttgctgccttttaagagctcgttgattcctctgcaaggtggtgcagcatcctctgtcccttcattcatttcagatctactcaggtctccctgtaaacagatctctcggatcaataagcatgaatgacgaagactacagcaccatctatgacacaatccaaaatgagaggacgtatgaggttccagaccagccagaagaaaatgaaagtccccattatgatgatgtccatgagtacttaaggccagaaaatgatttatatgccactcagctgaatacccatgagtatgattttgtgtcagtctataccattaagggtgaagagaccagcttggcctctgtccagtcagaagacagaggctacctcctgcctgatgagatatactctgaactccaggaggctcatccaggtgagccccaggaggacaggggcatctcaatggaagggttatattcatcaacccaggaccagcaactctgcgcagcagaactccaggagaatgggagtgtgatgaaggaagatctgccttctccttcaagcttcaccattcagcacagtaaggccttctctaccaccaagtattcctgctattctgatgctgaaggtttggaagaaaaggagggagctcacatgaaccctgagatttacctctttgtgaaggctggaatcgatggagaaagcatcggcaactgtcctttctctcagcgcctcttcatgatcctctggctgaaaggagtcgtgttcaatgtcaccactgtggatctgaaaagaaagccagctgacctgcacaacctagcccccggcacgcacccgcccttcctgaccttcaacggggacgtgaagacagacgtcaataagatcgaggagttcctggaggagaccttgacccctgaaaagtaccccaaactggctgcaaaacaccgggaatccaacacagcgggcatcgacatcttttccaagttttctgcctacatcaaaaataccaagcagcagaacaatgctgctcttgaaagaggcctaaccaaggctctaaagaaattggatgactacctgaacacccctctaccagaggagattgacgccaacacttgtggggaagacaaggggtcccggcgcaagttcctggatggggatgagctgaccctggctgactgcaatctgttgcccaagctccatgtggtcaagattgtggccaagaaataccgcaactatgatatcccggctgagatgacaggcctgtggcggtacctcaagaacgcctatgcccgtgatgagttcaccaacacctgtgcagctgacagtgagatcgagttggcctacgctgatgtcgccaaacgcctcagccgatcctgagcacagccattttgccccatccccgctgcagaaggactcaaccactcccctaagactccagcttcatagactcctctgtatcactgccttgaggcgcactttttataatcaagcctcatcttgctggtatcatgggaactccagcctgctatctttcatgaaggtcagcaccatccctggcctcctcacataggaatctagcagaaatgatagacacagtccacctttcggccggccagcctgatctgggctcagcatgtttggggtcagtcagtgttggagagcccacatatgggattgccactagcttcttctgccaatatcaaaataccttctcagatgctttagaaacatgcaacaccaactccttttctaccctcctctccgtccatacctacaaggccaaggacaaacgccatcttcatccttcttagaaagagatctattaccccattaggggagacagagagagtgaatggaggagtaccgagctggctatggacttgggtgtctggcaaacacagcttcagtctcactacttctgacactctggttattgggcactaagggccagactggaaagtcacttgagacacattctcagtttgttgcagtgccaggaatgctgcgctgctgctgctgcgcacctggcccatgctgtccctggcttccatgccgtccaggccctgccagaaaaggaaattggcatgcaattctaaactgcagtgactgggatgggaggggaggggagcagtgttgatgccaaaatacccacggggtctaccagccatggggtttgcttgcttaggagtagttgtttcagaggtgattacaggcctgggtttgactgtgcttaccaatgagtggtttttgagctatgagaaagtggatgggagtgggaggaggagagatgggtgaagacaaaagagttctttatgagcctcgatgttccctggtaaacttttaaaaaggccttctctcatgatctaagtcttggactggtggcatcatgtaactgctaaccttacagtaaaaacccaagaatgggtcaaaaatgtcttcccagtttctccaagctgcttctggaatgcaggtctgtcggctgggtgctctccagcagctgctcctgcctgattcaactgtagcctgtaatgggtaaaagccacatttaggaggtggtctgatcatagaacaccttaggaagaaagtccatgagactttctgactaggaaaccatgtggtttgaacttgaagaaaaatgtagacccatctgggttaattttcctacaatctgactcaactgccaggtgaaaaaaaaaaggaaaaa

SEQ ID NO: 1055 - DNA, 2390 bp, Homo sapiens
  source 1..2390: mol_type = genomic DNA
cggatcctgtgacacctccgggcagcccggcacttgttgctcccacgacctgttgtcattcccttaacccggctttccccgtggccccccgcctcctcccggcttcgctccttttcatgtgagcatctgggacactgatctctcagaccccgctgctcgggctggagaatagatggttttgtgaaaaattaaacaccgccctgaagaggagccccgctgggcagcggcaggagcgcagagtgctggcccaggtgctgcagaggtggcgcctccccggcccgggacggtagccccgggcgccaacggcatgacagactcggcgacagctaacggggacgacagggaccccgagatcgagctctttgtgaaggctggaatcgatggagaaagcatcggcaactgtcctttctctcagcgcctcttcatgatcctctggctgaaaggagtcgtgttcaatgtcaccactgtggatctgaaaagaaagccagctgacctgcacaacctagcccccggcacgcacccgcccttcctgaccttcaacggggacgtgaagacagacgtcaataagatcgaggagttcctggaggagaccttgacccctgaaaagtaccccaaactggctgcaaaacaccgggaatccaacacagcgggcatcgacatcttttccaagttttctgcctacatcaaaaataccaagcagcagaacaatgctgctcttgaaagaggcctaaccaaggctctaaagaaattggatgactacctgaacacccctctaccagaggagattgacgccaacacttgtggggaagacaaggggtcccggcgcaagttcctggatggggatgagctgaccctggctgactgcaatctgttgcccaagctccatgtggtcaagattgtggccaagaaataccgcaactatgatatcccggctgagatgacaggcctgtggcggtacctcaagaacgcctatgcccgtgatgagttcaccaacacctgtgcagctgacagtgagatcgagttggcctacgctgatgtcgccaaacgcctcagccgatcctgagcacagccattttgccccatccccgctgcagaaggactcaaccactcccctaagactccagcttcatagactcctctgtatcactgccttgaggcgcactttttataatcaagcctcatcttgctggtatcatgggaactccagcctgctatctttcatgaaggtcagcaccatccctggcctcctcacataggaatctagcagaaatgatagacacagtccacctttcggccggccagcctgatctgggctcagcatgtttggggtcagtcagtgttggagagcccacatatgggattgccactagcttcttctgccaatatcaaaataccttctcagatgctttagaaacatgcaacaccaactccttttctaccctcctctccgtccatacctacaaggccaaggacaaacgccatcttcatccttcttagaaagagatctattaccccattaggggagacagagagagtgaatggaggagtaccgagctggctatggacttgggtgtctggcaaacacagcttcagtctcactacttctgacactctggttattgggcactaagggccagactggaaagtcacttgagacacattctcagtttgttgcagtgccaggaatgctgcgctgctgctgctgcgcacctggcccatgctgtccctggcttccatgccgtccaggccctgccagaaaaggaaattggcatgcaattctaaactgcagtgactgggatgggaggggaggggagcagtgttgatgccaaaatacccacggggtctaccagccatggggtttgcttgcttaggagtagttgtttcagaggtgattacaggcctgggtttgactgtgcttaccaatgagtggtttttgagctatgagaaagtggatgggagtgggaggaggagagatgggtgaagacaaaagagttctttatgagcctcgatgttccctggtaaacttttaaaaaggccttctctcatgatctaagtcttggactggtggcatcatgtaactgctaaccttacagtaaaaacccaagaatgggtcaaaaatgtcttcccagtttctccaagctgcttctggaatgcaggtctgtcggctgggtgctctccagcagctgctcctgcctgattcaactgtagcctgtaatgggtaaaagccacatttaggaggtggtctgatcatagaacaccttaggaagaaagtccatgagactttctgactaggaaaccatgtggtttgaacttgaagaaaaatgtagacccatctgggttaattttcctacaatctgactcaactgccaggtgaaaaaaaaaaggaaaaa

SEQ ID NO: 1056 - DNA, 1990 bp, Homo sapiens
  source 1..1990: mol_type = genomic DNA
gcagcccggcacttgttgctcccacgacctgttgtcattcccttaacccggctttccccgtggccccccgcctcctcccggcttcgctccttttcatgtgagcatctgggacactgatctctcagaccccgctgctcgggctggagaatagatggttttgtgaaaaattaaacaccgccctgaagaggagccccgctgggcagcggcaggagcgcagagtgctggcccaggtgctgcagaggtggcgcctccccggcccgggacggtagccccgggcgccaacggcatgacagactcggcgacagctaacggggacgacagggaccccgagatcgagctctttgtgaaggctggaatcgatggagaaagcatcggcaactgtcctttctctcagcgcctcttcatgatcctctggctgaaaggagtcgtgttcaatgtcaccactgtggatctgaaaagaaagccagctgacctgcacaacctagcccccggcacgcacccgcccttcctgaccttcaacggggacgtgaagacagacgtcaataagatcgaggagttcctggaggagaccttgacccctgaaaagtaccccaaactggctgcaaaacaccgggaatccaacacagcgggcatcgacatcttttccaagttttctgcctacatcaaaaataccaagcagcagaacaatgctgctcttgaaagaggcctaaccaaggctctaaagaaattggatgactacctgaacacccctctaccagaggagattgacgccaacacttgtggggaagacaaggggtcccggcgcaagttcctggatggggatgagctgaccctggctgactgcaatctgttgcccaagctccatgtggtcaaggaacaagtaccactgaaagggatgatataattccagctcagtcacactgtgtcagagtgatacaatgcaaagatcaggagacccgagttccggtcctgtatttgctgccaactagcagcatgagctgaggcacatcatttaatctttttggaattcatttttctcatgcctagaagaacagaagtggattgtattccttcttgccttcttttcctttcttctttccctccttctttccttttctcttgctcaaacatgtattcactaccactcaaaaaccatttgttgaacaaagcaaacaaatgaatctcccaagccttgggcttcatcctgtgatttcctcaattcccacctgccttaaattactcagtgaagccctgtccttggagaaaattcagtgggtggttaacccagagaagctggagatcaaaaagaagatggccaatgaaagaacaaaggccagcccttggcccctatctctttggatttctgctgatccagcttatcagatcccagaaacctggcaaacctctaaagttcacaaagagcgaaggggaagccaagtcaggcctccagtttggcttcggatgccaaaacttaatctgggctgtgggagctaactgttttcatatgaaagagcaaattcagaacatgagcatggaagtccctgcgaacgtcagatctccgtgtgcatccttacccccttgctgctttcatgctcactctcctcttgcgtggctcgctttcaggtttatctccatccctggaagcagagttgctctggcccaggctctccatgagagtttggcttgaacattcattgtctggccccctcctagttctcatctcccaaagtcaagccaatgtgtgaagaaatgaccagctcagcagccaaggcccagggtgcacaggtcttcgttgggagaggcatctgcaggcctttccttgctcactgggatccttgcctagcatagtgacgatgttcagccctggagacaaacaagaaggggaacaccaacatcaatagaagtatatatttacaaattgcatttctgctgtattgaaactaacattctgccctttaaaatcctgaaaataaaatttcagtatgaaatg

SEQ ID NO: 1057 - DNA, 6580 bp, Homo sapiens
  source 1..6580: mol_type = genomic DNA
attttccccccttcggccgcggcgaggaggagccggagcgggagtgacaccgagccggacccagcgcgacctgcggcggctccgggtgactcgggccagtgtagaggtcctcaggccgccggcaggagcagctgggccaattccctggccgggagcggaaggggatggcgtcgggcctgggctccccgtccccctgctcggcgggcagtgaggaggaggatatggatgcacttttgaacaacagcctgcccccaccccacccagaaaatgaagaggacccagaagaggatttgtcagaaacagagactccaaagctcaagaagaagaaaaagcctaagaaacctcgggaccctaaaatccctaagagcaagcgccaaaaaaaggagcgtatgctcttatgccggcagctgggggacagctctggggaggggccagagtttgtggaggaggaggaagaggtggctctgcgctcagacagtgagggcagcgactatactcctggcaagaagaagaagaagaagcttggacctaagaaagagaagaagagcaaatccaagcggaaggaggaggaggaggaggaggatgatgatgatgattcaaaggagcctaaatcatctgctcagctcctggaagactggggcatggaagacattgaccacgtgttctcagaggaggattatcgaaccctcaccaactacaaggccttcagccagtttgtcagacccctcattgctgccaaaaatcccaagattgctgtctccaagatgatgatggttttgggtgcaaaatggcgggagttcagtaccaataaccccttcaaaggcagttctggggcatcagtggcagctgcggcagcagcagcggtagctgtggtggagagcatggtgacagccactgaggttgcaccaccacctccccctgtggaggtgcctatccgcaaggccaagaccaaggagggcaaaggtcccaatgctcggaggaagcccaagggcagccctcgtgtacctgatgccaagaagcctaaacccaagaaagtagctcccctgaaaatcaagctgggaggttttggttccaagcgtaagagatcctcgagtgaggatgatgacttagatgtggaatctgacttcgatgatgccagtatcaatagctattctgtttctgatggttccaccagccgtagtagccgcagccgcaagaaactccgaaccactaaaaagaaaaagaaaggcgaggaggaggtgactgctgtggatggttatgagacagaccaccaggactattgcgaggtgtgccagcaaggcggtgagatcatcctgtgtgatacctgtccccgtgcttaccacatggtctgcctggatcccgacatggagaaggctcccgagggcaagtggagctgcccacactgcgagaaggaaggcatccagtgggaagctaaagaggacaattcggagggtgaggagatcctggaagaggttgggggagacctcgaagaggaggatgaccaccatatggaattctgtcgggtctgcaaggatggtggggaactgctctgctgtgatacctgtccttcttcctaccacatccactgcctgaatcccccacttccagagatccccaacggtgaatggctctgtccccgttgtacgtgtccagctctgaagggcaaagtgcagaagatcctaatctggaagtggggtcagccaccatctcccacaccagtgcctcggcctccagatgctgatcccaacacgccctccccaaagcccttggaggggcggccagagcggcagttctttgtgaaatggcaaggcatgtcttactggcactgctcctgggtttctgaactgcagctggagctgcactgtcaggtgatgttccgaaactatcagcggaagaatgatatggatgagccaccttctggggactttggtggtgatgaagagaaaagccgaaagcgaaagaacaaggaccctaaatttgcagagatggaggaacgcttctatcgctatgggataaaacccgagtggatgatgatccaccgaatcctcaaccacagtgtggacaagaagggccacgtccactacttgatcaagtggcgggacttaccttacgatcaggcttcttgggagagtgaggatgtggagatccaggattacgacctgttcaagcagagctattggaatcacagggagttaatgaggggtgaggaaggccgaccaggcaagaagctcaagaaggtgaagcttcggaagttggagaggcctccagaaacgccaacagttgatccaacagtgaagtatgagcgacagccagagtacctggatgctacaggtggaaccctgcacccctatcaaatggagggcctgaattggttgcgcttctcctgggctcagggcactgacaccatcttggctgatgagatgggccttgggaaaactgtacagacagcagtcttcctgtattccctttacaaggagggtcattccaaaggccccttcctagtgagcgcccctctttctaccatcatcaactgggagcgggagtttgaaatgtgggctccagacatgtatgtcgtaacctatgtgggtgacaaggacagccgtgccatcatccgagagaatgagttctcctttgaagacaatgccattcgtggtggcaagaaggcctcccgcatgaagaaagaggcatctgtgaaattccatgtgctgctgacatcctatgaattgatcaccattgacatggctattttgggctctattgattgggcctgcctcatcgtggatgaagcccatcggctgaagaacaatcagtctaagttcttccgggtattgaatggttactcactccagcacaagctgttgctgactgggacaccattacaaaacaatctggaagagttgtttcatctgctcaactttctcacccccgagaggttccacaatttggaaggttttttggaggagtttgctgacattgccaaggaggaccagataaaaaaactgcatgacatgctggggccgcacatgttgcggcggctcaaagccgatgtgttcaagaacatgccctccaagacagaactaattgtgcgtgtggagctgagccctatgcagaagaaatactacaagtacatcctcactcgaaattttgaagcactcaatgcccgaggtggtggcaaccaggtgtctctgctgaatgtggtgatggatcttaagaagtgctgcaaccatccatacctcttccctgtggctgcaatggaagctcctaagatgcctaatggcatgtatgatggcagtgccctaatcagagcatctgggaaattattgctgctgcagaaaatgctcaagaaccttaaggagggtgggcatcgtgtactcatcttttcccagatgaccaagatgctagacctgctagaggatttcttggaacatgaaggttataaatacgaacgcatcgatggtggaatcactgggaacatgcggcaagaggccattgaccgcttcaatgcaccgggtgctcagcagttctgcttcttgctttccactcgagctgggggccttggaatcaatctggccactgctgacacagttattatctatgactctgactggaacccccataatgacattcaggcctttagcagagctcaccggattgggcaaaataaaaaggtaatgatctaccggtttgtgacccgtgcgtcagtggaggagcgcatcacgcaggtggcaaagaagaaaatgatgctgacgcatctagtggtgcggcctgggctgggctccaagactggatctatgtccaaacaggagcttgatgatatcctcaaatttggcactgaggaactattcaaggatgaagccactgatggaggaggagacaacaaagagggagaagatagcagtgttatccactacgatgataaggccattgaacggctgctagaccgtaaccaggatgagactgaagacacagaattgcagggcatgaatgaatatttgagctcattcaaagtggcccagtatgtggtacgggaagaagaaatgggggaggaagaggaggtagaacgggaaatcattaaacaggaagaaagtgtggatcctgactactgggagaaattgctgcggcaccattatgagcagcagcaagaagatctagcccgaaatctgggcaaaggaaaaagaatccgtaaacaggtcaactacaatgatggctcccaggaggaccgaggtgtgtgtggccggccccgccccccacccatgggccgttccactagagcagtgggccccgctcatctgccctctctccctccagattggcaggacgaccagtccgacaaccagtccgattactcagtggcttcagaggaaggtgatgaagactttgatgaacgttcagaagctccccgtaggcccagtcgtaagggcctgcggaatgataaagataagccattgcctcctctgttggcccgtgttggtgggaatattgaagtacttggttttaatgctcgtcagcgaaaagcctttcttaatgcaattatgcgatatggtatgccacctcaggatgcttttactacccagtggcttgtaagagacctgcgaggcaaatcagagaaagagttcaaggcatatgtctctcttttcatgcggcatttatgtgagccgggggcagatggggctgagacctttgctgatggtgtcccccgagaaggcctgtctcgccagcatgtccttactagaattggtgttatgtctttgattcgcaagaaggttcaggagtttgaacatgttaatgggcgctggagcatgcctgaactggctgaggtggaggaaaacaagaagatgtcccagccagggtcaccctccccaaaaactcctacaccctccactccaggggacacgcagcccaacactcctgcacctgtcccacctgctgaagatgggataaaaatagaggaaaatagcctcaaagaagaagagagcatagaaggagaaaaggaggttaaatctacagcccctgagactgccattgagtgtacacaggcccctgcccctgcctcagaggatgaaaaggtcgttgttgaaccccctgagggagaggagaaagtggaaaaggcagaggtgaaggagagaacagaggaacctatggagacagagcccaaaggtgctgctgatgtagagaaggtggaggaaaagtcagcaatagatctgacccctattgtggtagaagacaaagaagagaagaaagaagaagaagagaaaaaagaggtgatgcttcagaatggagagacccccaaggacctgaatgatgagaaacagaagaaaaatattaaacaacgtttcatgtttaacattgcagatggtggttttactgagttgcactccctttggcagaatgaagagcgggcagccacagttaccaagaagacttatgagatctggcatcgacggcatgactactggctgctagccggcattataaaccatggctatgcccggtggcaagacatccagaatgacccacgctatgccatcctcaatgagcctttcaagggtgaaatgaaccgtggcaatttcttagagatcaagaataaatttctagctcgaaggtttaagctcttagaacaagctctggtgattgaggaacagctgcgccgggctgcttacttgaacatgtcagaagacccttctcacccttccatggccctcaacacccgctttgctgaggtggagtgtttggcggaaagtcatcagcacctgtccaaggagtcaatggcaggaaacaagccagccaatgcagtcctgcacaaagttctgaaacagctggaagaactgctgagtgacatgaaagctgatgtgactcgactcccagctaccattgcccgaattcccccagttgctgtgaggttacagatgtcagagcgtaacattctcagccgcctggcaaaccgggcacccgaacctaccccacagcaggtagcccagcagcagtgaagatgcagactgataccacctccaccgctgagcagtgaccttcctcactttctcttgtcccagcttctcccctgggggcctgagagaccctcaccttccttctgcccatcttccatgttgtaaaggaacagccccagtgcactgggggaggggagggagtgaggggcagtggtgcccttcctgcagaagagacatgcagcagtagcgctggcgccatctgcaggagctggcgggctggccttctggaccctggcttctccccactgtaacgcctgttacacacaaactgttgtgggttcctgccaggcttgaagaaaatgatctgaattttttcctccttttggttttattttgttggtttattttgtgttttcttttctcctttttggggggtattcagagtgggctgggcccctgggcgagacacagctacctctgttggcatctttttaataccaggaacccagcggctctagccactgagcggctaaatgaaataaagtggaaaaaaaaaaaaaggaaaaaaccaaaagcataaaaaaccacagcaaatttcttgatgaaaattgaaaataaaagtttccttgtatttt

SEQ ID NO: 1058 - DNA, 6496 bp, Homo sapiens
  source 1..6496: mol_type = genomic DNA
attttccccccttcggccgcggcgaggaggagccggagcgggagtgacaccgagccggacccagcgcgacctgcggcggctccgggtgactcgggccagtgtagaggtcctcaggccgccggcaggagcagctgggccaattccctggccgggagcggaaggggatggcgtcgggcctgggctccccgtccccctgctcggcgggcagtgaggaggaggatatggatgcacttttgaacaacagcctgcccccaccccacccagaaaatgaagaggacccagaagaggatttgtcagaaacagagactccaaagctcaagaagaagaaaaagcctaagaaacctcgggaccctaaaatccctaagagcaagcgccaaaaaaaggagcgtatgctcttatgccggcagctgggggacagctctggggaggggccagagtttgtggaggaggaggaagaggtggctctgcgctcagacagtgagggcagcgactatactcctggcaagaagaagaagaagaagcttggacctaagaaagagaagaagagcaaatccaagcggaaggaggaggaggaggaggaggatgatgatgatgattcaaaggagcctaaatcatctgctcagctcctggaagactggggcatggaagacattgaccacgtgttctcagaggaggattatcgaaccctcaccaactacaaggccttcagccagtttgtcagacccctcattgctgccaaaaatcccaagattgctgtctccaagatgatgatggttttgggtgcaaaatggcgggagttcagtaccaataaccccttcaaaggcagttctggggcatcagtggcagctgcggcagcagcagcggtagctgtggtggagagcatggtgacagccactgaggttgcaccaccacctccccctgtggaggtgcctatccgcaaggccaagaccaaggagggcaaaggtcccaatgctcggaggaagcccaagggcagccctcgtgtacctgatgccaagaagcctaaacccaagaaagtagctcccctgaaaatcaagctgggaggttttggttccaagcgtaagagatcctcgagtgaggatgatgacttagatgtggaatctgacttcgatgatgccagtatcaatagctattctgtttctgatggttccaccagccgtagtagccgcagccgcaagaaactccgaaccactaaaaagaaaaagaaaggcgaggaggaggtgactgctgtggatggttatgagacagaccaccaggactattgcgaggtgtgccagcaaggcggtgagatcatcctgtgtgatacctgtccccgtgcttaccacatggtctgcctggatcccgacatggagaaggctcccgagggcaagtggagctgcccacactgcgagaaggaaggcatccagtgggaagctaaagaggacaattcggagggtgaggagatcctggaagaggttgggggagacctcgaagaggaggatgaccaccatatggaattctgtcgggtctgcaaggatggtggggaactgctctgctgtgatacctgtccttcttcctaccacatccactgcctgaatcccccacttccagagatccccaacggtgaatggctctgtccccgttgtacgtgtccagctctgaagggcaaagtgcagaagatcctaatctggaagtggggtcagccaccatctcccacaccagtgcctcggcctccagatgctgatcccaacacgccctccccaaagcccttggaggggcggccagagcggcagttctttgtgaaatggcaaggcatgtcttactggcactgctcctgggtttctgaactgcagctggagctgcactgtcaggtgatgttccgaaactatcagcggaagaatgatatggatgagccaccttctggggactttggtggtgatgaagagaaaagccgaaagcgaaagaacaaggaccctaaatttgcagagatggaggaacgcttctatcgctatgggataaaacccgagtggatgatgatccaccgaatcctcaaccacagtgtggacaagaagggccacgtccactacttgatcaagtggcgggacttaccttacgatcaggcttcttgggagagtgaggatgtggagatccaggattacgacctgttcaagcagagctattggaatcacagggagttaatgaggggtgaggaaggccgaccaggcaagaagctcaagaaggtgaagcttcggaagttggagaggcctccagaaacgccaacagttgatccaacagtgaagtatgagcgacagccagagtacctggatgctacaggtggaaccctgcacccctatcaaatggagggcctgaattggttgcgcttctcctgggctcagggcactgacaccatcttggctgatgagatgggccttgggaaaactgtacagacagcagtcttcctgtattccctttacaaggagggtcattccaaaggccccttcctagtgagcgcccctctttctaccatcatcaactgggagcgggagtttgaaatgtgggctccagacatgtatgtcgtaacctatgtgggtgacaaggacagccgtgccatcatccgagagaatgagttctcctttgaagacaatgccattcgtggtggcaagaaggcctcccgcatgaagaaagaggcatctgtgaaattccatgtgctgctgacatcctatgaattgatcaccattgacatggctattttgggctctattgattgggcctgcctcatcgtggatgaagcccatcggctgaagaacaatcagtctaagttcttccgggtattgaatggttactcactccagcacaagctgttgctgactgggacaccattacaaaacaatctggaagagttgtttcatctgctcaactttctcacccccgagaggttccacaatttggaaggttttttggaggagtttgctgacattgccaaggaggaccagataaaaaaactgcatgacatgctggggccgcacatgttgcggcggctcaaagccgatgtgttcaagaacatgccctccaagacagaactaattgtgcgtgtggagctgagccctatgcagaagaaatactacaagtacatcctcactcgaaattttgaagcactcaatgcccgaggtggtggcaaccaggtgtctctgctgaatgtggtgatggatcttaagaagtgctgcaaccatccatacctcttccctgtggctgcaatggaagctcctaagatgcctaatggcatgtatgatggcagtgccctaatcagagcatctgggaaattattgctgctgcagaaaatgctcaagaaccttaaggagggtgggcatcgtgtactcatcttttcccagatgaccaagatgctagacctgctagaggatttcttggaacatgaaggttataaatacgaacgcatcgatggtggaatcactgggaacatgcggcaagaggccattgaccgcttcaatgcaccgggtgctcagcagttctgcttcttgctttccactcgagctgggggccttggaatcaatctggccactgctgacacagttattatctatgactctgactggaacccccataatgacattcaggcctttagcagagctcaccggattgggcaaaataaaaaggtaatgatctaccggtttgtgacccgtgcgtcagtggaggagcgcatcacgcaggtggcaaagaagaaaatgatgctgacgcatctagtggtgcggcctgggctgggctccaagactggatctatgtccaaacaggagcttgatgatatcctcaaatttggcactgaggaactattcaaggatgaagccactgatggaggaggagacaacaaagagggagaagatagcagtgttatccactacgatgataaggccattgaacggctgctagaccgtaaccaggatgagactgaagacacagaattgcagggcatgaatgaatatttgagctcattcaaagtggcccagtatgtggtacgggaagaagaaatgggggaggaagaggaggtagaacgggaaatcattaaacaggaagaaagtgtggatcctgactactgggagaaattgctgcggcaccattatgagcagcagcaagaagatctagcccgaaatctgggcaaaggaaaaagaatccgtaaacaggtcaactacaatgatggctcccaggaggaccgagattggcaggacgaccagtccgacaaccagtccgattactcagtggcttcagaggaaggtgatgaagactttgatgaacgttcagaagctccccgtaggcccagtcgtaagggcctgcggaatgataaagataagccattgcctcctctgttggcccgtgttggtgggaatattgaagtacttggttttaatgctcgtcagcgaaaagcctttcttaatgcaattatgcgatatggtatgccacctcaggatgcttttactacccagtggcttgtaagagacctgcgaggcaaatcagagaaagagttcaaggcatatgtctctcttttcatgcggcatttatgtgagccgggggcagatggggctgagacctttgctgatggtgtcccccgagaaggcctgtctcgccagcatgtccttactagaattggtgttatgtctttgattcgcaagaaggttcaggagtttgaacatgttaatgggcgctggagcatgcctgaactggctgaggtggaggaaaacaagaagatgtcccagccagggtcaccctccccaaaaactcctacaccctccactccaggggacacgcagcccaacactcctgcacctgtcccacctgctgaagatgggataaaaatagaggaaaatagcctcaaagaagaagagagcatagaaggagaaaaggaggttaaatctacagcccctgagactgccattgagtgtacacaggcccctgcccctgcctcagaggatgaaaaggtcgttgttgaaccccctgagggagaggagaaagtggaaaaggcagaggtgaaggagagaacagaggaacctatggagacagagcccaaaggtgctgctgatgtagagaaggtggaggaaaagtcagcaatagatctgacccctattgtggtagaagacaaagaagagaagaaagaagaagaagagaaaaaagaggtgatgcttcagaatggagagacccccaaggacctgaatgatgagaaacagaagaaaaatattaaacaacgtttcatgtttaacattgcagatggtggttttactgagttgcactccctttggcagaatgaagagcgggcagccacagttaccaagaagacttatgagatctggcatcgacggcatgactactggctgctagccggcattataaaccatggctatgcccggtggcaagacatccagaatgacccacgctatgccatcctcaatgagcctttcaagggtgaaatgaaccgtggcaatttcttagagatcaagaataaatttctagctcgaaggtttaagctcttagaacaagctctggtgattgaggaacagctgcgccgggctgcttacttgaacatgtcagaagacccttctcacccttccatggccctcaacacccgctttgctgaggtggagtgtttggcggaaagtcatcagcacctgtccaaggagtcaatggcaggaaacaagccagccaatgcagtcctgcacaaagttctgaaacagctggaagaactgctgagtgacatgaaagctgatgtgactcgactcccagctaccattgcccgaattcccccagttgctgtgaggttacagatgtcagagcgtaacattctcagccgcctggcaaaccgggcacccgaacctaccccacagcaggtagcccagcagcagtgaagatgcagactgataccacctccaccgctgagcagtgaccttcctcactttctcttgtcccagcttctcccctgggggcctgagagaccctcaccttccttctgcccatcttccatgttgtaaaggaacagccccagtgcactgggggaggggagggagtgaggggcagtggtgcccttcctgcagaagagacatgcagcagtagcgctggcgccatctgcaggagctggcgggctggccttctggaccctggcttctccccactgtaacgcctgttacacacaaactgttgtgggttcctgccaggcttgaagaaaatgatctgaattttttcctccttttggttttattttgttggtttattttgtgttttcttttctcctttttggggggtattcagagtgggctgggcccctgggcgagacacagctacctctgttggcatctttttaataccaggaacccagcggctctagccactgagcggctaaatgaaataaagtggaaaaaaaaaaaaaggaaaaaaccaaaagcataaaaaaccacagcaaatttcttgatgaaaattgaaaataaaagtttccttgtatttt

SEQ ID NO: 1059 - DNA, 6434 bp, Homo sapiens
  source 1..6434: mol_type = genomic DNA
attttccccccttcggccgcggcgaggaggagccggagcgggagtgacaccgagccggacccagcgcgacctgcggcggctccgggtgactcgggccagtgtagaggtcctcaggccgccggcaggagcagctgggccaattccctggccgggagcggaaggggcagtgaggaggaggatatggatgcacttttgaacaacagcctgcccccaccccacccagaaaatgaagaggacccagaagaggatttgtcagaaacagagactccaaagctcaagaagaagaaaaagcctaagaaacctcgggaccctaaaatccctaagagcaagcgccaaaaaaaggagctgggggacagctctggggaggggccagagtttgtggaggaggaggaagaggtggctctgcgctcagacagtgagggcagcgactatactcctggcaagaagaagaagaagaagcttggacctaagaaagagaagaagagcaaatccaagcggaaggaggaggaggaggaggaggatgatgatgatgattcaaaggagcctaaatcatctgctcagctcctggaagactggggcatggaagacattgaccacgtgttctcagaggaggattatcgaaccctcaccaactacaaggccttcagccagtttgtcagacccctcattgctgccaaaaatcccaagattgctgtctccaagatgatgatggttttgggtgcaaaatggcgggagttcagtaccaataaccccttcaaaggcagttctggggcatcagtggcagctgcggcagcagcagcggtagctgtggtggagagcatggtgacagccactgaggttgcaccaccacctccccctgtggaggtgcctatccgcaaggccaagaccaaggagggcaaaggtcccaatgctcggaggaagcccaagggcagccctcgtgtacctgatgccaagaagcctaaacccaagaaagtagctcccctgaaaatcaagctgggaggttttggttccaagcgtaagagatcctcgagtgaggatgatgacttagatgtggaatctgacttcgatgatgccagtatcaatagctattctgtttctgatggttccaccagccgtagtagccgcagccgcaagaaactccgaaccactaaaaagaaaaagaaaggcgaggaggaggtgactgctgtggatggttatgagacagaccaccaggactattgcgaggtgtgccagcaaggcggtgagatcatcctgtgtgatacctgtccccgtgcttaccacatggtctgcctggatcccgacatggagaaggctcccgagggcaagtggagctgcccacactgcgagaaggaaggcatccagtgggaagctaaagaggacaattcggagggtgaggagatcctggaagaggttgggggagacctcgaagaggaggatgaccaccatatggaattctgtcgggtctgcaaggatggtggggaactgctctgctgtgatacctgtccttcttcctaccacatccactgcctgaatcccccacttccagagatccccaacggtgaatggctctgtccccgttgtacgtgtccagctctgaagggcaaagtgcagaagatcctaatctggaagtggggtcagccaccatctcccacaccagtgcctcggcctccagatgctgatcccaacacgccctccccaaagcccttggaggggcggccagagcggcagttctttgtgaaatggcaaggcatgtcttactggcactgctcctgggtttctgaactgcagctggagctgcactgtcaggtgatgttccgaaactatcagcggaagaatgatatggatgagccaccttctggggactttggtggtgatgaagagaaaagccgaaagcgaaagaacaaggaccctaaatttgcagagatggaggaacgcttctatcgctatgggataaaacccgagtggatgatgatccaccgaatcctcaaccacagtgtggacaagaagggccacgtccactacttgatcaagtggcgggacttaccttacgatcaggcttcttgggagagtgaggatgtggagatccaggattacgacctgttcaagcagagctattggaatcacagggagttaatgaggggtgaggaaggccgaccaggcaagaagctcaagaaggtgaagcttcggaagttggagaggcctccagaaacgccaacagttgatccaacagtgaagtatgagcgacagccagagtacctggatgctacaggtggaaccctgcacccctatcaaatggagggcctgaattggttgcgcttctcctgggctcagggcactgacaccatcttggctgatgagatgggccttgggaaaactgtacagacagcagtcttcctgtattccctttacaaggagggtcattccaaaggccccttcctagtgagcgcccctctttctaccatcatcaactgggagcgggagtttgaaatgtgggctccagacatgtatgtcgtaacctatgtgggtgacaaggacagccgtgccatcatccgagagaatgagttctcctttgaagacaatgccattcgtggtggcaagaaggcctcccgcatgaagaaagaggcatctgtgaaattccatgtgctgctgacatcctatgaattgatcaccattgacatggctattttgggctctattgattgggcctgcctcatcgtggatgaagcccatcggctgaagaacaatcagtctaagttcttccgggtattgaatggttactcactccagcacaagctgttgctgactgggacaccattacaaaacaatctggaagagttgtttcatctgctcaactttctcacccccgagaggttccacaatttggaaggttttttggaggagtttgctgacattgccaaggaggaccagataaaaaaactgcatgacatgctggggccgcacatgttgcggcggctcaaagccgatgtgttcaagaacatgccctccaagacagaactaattgtgcgtgtggagctgagccctatgcagaagaaatactacaagtacatcctcactcgaaattttgaagcactcaatgcccgaggtggtggcaaccaggtgtctctgctgaatgtggtgatggatcttaagaagtgctgcaaccatccatacctcttccctgtggctgcaatggaagctcctaagatgcctaatggcatgtatgatggcagtgccctaatcagagcatctgggaaattattgctgctgcagaaaatgctcaagaaccttaaggagggtgggcatcgtgtactcatcttttcccagatgaccaagatgctagacctgctagaggatttcttggaacatgaaggttataaatacgaacgcatcgatggtggaatcactgggaacatgcggcaagaggccattgaccgcttcaatgcaccgggtgctcagcagttctgcttcttgctttccactcgagctgggggccttggaatcaatctggccactgctgacacagttattatctatgactctgactggaacccccataatgacattcaggcctttagcagagctcaccggattgggcaaaataaaaaggtaatgatctaccggtttgtgacccgtgcgtcagtggaggagcgcatcacgcaggtggcaaagaagaaaatgatgctgacgcatctagtggtgcggcctgggctgggctccaagactggatctatgtccaaacaggagcttgatgatatcctcaaatttggcactgaggaactattcaaggatgaagccactgatggaggaggagacaacaaagagggagaagatagcagtgttatccactacgatgataaggccattgaacggctgctagaccgtaaccaggatgagactgaagacacagaattgcagggcatgaatgaatatttgagctcattcaaagtggcccagtatgtggtacgggaagaagaaatgggggaggaagaggaggtagaacgggaaatcattaaacaggaagaaagtgtggatcctgactactgggagaaattgctgcggcaccattatgagcagcagcaagaagatctagcccgaaatctgggcaaaggaaaaagaatccgtaaacaggtcaactacaatgatggctcccaggaggaccgagattggcaggacgaccagtccgacaaccagtccgattactcagtggcttcagaggaaggtgatgaagactttgatgaacgttcagaagctccccgtaggcccagtcgtaagggcctgcggaatgataaagataagccattgcctcctctgttggcccgtgttggtgggaatattgaagtacttggttttaatgctcgtcagcgaaaagcctttcttaatgcaattatgcgatatggtatgccacctcaggatgcttttactacccagtggcttgtaagagacctgcgaggcaaatcagagaaagagttcaaggcatatgtctctcttttcatgcggcatttatgtgagccgggggcagatggggctgagacctttgctgatggtgtcccccgagaaggcctgtctcgccagcatgtccttactagaattggtgttatgtctttgattcgcaagaaggttcaggagtttgaacatgttaatgggcgctggagcatgcctgaactggctgaggtggaggaaaacaagaagatgtcccagccagggtcaccctccccaaaaactcctacaccctccactccaggggacacgcagcccaacactcctgcacctgtcccacctgctgaagatgggataaaaatagaggaaaatagcctcaaagaagaagagagcatagaaggagaaaaggaggttaaatctacagcccctgagactgccattgagtgtacacaggcccctgcccctgcctcagaggatgaaaaggtcgttgttgaaccccctgagggagaggagaaagtggaaaaggcagaggtgaaggagagaacagaggaacctatggagacagagcccaaaggtgctgctgatgtagagaaggtggaggaaaagtcagcaatagatctgacccctattgtggtagaagacaaagaagagaagaaagaagaagaagagaaaaaagaggtgatgcttcagaatggagagacccccaaggacctgaatgatgagaaacagaagaaaaatattaaacaacgtttcatgtttaacattgcagatggtggttttactgagttgcactccctttggcagaatgaagagcgggcagccacagttaccaagaagacttatgagatctggcatcgacggcatgactactggctgctagccggcattataaaccatggctatgcccggtggcaagacatccagaatgacccacgctatgccatcctcaatgagcctttcaagggtgaaatgaaccgtggcaatttcttagagatcaagaataaatttctagctcgaaggtttaagctcttagaacaagctctggtgattgaggaacagctgcgccgggctgcttacttgaacatgtcagaagacccttctcacccttccatggccctcaacacccgctttgctgaggtggagtgtttggcggaaagtcatcagcacctgtccaaggagtcaatggcaggaaacaagccagccaatgcagtcctgcacaaagttctgaaacagctggaagaactgctgagtgacatgaaagctgatgtgactcgactcccagctaccattgcccgaattcccccagttgctgtgaggttacagatgtcagagcgtaacattctcagccgcctggcaaaccgggcacccgaacctaccccacagcaggtagcccagcagcagtgaagatgcagactgataccacctccaccgctgagcagtgaccttcctcactttctcttgtcccagcttctcccctgggggcctgagagaccctcaccttccttctgcccatcttccatgttgtaaaggaacagccccagtgcactgggggaggggagggagtgaggggcagtggtgcccttcctgcagaagagacatgcagcagtagcgctggcgccatctgcaggagctggcgggctggccttctggaccctggcttctccccactgtaacgcctgttacacacaaactgttgtgggttcctgccaggcttgaagaaaatgatctgaattttttcctccttttggttttattttgttggtttattttgtgttttcttttctcctttttggggggtattcagagtgggctgggcccctgggcgagacacagctacctctgttggcatctttttaataccaggaacccagcggctctagccactgagcggctaaatgaaataaagtggaaaaaaaaaaaaaggaaaaaaccaaaagcataaaaaaccacagcaaatttcttgatgaaaattgaaaataaaagtttccttgtatttt

SEQ ID NO: 1060 - DNA, 6514 bp, Homo sapiens
  source 1..6514: mol_type = genomic DNA
gtttcaggccctttaagaggcgacgctggagccggagccattttccccccttcggccgcggcgaggaggagccggagcgggagtgacaccgagccggacccagcgcgacctgcggcggctccgggtgactcgggccagtgtagaggtcctcaggccgccggcaggagcagctgggccaattccctggccgggagcggaaggggatggcgtcgggcctgggctccccgtccccctgctcggcgggcagtgaggaggaggatatggatgcacttttgaacaacagcctgcccccaccccacccagaaaatgaagaggacccagaagaggatttgtcagaaacagagactccaaagctcaagaagaagaaaaagcctaagaaacctcgggaccctaaaatccctaagagcaagcgccaaaaaaaggagctgggggacagctctggggaggggccagagtttgtggaggaggaggaagaggtggctctgcgctcagacagtgagggcagcgactatactcctggcaagaagaagaagaagaagcttggacctaagaaagagaagaagagcaaatccaagcggaaggaggaggaggaggaggaggatgatgatgatgattcaaaggagcctaaatcatctgctcagctcctggaagactggggcatggaagacattgaccacgtgttctcagaggaggattatcgaaccctcaccaactacaaggccttcagccagtttgtcagacccctcattgctgccaaaaatcccaagattgctgtctccaagatgatgatggttttgggtgcaaaatggcgggagttcagtaccaataaccccttcaaaggcagttctggggcatcagtggcagctgcggcagcagcagcggtagctgtggtggagagcatggtgacagccactgaggttgcaccaccacctccccctgtggaggtgcctatccgcaaggccaagaccaaggagggcaaaggtcccaatgctcggaggaagcccaagggcagccctcgtgtacctgatgccaagaagcctaaacccaagaaagtagctcccctgaaaatcaagctgggaggttttggttccaagcgtaagagatcctcgagtgaggatgatgacttagatgtggaatctgacttcgatgatgccagtatcaatagctattctgtttctgatggttccaccagccgtagtagccgcagccgcaagaaactccgaaccactaaaaagaaaaagaaaggcgaggaggaggtgactgctgtggatggttatgagacagaccaccaggactattgcgaggtgtgccagcaaggcggtgagatcatcctgtgtgatacctgtccccgtgcttaccacatggtctgcctggatcccgacatggagaaggctcccgagggcaagtggagctgcccacactgcgagaaggaaggcatccagtgggaagctaaagaggacaattcggagggtgaggagatcctggaagaggttgggggagacctcgaagaggaggatgaccaccatatggaattctgtcgggtctgcaaggatggtggggaactgctctgctgtgatacctgtccttcttcctaccacatccactgcctgaatcccccacttccagagatccccaacggtgaatggctctgtccccgttgtacgtgtccagctctgaagggcaaagtgcagaagatcctaatctggaagtggggtcagccaccatctcccacaccagtgcctcggcctccagatgctgatcccaacacgccctccccaaagcccttggaggggcggccagagcggcagttctttgtgaaatggcaaggcatgtcttactggcactgctcctgggtttctgaactgcagctggagctgcactgtcaggtgatgttccgaaactatcagcggaagaatgatatggatgagccaccttctggggactttggtggtgatgaagagaaaagccgaaagcgaaagaacaaggaccctaaatttgcagagatggaggaacgcttctatcgctatgggataaaacccgagtggatgatgatccaccgaatcctcaaccacagtgtggacaagaagggccacgtccactacttgatcaagtggcgggacttaccttacgatcaggcttcttgggagagtgaggatgtggagatccaggattacgacctgttcaagcagagctattggaatcacagggagttaatgaggggtgaggaaggccgaccaggcaagaagctcaagaaggtgaagcttcggaagttggagaggcctccagaaacgccaacagttgatccaacagtgaagtatgagcgacagccagagtacctggatgctacaggtggaaccctgcacccctatcaaatggagggcctgaattggttgcgcttctcctgggctcagggcactgacaccatcttggctgatgagatgggccttgggaaaactgtacagacagcagtcttcctgtattccctttacaaggagggtcattccaaaggccccttcctagtgagcgcccctctttctaccatcatcaactgggagcgggagtttgaaatgtgggctccagacatgtatgtcgtaacctatgtgggtgacaaggacagccgtgccatcatccgagagaatgagttctcctttgaagacaatgccattcgtggtggcaagaaggcctcccgcatgaagaaagaggcatctgtgaaattccatgtgctgctgacatcctatgaattgatcaccattgacatggctattttgggctctattgattgggcctgcctcatcgtggatgaagcccatcggctgaagaacaatcagtctaagttcttccgggtattgaatggttactcactccagcacaagctgttgctgactgggacaccattacaaaacaatctggaagagttgtttcatctgctcaactttctcacccccgagaggttccacaatttggaaggttttttggaggagtttgctgacattgccaaggaggaccagataaaaaaactgcatgacatgctggggccgcacatgttgcggcggctcaaagccgatgtgttcaagaacatgccctccaagacagaactaattgtgcgtgtggagctgagccctatgcagaagaaatactacaagtacatcctcactcgaaattttgaagcactcaatgcccgaggtggtggcaaccaggtgtctctgctgaatgtggtgatggatcttaagaagtgctgcaaccatccatacctcttccctgtggctgcaatggaagctcctaagatgcctaatggcatgtatgatggcagtgccctaatcagagcatctgggaaattattgctgctgcagaaaatgctcaagaaccttaaggagggtgggcatcgtgtactcatcttttcccagatgaccaagatgctagacctgctagaggatttcttggaacatgaaggttataaatacgaacgcatcgatggtggaatcactgggaacatgcggcaagaggccattgaccgcttcaatgcaccgggtgctcagcagttctgcttcttgctttccactcgagctgggggccttggaatcaatctggccactgctgacacagttattatctatgactctgactggaacccccataatgacattcaggcctttagcagagctcaccggattgggcaaaataaaaaggtaatgatctaccggtttgtgacccgtgcgtcagtggaggagcgcatcacgcaggtggcaaagaagaaaatgatgctgacgcatctagtggtgcggcctgggctgggctccaagactggatctatgtccaaacaggagcttgatgatatcctcaaatttggcactgaggaactattcaaggatgaagccactgatggaggaggagacaacaaagagggagaagatagcagtgttatccactacgatgataaggccattgaacggctgctagaccgtaaccaggatgagactgaagacacagaattgcagggcatgaatgaatatttgagctcattcaaagtggcccagtatgtggtacgggaagaagaaatgggggaggaagaggaggtagaacgggaaatcattaaacaggaagaaagtgtggatcctgactactgggagaaattgctgcggcaccattatgagcagcagcaagaagatctagcccgaaatctgggcaaaggaaaaagaatccgtaaacaggtcaactacaatgatggctcccaggaggaccgagattggcaggacgaccagtccgacaaccagtccgattactcagtggcttcagaggaaggtgatgaagactttgatgaacgttcagaagctccccgtaggcccagtcgtaagggcctgcggaatgataaagataagccattgcctcctctgttggcccgtgttggtgggaatattgaagtacttggttttaatgctcgtcagcgaaaagcctttcttaatgcaattatgcgatatggtatgccacctcaggatgcttttactacccagtggcttgtaagagacctgcgaggcaaatcagagaaagagttcaaggcatatgtctctcttttcatgcggcatttatgtgagccgggggcagatggggctgagacctttgctgatggtgtcccccgagaaggcctgtctcgccagcatgtccttactagaattggtgttatgtctttgattcgcaagaaggttcaggagtttgaacatgttaatgggcgctggagcatgcctgaactggctgaggtggaggaaaacaagaagatgtcccagccagggtcaccctccccaaaaactcctacaccctccactccaggggacacgcagcccaacactcctgcacctgtcccacctgctgaagatgggataaaaatagaggaaaatagcctcaaagaagaagagagcatagaaggagaaaaggaggttaaatctacagcccctgagactgccattgagtgtacacaggcccctgcccctgcctcagaggatgaaaaggtcgttgttgaaccccctgagggagaggagaaagtggaaaaggcagaggtgaaggagagaacagaggaacctatggagacagagcccaaaggtgctgctgatgtagagaaggtggaggaaaagtcagcaatagatctgacccctattgtggtagaagacaaagaagagaagaaagaagaagaagagaaaaaagaggtgatgcttcagaatggagagacccccaaggacctgaatgatgagaaacagaagaaaaatattaaacaacgtttcatgtttaacattgcagatggtggttttactgagttgcactccctttggcagaatgaagagcgggcagccacagttaccaagaagacttatgagatctggcatcgacggcatgactactggctgctagccggcattataaaccatggctatgcccggtggcaagacatccagaatgacccacgctatgccatcctcaatgagcctttcaagggtgaaatgaaccgtggcaatttcttagagatcaagaataaatttctagctcgaaggtttaagctcttagaacaagctctggtgattgaggaacagctgcgccgggctgcttacttgaacatgtcagaagacccttctcacccttccatggccctcaacacccgctttgctgaggtggagtgtttggcggaaagtcatcagcacctgtccaaggagtcaatggcaggaaacaagccagccaatgcagtcctgcacaaagttctgaaacagctggaagaactgctgagtgacatgaaagctgatgtgactcgactcccagctaccattgcccgaattcccccagttgctgtgaggttacagatgtcagagcgtaacattctcagccgcctggcaaaccgggcacccgaacctaccccacagcaggtagcccagcagcagtgaagatgcagactgataccacctccaccgctgagcagtgaccttcctcactttctcttgtcccagcttctcccctgggggcctgagagaccctcaccttccttctgcccatcttccatgttgtaaaggaacagccccagtgcactgggggaggggagggagtgaggggcagtggtgcccttcctgcagaagagacatgcagcagtagcgctggcgccatctgcaggagctggcgggctggccttctggaccctggcttctccccactgtaacgcctgttacacacaaactgttgtgggttcctgccaggcttgaagaaaatgatctgaattttttcctccttttggttttattttgttggtttattttgtgttttcttttctcctttttggggggtattcagagtgggctgggcccctgggcgagacacagctacctctgttggcatctttttaataccaggaacccagcggctctagccactgagcggctaaatgaaataaagtggaaaaaaaaaaaaaggaaaaaaccaaaagcataaaaaaccacagcaaatttcttgatgaaaattgaaaataaaagtttccttgtatttt

SEQ ID NO: 1061 - DNA, 6554 bp, Homo sapiens
  source 1..6554: mol_type = genomic DNA
cgcggcgaggaggagccggagcgggagtgacaccgagccggacccagcgcgacctgcggcggctccgggtgactcgggccagtgtagaggtcctcaggccgccggcaggagcagctgggccaattccctggccgggagcggaaggggatggcgtcgggcctgggctccccgtccccctgctcggcgggcagtgaggaggaggatatggatgcacttttgaacaacagcctgcccccaccccacccagaggacccagaagaggatttgtcagaaacagagactccaaagctcaagaagaagaaaaagcctaagaaacctcgggaccctaaaatccctaagagcaagcgccaaaaaaaggagcgtatgctcttatgccggcagctgggggacagctctggggaggggccagagtttgtggaggaggaggaagaggtggctctgcgctcagacagtgagggcagcgactatactcctggcaagaagaagaagaagaagcttggacctaagaaagagaagaagagcaaatccaagcggaaggaggaggaggaggaggaggatgatgatgatgattcaaaggagcctaaatcatctgctcagctcctggaagactggggcatggaagacattgaccacgtgttctcagaggaggattatcgaaccctcaccaactacaaggccttcagccagtttgtcagacccctcattgctgccaaaaatcccaagattgctgtctccaagatgatgatggttttgggtgcaaaatggcgggagttcagtaccaataaccccttcaaaggcagttctggggcatcagtggcagctgcggcagcagcagcggtagctgtggtggagagcatggtgacagccactgaggttgcaccaccacctccccctgtggaggtgcctatccgcaaggccaagaccaaggagggcaaaggtcccaatgctcggaggaagcccaagggcagccctcgtgtacctgatgccaagaagcctaaacccaagaaagtagctcccctgaaaatcaagctgggaggttttggttccaagcgtaagagatcctcgagtgaggatgatgacttagatgtggaatctgacttcgatgatgccagtatcaatagctattctgtttctgatggttccaccagccgtagtagccgcagccgcaagaaactccgaaccactaaaaagaaaaagaaaggcgaggaggaggtgactgctgtggatggttatgagacagaccaccaggactattgcgaggtgtgccagcaaggcggtgagatcatcctgtgtgatacctgtccccgtgcttaccacatggtctgcctggatcccgacatggagaaggctcccgagggcaagtggagctgcccacactgcgagaaggaaggcatccagtgggaagctaaagaggacaattcggagggtgaggagatcctggaagaggttgggggagacctcgaagaggaggatgaccaccatatggaattctgtcgggtctgcaaggatggtggggaactgctctgctgtgatacctgtccttcttcctaccacatccactgcctgaatcccccacttccagagatccccaacggtgaatggctctgtccccgttgtacgtgtccagctctgaagggcaaagtgcagaagatcctaatctggaagtggggtcagccaccatctcccacaccagtgcctcggcctccagatgctgatcccaacacgccctccccaaagcccttggaggggcggccagagcggcagttctttgtgaaatggcaaggcatgtcttactggcactgctcctgggtttctgaactgcagctggagctgcactgtcaggtgatgttccgaaactatcagcggaagaatgatatggatgagccaccttctggggactttggtggtgatgaagagaaaagccgaaagcgaaagaacaaggaccctaaatttgcagagatggaggaacgcttctatcgctatgggataaaacccgagtggatgatgatccaccgaatcctcaaccacagtgtggacaagaagggccacgtccactacttgatcaagtggcgggacttaccttacgatcaggcttcttgggagagtgaggatgtggagatccaggattacgacctgttcaagcagagctattggaatcacagggagttaatgaggggtgaggaaggccgaccaggcaagaagctcaagaaggtgaagcttcggaagttggagaggcctccagaaacgccaacagttgatccaacagtgaagtatgagcgacagccagagtacctggatgctacaggtggaaccctgcacccctatcaaatggagggcctgaattggttgcgcttctcctgggctcagggcactgacaccatcttggctgatgagatgggccttgggaaaactgtacagacagcagtcttcctgtattccctttacaaggagggtcattccaaaggccccttcctagtgagcgcccctctttctaccatcatcaactgggagcgggagtttgaaatgtgggctccagacatgtatgtcgtaacctatgtgggtgacaaggacagccgtgccatcatccgagagaatgagttctcctttgaagacaatgccattcgtggtggcaagaaggcctcccgcatgaagaaagaggcatctgtgaaattccatgtgctgctgacatcctatgaattgatcaccattgacatggctattttgggctctattgattgggcctgcctcatcgtggatgaagcccatcggctgaagaacaatcagtctaagttcttccgggtattgaatggttactcactccagcacaagctgttgctgactgggacaccattacaaaacaatctggaagagttgtttcatctgctcaactttctcacccccgagaggttccacaatttggaaggttttttggaggagtttgctgacattgccaaggaggaccagataaaaaaactgcatgacatgctggggccgcacatgttgcggcggctcaaagccgatgtgttcaagaacatgccctccaagacagaactaattgtgcgtgtggagctgagccctatgcagaagaaatactacaagtacatcctcactcgaaattttgaagcactcaatgcccgaggtggtggcaaccaggtgtctctgctgaatgtggtgatggatcttaagaagtgctgcaaccatccatacctcttccctgtggctgcaatggaagctcctaagatgcctaatggcatgtatgatggcagtgccctaatcagagcatctgggaaattattgctgctgcagaaaatgctcaagaaccttaaggagggtgggcatcgtgtactcatcttttcccagatgaccaagatgctagacctgctagaggatttcttggaacatgaaggttataaatacgaacgcatcgatggtggaatcactgggaacatgcggcaagaggccattgaccgcttcaatgcaccgggtgctcagcagttctgcttcttgctttccactcgagctgggggccttggaatcaatctggccactgctgacacagttattatctatgactctgactggaacccccataatgacattcaggcctttagcagagctcaccggattgggcaaaataaaaaggtaatgatctaccggtttgtgacccgtgcgtcagtggaggagcgcatcacgcaggtggcaaagaagaaaatgatgctgacgcatctagtggtgcggcctgggctgggctccaagactggatctatgtccaaacaggagcttgatgatatcctcaaatttggcactgaggaactattcaaggatgaagccactgatggaggaggagacaacaaagagggagaagatagcagtgttatccactacgatgataaggccattgaacggctgctagaccgtaaccaggatgagactgaagacacagaattgcagggcatgaatgaatatttgagctcattcaaagtggcccagtatgtggtacgggaagaagaaatgggggaggaagaggaggtagaacgggaaatcattaaacaggaagaaagtgtggatcctgactactgggagaaattgctgcggcaccattatgagcagcagcaagaagatctagcccgaaatctgggcaaaggaaaaagaatccgtaaacaggtcaactacaatgatggctcccaggaggaccgaggtgtgtgtggccggccccgccccccacccatgggccgttccactagagcagtgggccccgctcatctgccctctctccctccagattggcaggacgaccagtccgacaaccagtccgattactcagtggcttcagaggaaggtgatgaagactttgatgaacgttcagaagctccccgtaggcccagtcgtaagggcctgcggaatgataaagataagccattgcctcctctgttggcccgtgttggtgggaatattgaagtacttggttttaatgctcgtcagcgaaaagcctttcttaatgcaattatgcgatatggtatgccacctcaggatgcttttactacccagtggcttgtaagagacctgcgaggcaaatcagagaaagagttcaaggcatatgtctctcttttcatgcggcatttatgtgagccgggggcagatggggctgagacctttgctgatggtgtcccccgagaaggcctgtctcgccagcatgtccttactagaattggtgttatgtctttgattcgcaagaaggttcaggagtttgaacatgttaatgggcgctggagcatgcctgaactggctgaggtggaggaaaacaagaagatgtcccagccagggtcaccctccccaaaaactcctacaccctccactccaggggacacgcagcccaacactcctgcacctgtcccacctgctgaagatgggataaaaatagaggaaaatagcctcaaagaagaagagagcatagaaggagaaaaggaggttaaatctacagcccctgagactgccattgagtgtacacaggcccctgcccctgcctcagaggatgaaaaggtcgttgttgaaccccctgagggagaggagaaagtggaaaaggcagaggtgaaggagagaacagaggaacctatggagacagagcccaaaggtgctgctgatgtagagaaggtggaggaaaagtcagcaatagatctgacccctattgtggtagaagacaaagaagagaagaaagaagaagaagagaaaaaagaggtgatgcttcagaatggagagacccccaaggacctgaatgatgagaaacagaagaaaaatattaaacaacgtttcatgtttaacattgcagatggtggttttactgagttgcactccctttggcagaatgaagagcgggcagccacagttaccaagaagacttatgagatctggcatcgacggcatgactactggctgctagccggcattataaaccatggctatgcccggtggcaagacatccagaatgacccacgctatgccatcctcaatgagcctttcaagggtgaaatgaaccgtggcaatttcttagagatcaagaataaatttctagctcgaaggtttaagctcttagaacaagctctggtgattgaggaacagctgcgccgggctgcttacttgaacatgtcagaagacccttctcacccttccatggccctcaacacccgctttgctgaggtggagtgtttggcggaaagtcatcagcacctgtccaaggagtcaatggcaggaaacaagccagccaatgcagtcctgcacaaagttctgaaacagctggaagaactgctgagtgacatgaaagctgatgtgactcgactcccagctaccattgcccgaattcccccagttgctgtgaggttacagatgtcagagcgtaacattctcagccgcctggcaaaccgggcacccgaacctaccccacagcaggtagcccagcagcagtgaagatgcagactgataccacctccaccgctgagcagtgaccttcctcactttctcttgtcccagcttctcccctgggggcctgagagaccctcaccttccttctgcccatcttccatgttgtaaaggaacagccccagtgcactgggggaggggagggagtgaggggcagtggtgcccttcctgcagaagagacatgcagcagtagcgctggcgccatctgcaggagctggcgggctggccttctggaccctggcttctccccactgtaacgcctgttacacacaaactgttgtgggttcctgccaggcttgaagaaaatgatctgaattttttcctccttttggttttattttgttggtttattttgtgttttcttttctcctttttggggggtattcagagtgggctgggcccctgggcgagacacagctacctctgttggcatctttttaataccaggaacccagcggctctagccactgagcggctaaatgaaataaagtggaaaaaaaaaaaaaggaaaaaaccaaaagcataaaaaaccacagcaaatttcttgatgaaaattgaaaataaaagtttccttgtatttt

SEQ ID NO: 1062 - DNA, 1317 bp, Homo sapiens
  source 1..1317: mol_type = genomic DNA
atgggctgtccgtgggggggcggggcctgtgcggtgggatttcccggccggtgtttcaggccctttaagaggcgacgctggagccggagccattttccccccttcggccgcggcgaggaggagccggagcgggagtgacaccgagccggacccagcgcgacctgcggcggctccgggtgactcgggccagtgtagaggtcctcaggccgccggcaggagcagctgggccaattccctggccgggagcggaaggggatggcgtcgggcctgggctccccgtccccctgctcggcgggcagtgaggaggaggatatggatgcacttttgaacaacagcctgcccccaccccacccagaaaatgaagaggacccagaagaggatttgtcagaaacagagactccaaagctcaagaagaagaaaaagcctaagaaacctcgggaccctaaaatccctaagagcaagcgccaaaaaaaggagcgtatgctcttatgccggcagctgggggacagctctggggaggggccagagtttgtggaggaggaggaagaggtggctctgcgctcagacagtgagggcagcgactatactcctggcaagaagaagaagaagaagcttggacctaagaaagagaagaagagcaaatccaagcggaaggaggaggaggaggaggaggatgatgatgatgattcaaaggagcctaaatcatctgctcagctcctggaagactggggcatggaagacattgaccacgtgttctcagaggaggattatcgaaccctcaccaactacaaggccttcagccagtttgtcagacccctcattgctgccaaaaatcccaagattgctgtctccaagatgatgatggttttgggtgcaaaatggcgggagttcagtaccaataaccccttcaaaggcagttctggggcatcagtggcagctgcggcagcagcagcggtagctgtggtggagagcatggtgacagccactgaggttgcaccaccacctccccctgtggaggtgcctatccgcaaggccaagaccaaggagggcaaaggtcccaatgctcggaggaagcccaagggcagccctcgtgtacctgatgccaagaagcctaaacccaagaaagtagctcccctgaaaatcaagctgggaggttttggttccaagcgtaagagatcctcgagtgaggatgatgacttagatgtggaatctgacttcgatgatgccagtatcaatagctattctgtttctgatggttccaccagccgtagtagccgcagccgcaagaaactccgaaccactaaaaagaaaaagaaa

SEQ ID NO: 1063 - DNA, 1317 bp, Homo sapiens; identical to SEQ ID NO: 1062
  source 1..1317: mol_type = genomic DNA

SEQ ID NO: 1064 - DNA, 4355 bp, Homo sapiens
  source 1..4355: mol_type = genomic DNA
ggctttggccctggaaagcctcgcggacgtgttctgacccaaggttttagcagtggatgtggcgttttcttccattccttctttcagtttttctgtactcgttgcttgcaattaagtgtaaatacttttgctagtggataatgggggaggcaaggactgagacctgcggtatgacgatagctctggctcttaatagtttgaggtaaagcgagatactctgagcttttgtctcccgtaaaaagggtggtgaatatgaataagggctttcttagcgttataagaattaaagggcatagttctgtggtgtgaaatctttaaaagatgttcagtaaataaaaatgattttcctccttcccctctcagacctctttttcttctttctttctttttttttgacaagttctcactcctctcacccaggctggagtctttctgaaagagttcttccgcttgttgttggctttcaactgttggatttgaggcgcttagcgccttcttcgtccgggtgcagcacattcttgattggtctcatgcctttgtggttgtaaatgtgcctggaatcctagcctttcatggtttgttctgagtaatgaataccctattactatgatactagtatcttccttaattatcctactcattgtctcaacattctgacagttggattgagcatattcaaattttgaaaattattgtagaaatgtttttacctcatatgaaccacctgacattggaacagactttcttttcacaagtgttaccaaagactgtgaaattattcgatgacatgatgtatgaattaaccagtcaagccagaggactgtcaagccaaaatttggaaatccagaccactctaaggaatattttacaaacaatggtgcagctcttaggagctctcacaggatgtgttcagcatatctgtgccacacaggaatccatcattttggaaaatattcagagtctcccctcctcagtccttcatataattaaaagcacatttgtgcattgtaagaatagtgaatctgtgtattctgggtgtttacacctagtttcagaccttctccaggctcttttcaaggaggcctattctcttcaaaagcagttaatggaactgctggacatggtttgcatggaccctttagtagatgacaatgatgatattttgaatatggtaatagttattcattctttattggatatctgctctgttatttccagtatggaccatgcatttcatgccaatacttggaagtttataattaagcagagccttaagcaccagtccataataaaaagccagttgaaacacaaagatataattactagcttgtgtgaagacattcttttctccttccattcttgtttacagttagctgagcagatgacacagtcagatgcacaggataatgctgactacagattatttcagaaaacactcaaattgtgtcgtttttttgccaactcccttttgcactacgctaaggaatttcttcctttcctctctgattcttgctgtactttgcaccaactgtatcttcagatacacagcaagtttcctccaagcctttatgctaccaggatttctaaagcacaccaagaggaaatagcaggtgctttcctagtgacactggatccacttatcagtcagctgctcacatttcagcctttcatgcaggtggttttggacagtaaattagacctgccatgtgaactgcagtttccacaatgtcttcttctggttgttgtcatggataagctgccatctcagcctaaggaagtgcaaaccctgtggtgcacagacagccaggtctcagaaacgacaaccaggatatctctactcaaagccgttttctacagttttgagcagtgttctggtgaactctctctacctgttcatttacagggattaaagagtaaggggaaagctgaggtggctgtcaccttgtatcagcatgtttgtgttcatctgtgtacatttattacttcctttcatccctcactgtttgctgaactggatgctgctctgctgaatgctgtacttagtgctaatatgatcacctctttgttagctatggatgcatggtgcttccttgctcgatatgggactgctgaactgtgtgcacaccatgtcaccatagtggctcatctgataaagtcatgccctggagaatgttatcaactcatcaacctatcaatactgttgaagcgtctctttttcttcatggcaccaccccatcagctggagtttatccagaaattttccccaaaagaagcagaaaatctgcctctgtggcaacatatttccttccaggcgttacctcctgagcttagggaacaaactgtccatgaggtcaccacagtaggcactgcagaatgcaggaaatggctgagcaggagtcgtactttgggagaactagaatctctgaacacagtactgtctgctttgcttgcagtatgtaattctgctggtgaagctttggatacaggaaaacaaactgcaattatcgaagttgtgagtcagctttgggcttttttaaacattaaacaggtagcagatcaaccttatgttcaacagacattcagccttttacttccactgttgggatttttcattcaaactctagatcctaaactgatacttcaggcagtaactttgcagacctcgctacttaaattagagcttcctgactatgttcgtttggcaatgttggattttgtatcttctttaggaaaactttttatacctgaagctatccaggacagaattctgcccaacctgtcctgtatgtttgccttactgctagctgacaggagttggctgctagaacaacataccttggaggcgtttactcagttcgctgagggaacaaatcatgaagagatagttccacagtgtctcagttctgaagaaactaagaacaaagttgtatcctttctggagaagactgggtttgtagatgaaactgaagctgccaaagtggaacgtgtgaaacaggaaaaaggtattttctgggaaccctttgctaatgtgactgtagaagaagcaaagaggtcatctttacagccttatgcaaaaagagctcgtcaggagttcccctgggaagaagagtacaggtcagcgctgcatacaatagcaggggctttggaagcaactgagtcactactccaaaagggtcctgctccagcctggctttcaatggaaatggaggcgctccaagaaaggatggataagctaaaacgttacatacatactctagggtgaaacttatcactaggcagaactgggtttgatgctttgtcaactgaaaatacttatgtctgtacattttctaacagatataaaacaaattttgtaaagttgaatctagtgaaaataatctttatttgacatttagagaacaggattgtggggaatattcttattaagaactttggtacaatgtactacatgtggaacagtcaggaactgcctaggtccacaaagaaccatttactcagatagtctaactgtaaacaaataaataagctgcctaaggaaacctcagcaatttaaaatcatttatataatttatagctaaaattttttaaagttgtatttcataatagagcttactcttatgttaaagaatggcacaaaattaagctaaccagcttgaattacattttctttacttccagaattgtcctggaaaaagcagtaaattcgacctctcctcagctacttgctcttcatagaaactggcctcagtcaaatgcacaaaggctcttcctcctggaaaccagtactgtgagcctcaccacccagggcttttagccagcactcacagtcagtctcctacttcagttggcacagactggataatgagctcctgggatgggaaaagcaggccactttggggttttcttgtcccaaagcctgcttttgaggtattgattttttttaaaaaaagggaatcctttttcctaaagtttaactcacatctattgtcaccagttattatcttcccagttcagctccccttcttcttcccagccttcagcctctccctgcaacaaaataaagcacaccaagaacccactgaaacaaatcatatgcaaaaatcatacgcaaatttgaaaaagcaggaatttaaaatttatcttttgatgccagaaacactacctcgtactaagtaaaataacttagagctctaacagaaagttgaaaagtaggattacaaaaccatggcactggaaaatagcttttcaaaaaccataaaatccagtaaaaatcagtgtggatgacaccaaatccttattttaatcccttttttttctttttcaaataaaaaggttacaatagctcattaaacaaa

SEQ ID NO: 1065 - DNA, 4002 bp, Homo sapiens
  source 1..4002: mol_type = genomic DNA
ttccggtctgggctttggcgggtctggtttgaagctctcctgtttgacgaaagtatgtctcaggaaggctggagtctttctgaaagagttcttccgcttgttgttggctttcaactgttggatttgaggcgcttagcgccttcttcgtccgggtgcagcacattcttgattggtctcatgcctttgtggttgtaaatgtgcctggaatcctagcctttcatggtttgttctgagtaatgaataccctattactatgatactagtatcttccttaattatcctactcattgtctcaacattctgacagttggattgagcatattcaaattttgaaaattattgtagaaatgtttttacctcatatgaaccacctgacattggaacagactttcttttcacaagtgttaccaaagactgtgaaattattcgatgacatgatgtatgaattaaccagtcaagccagaggactgtcaagccaaaatttggaaatccagaccactctaaggaatattttacaaacaatggtgcagctcttaggagctctcacaggatgtgttcagcatatctgtgccacacaggaatccatcattttggaaaatattcagagtctcccctcctcagtccttcatataattaaaagcacatttgtgcattgtaagaatagtgaatctgtgtattctgggtgtttacacctagtttcagaccttctccaggctcttttcaaggaggcctattctcttcaaaagcagttaatggaactgctggacatggtttgcatggaccctttagtagatgacaatgatgatattttgaatatggtaatagttattcattctttattggatatctgctctgttatttccagtatggaccatgcatttcatgccaatacttggaagtttataattaagcagagccttaagcaccagtccataataaaaagccagttgaaacacaaagatataattactagcttgtgtgaagacattcttttctccttccattcttgtttacagttagctgagcagatgacacagtcagatgcacaggataatgctgactacagattatttcagaaaacactcaaattgtgtcgtttttttgccaactcccttttgcactacgctaaggaatttcttcctttcctctctgattcttgctgtactttgcaccaactgtatcttcagatacacagcaagtttcctccaagcctttatgctaccaggatttctaaagcacaccaagaggaaatagcaggtgctttcctagtgacactggatccacttatcagtcagctgctcacatttcagcctttcatgcaggtggttttggacagtaaattagacctgccatgtgaactgcagtttccacaatgtcttcttctggttgttgtcatggataagctgccatctcagcctaaggaagtgcaaaccctgtggtgcacagacagccaggtctcagaaacgacaaccaggatatctctactcaaagccgttttctacagttttgagcagtgttctggtgaactctctctacctgttcatttacagggattaaagagtaaggggaaagctgaggtggctgtcaccttgtatcagcatgtttgtgttcatctgtgtacatttattacttcctttcatccctcactgtttgctgaactggatgctgctctgctgaatgctgtacttagtgctaatatgatcacctctttgttagctatggatgcatggtgcttccttgctcgatatgggactgctgaactgtgtgcacaccatgtcaccatagtggctcatctgataaagtcatgccctggagaatgttatcaactcatcaacctatcaatactgttgaagcgtctctttttcttcatggcaccaccccatcagctggagtttatccagaaattttccccaaaagaagcagaaaatctgcctctgtggcaacatatttccttccaggcgttacctcctgagcttagggaacaaactgtccatgaggtcaccacagtaggcactgcagaatgcaggaaatggctgagcaggagtcgtactttgggagaactagaatctctgaacacagtactgtctgctttgcttgcagtatgtaattctgctggtgaagctttggatacaggaaaacaaactgcaattatcgaagttgtgagtcagctttgggcttttttaaacattaaacaggtagcagatcaaccttatgttcaacagacattcagccttttacttccactgttgggatttttcattcaaactctagatcctaaactgatacttcaggcagtaactttgcagacctcgctacttaaattagagcttcctgactatgttcgtttggcaatgttggattttgtatcttctttaggaaaactttttatacctgaagctatccaggacagaattctgcccaacctgtcctgtatgtttgccttactgctagctgacaggagttggctgctagaacaacataccttggaggcgtttactcagttcgctgagggaacaaatcatgaagagatagttccacagtgtctcagttctgaagaaactaagaacaaagttgtatcctttctggagaagactgggtttgtagatgaaactgaagctgccaaagtggaacgtgtgaaacaggaaaaaggtattttctgggaaccctttgctaatgtgactgtagaagaagcaaagaggtcatctttacagccttatgcaaaaagagctcgtcaggagttcccctgggaagaagagtacaggtcagcgctgcatacaatagcaggggctttggaagcaactgagtcactactccaaaagggtcctgctccagcctggctttcaatggaaatggaggcgctccaagaaaggatggataagctaaaacgttacatacatactctagggtgaaacttatcactaggcagaactgggtttgatgctttgtcaactgaaaatacttatgtctgtacattttctaacagatataaaacaaattttgtaaagttgaatctagtgaaaataatctttatttgacatttagagaacaggattgtggggaatattcttattaagaactttggtacaatgtactacatgtggaacagtcaggaactgcctaggtccacaaagaaccatttactcagatagtctaactgtaaacaaataaataagctgcctaaggaaacctcagcaatttaaaatcatttatataatttatagctaaaattttttaaagttgtatttcataatagagcttactcttatgttaaagaatggcacaaaattaagctaaccagcttgaattacattttctttacttccagaattgtcctggaaaaagcagtaaattcgacctctcctcagctacttgctcttcatagaaactggcctcagtcaaatgcacaaaggctcttcctcctggaaaccagtactgtgagcctcaccacccagggcttttagccagcactcacagtcagtctcctacttcagttggcacagactggataatgagctcctgggatgggaaaagcaggccactttggggttttcttgtcccaaagcctgcttttgaggtattgattttttttaaaaaaagggaatcctttttcctaaagtttaactcacatctattgtcaccagttattatcttcccagttcagctccccttcttcttcccagccttcagcctctccctgcaacaaaataaagcacaccaagaacccactgaaacaaatcatatgcaaaaatcatacgcaaatttgaaaaagcaggaatttaaaatttatcttttgatgccagaaacactacctcgtactaagtaaaataacttagagctctaacagaaagttgaaaagtaggattacaaaaccatggcactggaaaatagcttttcaaaaaccataaaatccagtaaaaatcagtgtggatgacaccaaatccttattttaatcccttttttttctttttcaaataaaaaggttacaatagctcattaaacaaa

SEQ ID NO: 1066 - DNA, 1697 bp, Homo sapiens
  source 1..1697: mol_type = genomic DNA
actgcgagtttccggtctgggctttggcgggtctggtttgaagctctcctgtttgacgaaagtatgtctcaggaaggtgcggtcccagctagcgcggttcccctggaagaattaagtagctggccagaggagctatgccgccgggaactgccgtccgtcctgccccgactcctctcattgtctcaacattctgacagttggattgagcatattcactgtgaaattattcgatgacatgatgtatgaattaaccagtcaagccagaggactgtcaagccaaaatttggaaatccagaccactctaaggaatattttacaaacaatggtgcagctcttaggagctctcacaggatgtgttcagcatatctgtgccacacaggaatccatcattttggaaaatattcagagtctcccctcctcagtccttcatataattaaaagcacatttgtgcattgtaagaatagtgaatctgtgtattctgggtgtttacacctagtttcagaccttctccaggctcttttcaaggaggcctattctcttcaaaagcagttaatggaactgctggacatggtttgcatggaccctttagtagatgacaatgatgatattttgaatatggtaatagttattcattctttattggatatctgctctgttatttccagtatggaccatgcatttcatgccaatacttggaagtttataattaagcagagccttaagcaccagtccataataaaaagccagttgaaacacaaagatataattactagcttgtgtgaagacattcttttctccttccattcttgtttacagttagctgagcagatgacacagtcagatgcacaggataatgctgactacagattatttcagaaaacactcaaattgtgtcgtttttttgccaactcccttttgcactacgctaaggaatttcttcctttcctctctgattcttgctgtactttgcaccaactgtatcttcagatacacagcaagtttcctccaagcctttatgctaccaggatttctaaagcacaccaagaggaaatagcaggtgctttcctagtgacactggatccacttatcagtcagctgctcacatttcagcctttcatgcaggtggttttggacagtaaattaggatatctctactcaaagccgttttctacagttttgagcagtgttctggtgaactctctctacctgttcatttacagggattaaagagtaaggggaaagctgaggtggctgtcaccttgtatcagcatgtttgtgttcatctgtgtacatttattacttcctttcatccctcactgtttgctgaactggtaagcatattacttactgtgctaagctaaggttacacttttgctttctcttcattgaaattgtgattcatatacagaagaaaatgtgggaatacttagtatattccttttgagtgaaacttagttgtgtcctagaaaatggtaatcccagattcctgtattatttagatctaatatttggctaaaatatttgagaaaacattttgggtggggaggtatgcaaagacaatgtgagaagaggaaaaatatgtagtacttaagtaagtttcaaaagaaaagtaaatagcttgtagtatcaggtctcttatagatctcagacataatatagattttaaaaaggatagaatttgatttgaaaagaggtt

SEQ ID NO: 1067 - DNA, 1071 bp, Homo sapiens
  source 1..1071: mol_type = genomic DNA
gaagctctcctgtttgacgaaagtatgtctcaggaaggtgcggtcccagctagcgcggttcccctggaagaattaagtagctggccagaggagctatgccgccgggaactgccgtccgtcctgccccgactcctctcattgtctcaacattctgacagttggattgagcatattcaaattttgaaaattattgtagaaatgtttttacctcatatgaaccacctgacattggaacagactttcttttcacaagtgttaccaaagactgtgaaattattcgatgacatgatgtatgaattaaccagtcaagccagaggactgtcaagccaaaatttggaaatccagaccactctaaggaatattttacaaacaatggtgcagctcttaggagctctcacaggatgtgttcagcatatctgtgccacacaggaatccatcattttggaaaatattcagagtctcccctcctcagtccttcatataattaaaagcacatttgtgcattgtaagaatagtgaatctgtgtattctgggtgtttacacctagtttcagaccttctccaggctcttttcaaggaggcctattctcttcaaaagcagttaatggaactgctggacatggtttgcatggaccctttagtagatgacaatgatgatattttgaatatggtaatagttattcattctttattggatatctgctctgttatttccagtatggaccatgcatttcatgccaatacttggaagtttataattaagcagagccttaagcaccagtccataataaaaagccagttgaaacacaaagatataattactagcttgtgtgaagacattcttttctccttccattcttgtttacagttagctgagcagatgacacagtcagatgcacaggataatgctgactacagattatttcagaaaacactcaaattgtgtcgtttttttgccaactcccttttgcactacgctaaggaatttcttcctttcctctctgattcttgctgtactttgcaccaactgtatcttcagatacacagatggagtttcgctcttgctgtctag

SEQ ID NO: 1068 - DNA, 3076 bp, Homo sapiens
  source 1..3076: mol_type = genomic DNA
attctgagcctagccacagaggtaaactccggacatttttttctttcatgtcgccaaatacatccttgtcattaaaagacctttgaaactgagtaaaatggctttgaaacctcagtagaatatgctcaaactgtctggagaaggattacgggacagctaccacagtagaagagatcaaattgcccttaaaaatctccagtctgatgtcacagaggcaaaatctgacttcaccaaggagaccctggcatcacaaaacacaaaaatgatttcatccatagtcatctcccagatgattgatgagaataagtcaagagaaaacagggcctccttgcccctaccgtgtgccattgctcagtctcgtgcacatcacgccaagcaatctctggctaaccgcagcggagtcaacattcacagagcatttgcgttacttccgggcagattaggaatcccggcaccgtcagatgagcgaggacctgaggcagagctgccgcccaaagaggagagaccctgtgggggcccccgcagagggtttgcatccatcaccatcacggccagacgcgtgggccccccagcccgcgccctggtgtgggggactgctggggactctctgtgccccaagtgcagggctgaggacacactgttccaggcgcccccggctctggccaatggcgcccatccaggtcggcatcagagatcttttgcctgcacagagttctccagaaacagctccgtggtgcggctgaaggttcccgaggcccacactgggttgtgtgagagacgcaagtactgggtcacccatgcagacgacaaagagaccagtttttctccagacaccccactgtcaggaaagagcccgctggtgttcagttcctgtgtccacctcagggtgtctcagcagtgtccagattcaatctattacgtagacaagtctctctccgtccccattgagccacctcaaattgccagccccaaaatgcacagatccgtcctgtcgctcaacctcaattgtagttcccacagattaacagcagatggagtagatggcctagtgaacagagagccaataagcgaagccctgaagcaggagctcctggagggagaccaggacctcgtaggccagcgctggaacccaggtttacaagaaagtcacttgaaggaaaccccatcgttgaggcgggtgcatttggggaccggcgcttgtccttggagtggttcttttccattggaaaacacagaattggcaaatgtgggagctaaccaagtcactgtaagaaaaggggaaaaggaccatacaactcattgtcacgccagcgatcatgccaaccaactgtccattcacattcctggctggagttacagggcagtacacacaaaagtattttctggaagcagcaagaggcaacaaggagaagtatgtatgactgtgtctgctcctccagtggaacagaagcccactagacatttccttcccattggggatagctctccaagcgatgactgtctgtctagagacctttctgagcccacagagagacgacatcaaagcttcctgaaacccagaatcctttttcctgggtttctttgccccttacaagatgtatgtgcatctctgcaggaagacaatggtgttcagatagaaagcaagttccccaaaggagattacacatgctgtgacttggttgtaaaaataaaggaatgtaagaagagtgaggaccccaccacacctgagccctccccagcagcaccctcgccagcaccccgcgatggagcagggagccctggcctgtccgaagactgttctgagtctcagcaaacgcctgcaagatctttgaccttgcaagaagcactggaagttcgtaagcctcagttcatttctcgctcacaagaacggctgaagaagcttgaacacatggtccagcagaggaaagcccagcggaaggaggacctgaggcagaagcagagcctccttcccatccgcaccagcaagaagcagttcacgattccccatcctctgagtgataacttgttcaaacccaaagaacggtgcatttcagagaaggagatgcatatgcgatctaagagaatctatgataacttgccggaagttaaaaagaaaaaagaagaacaaaggaaaagggtgatcttacaaagtaacagactccgtgccgaagtcttcaaaaagcaattactggaccagctccttcaaaggaatgcggtctaaccacaggctgccctgctgaccacactacctggacctgggaggacttcgaatgctggataagccattaaacttagcattatcttcatcatgggaaaacacttattttactttcgattttttttttccataaaggaaaacatcacttcctgaattactgacccaagccaaacagaaacaataaccctcgagaaaataggtcaacaatctgttgtggggaaaccacctccatgtaacccactggatacagtccccttaatgtttttgcttctaaattgtaccttttgcttctgatttcttctcccctgctgtttcctgcccatcagagaggcctgatacaagcaagtttgtttacatccctggggaatcttttacatcaaacttttgggatccaaatccatctccttttaaatttcaatctcagcacctgccagttatgcaaatgccaaaatgtgggtcatcatatagtatatttgaaacctttctgaacatgtacaccacccaatgctagaggctgacttggaaaccggtgggtgcaatgcccgaggctgtggaacaatcagcccatctctttgtgacctggagcagtcagagggccctcagtcaccccgccccattcctcaccagagaaaagaatccatttctatggaagctctgacgtaacttcagtgttttctacaatactcctcctgccccgccccattaaaacagttcttttgttaagaaatagcctaatggtccaactttgctgtctgttcttccaaatgtttataatacacattatttataaatatgtctgtttgggaagctaagaacaagctagtttttacaacacaaatggaaataaatgcaattatt

SEQ ID NO: 1069 - DNA, 3678 bp, Homo sapiens
  source 1..3678: mol_type = genomic DNA
gggaagatggccatgtgcaggtggaggcagagattagagaggggctgtcccaagccgagggacacagaggatgccagacaccacgggacactgagaagggcaaggaagggtcctcccctagggccttcagagggagcacggtcctgacacctggatttctggcctccagaactgggaaggagtaaatccctgttgtatccagctgctccctttgtagtcacttttcacagcagcgctgggaacgaacgcaggcaccaatccagcttgggggccatgtggggtagcagcggatcgggacttccttctaagagaagcgatcttgagccgtgtcacgggtgaggagttaggagttagctcagtggggaaaaggtgaaggcagcactcacggtcatcaagccagcccctgtgggaagcaggctgggtttaaggatttctaacctgggctccttgaactcccagggtccccctacatgtgtgcttcaattttgcaccttttcttggggagaaacgaatcccttgcatttgagttttggaggaccatgtggccttcacggtcacaaactggcaatgtcaagaaggtttggcaggaccggctgggagatgaggctggtggggtcaccagcttgattgtgaccttgctgacaccagcagggcagggaggtgaactgacgcaatggagcagagcctttgtctcaggagcaaaccagccttggctttcagttggatgttggaggattacgggacagctaccacagtagaagagatcaaattgcccttaaaaatctccagtctgatgtcacagaggcaaaatctgacttcaccaaggagaccctggcatcacaaaacacaaaaatgatttcatccatagtcatctcccagatgattgatgagaataagtcaagagaaaacagggcctccttgcccctaccgtgtgccattgctcagtctcgtgcacatcacgccaagcaatctctggctaaccgcagcggagtcaacattcacagagcatttgcgttacttccgggcagattaggaatcccggcaccgtcagatgagcgaggacctgaggcagagctgccgcccaaagaggagagaccctgtgggggcccccgcagagggtttgcatccatcaccatcacggccagacgcgtgggccccccagcccgcgccctggtgtgggggactgctggggactctctgtgccccaagtgcagggctgaggacacactgttccaggcgcccccggctctggccaatggcgcccatccaggtcggcatcagagatcttttgcctgcacagagttctccagaaacagctccgtggtgcggctgaaggttcccgaggcccacactgggttgtgtgagagacgcaagtactgggtcacccatgcagacgacaaagagaccagtttttctccagacaccccactgtcaggaaagagcccgctggtgttcagttcctgtgtccacctcagggtgtctcagcagtgtccagattcaatctattacgtagacaagtctctctccgtccccattgagccacctcaaattgccagccccaaaatgcacagatccgtcctgtcgctcaacctcaattgtagttcccacagattaacagcagatggagtagatggcctagtgaacagagagccaataagcgaagccctgaagcaggagctcctggagggagaccaggacctcgtaggccagcgctggaacccaggtttacaagaaagtcacttgaaggaaaccccatcgttgaggcgggtgcatttggggaccggcgcttgtccttggagtggttcttttccattggaaaacacagaattggcaaatgtgggagctaaccaagtcactgtaagaaaaggggaaaaggaccatacaactcattgtcacgccagcgatcatgccaaccaactgtccattcacattcctggctggagttacagggcagtacacacaaaagtattttctggaagcagcaagaggcaacaaggagaagtatgtatgactgtgtctgctcctccagtggaacagaagcccactagacatttccttcccattggggatagctctccaagcgatgactgtctgtctagagacctttctgagcccacagagagacgacatcaaagcttcctgaaacccagaatcctttttcctgggtttctttgccccttacaagatgtatgtgcatctctgcaggaagacaatggtgttcagatagaaagcaagttccccaaaggagattacacatgctgtgacttggttgtaaaaataaaggaatgtaagaagagtgaggaccccaccacacctgagccctccccagcagcaccctcgccagcaccccgcgatggagcagggagccctggcctgtccgaagactgttctgagtctcagcaaacgcctgcaagatctttgaccttgcaagaagcactggaagttcgtaagcctcagttcatttctcgctcacaagaacggctgaagaagcttgaacacatggtccagcagaggaaagcccagcggaaggaggacctgaggcagaagcagagcctccttcccatccgcaccagcaagaagcagttcacgattccccatcctctgagtgataacttgttcaaacccaaagaacggtgcatttcagagaaggagatgcatatgcgatctaagagaatctatgataacttgccggaagttaaaaagaaaaaagaagaacaaaggaaaagggtgatcttacaaagtaacagactccgtgccgaagtcttcaaaaagcaattactggaccagctccttcaaaggaatgcggtctaaccacaggctgccctgctgaccacactacctggacctgggaggacttcgaatgctggataagccattaaacttagcattatcttcatcatgggaaaacacttattttactttcgattttttttttccataaaggaaaacatcacttcctgaattactgacccaagccaaacagaaacaataaccctcgagaaaataggtcaacaatctgttgtggggaaaccacctccatgtaacccactggatacagtccccttaatgtttttgcttctaaattgtaccttttgcttctgatttcttctcccctgctgtttcctgcccatcagagaggcctgatacaagcaagtttgtttacatccctggggaatcttttacatcaaacttttgggatccaaatccatctccttttaaatttcaatctcagcacctgccagttatgcaaatgccaaaatgtgggtcatcatatagtatatttgaaacctttctgaacatgtacaccacccaatgctagaggctgacttggaaaccggtgggtgcaatgcccgaggctgtggaacaatcagcccatctctttgtgacctggagcagtcagagggccctcagtcaccccgccccattcctcaccagagaaaagaatccatttctatggaagctctgacgtaacttcagtgttttctacaatactcctcctgccccgccccattaaaacagttcttttgttaagaaatagcctaatggtccaactttgctgtctgttcttccaaatgtttataatacacattatttataaatatgtctgtttgggaagctaagaacaagctagtttttacaacacaaatggaaataaatgcaattattataaaaattcaa

SEQ ID NO: 1070 - DNA, 2035 bp, Homo sapiens
  source 1..2035: mol_type = genomic DNA
ctctcacacatgccctccctcgatggcccccagctcttgtaggacaagccctcatggcagagctagatggcaccctaggggccatacaggtgcgtgcactccttgcctcgcggatgaggaagatgagcccagaggaggagctgacatggctgagtggccaggtgggatctggagcctagtgtccttgccgtctggacccctcccagcatatcatgctgtgtcctactaaggctcccaaaatggggacaaacttttcatctttcagcttctcccagtgcaccttcttgctgcctaagccctgactctctgcttaggtttcaaaaaatgagacaactcatgagagaaaagaaaatggtcagatccgcaatgcatggaaaaatatctctttatgtgtgtcatctcctcaagactcccaacaaagcctatgccagcctctctcttacagaggaacaaacagaggccaggaggttacgtggctcgtccaaggctagacagcattaaaatgtggtggcaccaagagtcaacctggaccaggcgtcaaaactcaagctgttctacttttaccttctcctaatcatgtacagtgattattcatattgcaaactcgcagctttagtcttactggaggggtgacacctggattacgggacagctaccacagtagaagagatcaaattgcccttaaaaatctccagtctgatgtcacagaggcaaaatctgacttcaccaaggagaccctggcatcacaaaacacaaaaatgatttcatccatagtcatctcccagatgattgatgagaataagtcaagagaaaacagggcctccttgcccctaccgtgtgccattgctcagtctcgtgcacatcacgccaagcaatctctggctaaccgcagcggagtcaacattcacagagcatttgcgttacttccgggcagattaggaatcccggcaccgtcagatgagcgaggacctgaggcagagctgccgcccaaagaggagagaccctgtgggggcccccgcagagggtttgcatccatcaccatcacggccagacgcgtgggccccccagcccgcgccctggtgtgggggactgctggggactctctgtgccccaagtgcagggctgaggacacactgttccaggcgcccccggctctggccaatggcgcccatccaggtcggcatcagagatcttttgcctgcacagagttctccagaaacagctccgtggtgcggctgaaggttcccgaggcccacactgggttgtgtgagagacgcaagtactgggtcacccatgcagacgacaaagagaccagtttttctccagacaccccactgtcaggaaagagcccgctggtgttcagttcctgtgtccacctcagggtgtctcagcagtgtccagattcaatctattacgtagacaagtctctctccgtccccattgagccacctcaaattgccagccccaaaatgcacagatccgtcctgtcgctcaacctcaattgtagttcccacagattaacagcagatggagtagatggcctagtgaacagagagccaataagcgaagccctgaagcaggagctcctggagggagaccaggacctcgtaggccagcgctggaacccaggtttacaagaaagtcacttgaaggaaaccccatcgttgaggcgggtgcatttggggaccggcgcttgtccttggagtggttcttttccattggaaaacacagaattggcaaatgtgggagctaaccaagtcactgtaagaaaaggggaaaaggaccatacaactcattgtcacgccagcgatcatgccaaccaactgtccattcacattcctggctggagttacagggcagacttattacaagaaggacaacataagcagctatcaatgttccaaagataaatcccactttagtggttaaagagattgctcaagctaagcacttcgtcttccttattgatgatgattccagaaatacaccactgcattgttgtatgttaccccagttaaagcacatcctcattttt

SEQ ID NO: 1071 - DNA, 1414 bp, Homo sapiens
  source 1..1414: mol_type = genomic DNA
attctgagcctagccacagaggtaaactccggacatttttttctttcatgtcgccaaatacatccttgtcattaaaagacctttgaaactgagtaaaatggctttgaaacctcagtagaatatgctcaaactgtctggagaaggattacgggacagctaccacagtagaagagatcaaattgcccttaaaaatctccagtctgatgtcacagaggcaaaatctgacttcaccaaggagaccctggcatcacaaaacacaaaaatgatttcatccatagtcatctcccagatgattgatgagaataagtcaagagaaaacagggcctccttgcccctaccgtgtgccattgctcagtctcgtgcacatcacgccaagcaatctctggctaaccgcagcggagtcaacattcacagagcatttgcgttacttccgggcagattaggaatcccggcaccgtcagatgagcgaggacctgaggcagagctgccgcccaaagaggagagaccctgtgggggcccccgcagagggtttgcatccatcaccatcacggccagacgcgtgggccccccagcccgcgccctggtgtgggggactgctggggactctctgtgccccaagtgcagggctgaggacacactgttccaggcgcccccggctctggccaatggcgcccatccaggtcggcatcagagatcttttgcctgcacagagttctccagaaacagctccgtggtgcggctgaaggttcccgaggcccacactgggttgtgtgagagacgcaagtactgggtcacccatgcagacgacaaagagaccagtttttctccagacaccccactgtcaggaaagagcccgctggtgttcagttcctgtgtccacctcagggtgtctcagcagtgtccagattcaatctattacgtagacaagtctctctccgtccccattgagccacctcaaattgccagccccaaaatgcacagatccgtcctgtcgctcaacctcaattgtagttcccacagattaacagcagatggagtagatggcctagtgaacagagagccaataagcgaagccctgaagcaggagctcctggagggagaccaggacctcgtaggccagcgctggaacccaggtttacaagaaagtcacttgaaggaaaccccatcgttgaggcgggtgcatttggggaccggcgcttgtccttggagtggttcttttccattggaaaacacagaattggcaaatgtgggagctaaccaagtcactgtaagaaaaggggaaaaggaccatacaactcattgtcacgccagcgatcatgccaaccaactgtccattcacattcctggctggagttacagggcagacttattacaagaaggacaacataagcagctatcaatgttccaaagataa

SEQ ID NO: 1072 - DNA, 1595 bp, Homo sapiens
  source 1..1595: mol_type = genomic DNA
cttggagtggttcttttccattggaaaacacagaattggcaaatgtgggagctaaccaagtcactgtaagaaaaggggaaaaggaccatacaactcattgtcacgccagcgatcatgccaaccaactgtccattcacattcctggctggagttacagggcaggagattacacatgctgtgacttggttgtaaaaataaaggaatgtaagaagagtgaggaccccaccacacctgagccctccccagcagcaccctcgccagcaccccgcgatggagcagggagccctggcctgtccgaagactgttctgagtctcagcaaacgcctgcaagatctttgaccttgcaagaagcactggaagttcgtaagcctcagttcatttctcgctcacaagaacggctgaagaagcttgaacacatggtccagcagaggaaagcccagcggaaggaggacctgaggcagaagcagagcctccttcccatccgcaccagcaagaagcagttcacgattccccatcctctgagtgataacttgttcaaacccaaagaacggtgcatttcagagaaggagatgcatatgcgatctaagagaatctatgataacttgccggaagttaaaaagaaaaaagaagaacaaaggaaaagggtgatcttacaaagtaacagactccgtgccgaagtcttcaaaaagcaattactggaccagctccttcaaaggaatgcggtctaaccacaggctgccctgctgaccacactacctggacctgggaggacttcgaatgctggataagccattaaacttagcattatcttcatcatgggaaaacacttattttactttcgattttttttttccataaaggaaaacatcacttcctgaattactgacccaagccaaacagaaacaataaccctcgagaaaataggtcaacaatctgttgtggggaaaccacctccatgtaacccactggatacagtccccttaatgtttttgcttctaaattgtaccttttgcttctgatttcttctcccctgctgtttcctgcccatcagagaggcctgatacaagcaagtttgtttacatccctggggaatcttttacatcaaacttttgggatccaaatccatctccttttaaatttcaatctcagcacctgccagttatgcaaatgccaaaatgtgggtcatcatatagtatatttgaaacctttctgaacatgtacaccacccaatgctagaggctgacttggaaaccggtgggtgcaatgcccgaggctgtggaacaatcagcccatctctttgtgacctggagcagtcagagggccctcagtcaccccgccccattcctcaccagagaaaagaatccatttctatggaagctctgacgtaacttcagtgttttctacaatactcctcctgccccgccccattaaaacagttcttttgttaagaaatagcctaatggtccaactttgctgtctgttcttccaaatgtttataatacacattatttataaatatgtctgtttgggaagctaagaacaagctagtttttacaacacaaatggaaataaatgcaattattataaaaattcaa

SEQ ID NO: 1073 - DNA, 2107 bp, Homo sapiens
  source 1..2107: mol_type = genomic DNA
attctgagcctagccacagaggtaaactccggacatttttttctttcatgtcgccaaatacatccttgtcattaaaagacctttgaaactgagtaaaatggctttgaaacctcagtagaatatgctcaaactgtctggagaaggattacgggacagctaccacagtagaagagatcaaattgcccttaaaaatctccagtctgatgtcacagaggcaaaatctgacttcaccaaggagaccctggcatcacaaaacacaaaaatgatttcatccatagtcatctcccagatgattgatgagaataagtcaagagaaaacagggcctccttgcccctaccgtgtgccattgctcagtctcgtgcacatcacgccaagcaatctctggctaaccgcagcggagtcaacattcacagagcatttgcgttacttccgggcagattaggaatcccggcaccgtcagatgagcgaggacctgaggcagagctgccgcccaaagaggagagaccctgtgggggcccccgcagagggtttgcatccatcaccatcacggccagacgcgtgggccccccagcccgcgccctggtgtgggggactgctggggactctctgtgccccaagtgcagggctgaggacacactgttccaggcgcccccggctctggccaatggcgcccatccaggtcggcatcagagatcttttgcctgcacagagttctccagaaacagctccgtggtgcggctgaaggttcccgaggcccacactgggttgtgtgagagacgcaagtactgggtcacccatgcagacgacaaagagaccagtttttctccagacaccccactgtcaggaaagagcccgctggtgttcagttcctgtgtccacctcagggtgtctcagcagtgtccagattcaatctattacgtagacaagtctctctccgtccccattgagccacctcaaattgccagccccaaaatgcacagatccgtcctgtcgctcaacctcaattgtagttcccacagattaacagcagatggagtagatggcctagtgaacagagagccaataagcgaagccctgaagcaggagctcctggagggagaccaggacctcgtaggccagcgctggaacccaggtttacaagaaagtcacttgaaggaaaccccatcgttgaggcgggtgcatttggggaccggcgcttgtccttggagtggttcttttccattggaaaacacagaattggcaaatgtgggagctaaccaagtcactgtaagaaaaggggaaaaggaccatacaactcattgtcacgccagcgatcatgccaaccaactgtccattcacattcctggctggagttacagggcagtacacacaaaagtattttctggaagcagcaagaggcaacaaggagaagtatgtatgactgtgtctgctcctccagtggaacagaagcccactagacatttccttcccattggggatagctctccaagcgatgactgtctgtctagagacctttctgagcccacagagagacgacatcaaagcttcctgaaacccagaatcctttttcctgggtttctttgccccttacaagatgtatgtgcatctctgcaggaagacaatggtgttcagatagaaagcaagttccccaaaggagattacacatgctgtgacttggttgtaaaaataaaggaatgtaagaagagtgaggaccccaccacacctgagccctccccagcagcaccctcgccagcaccccgcgatggagcagggagccctggcctgtccgaagactgttctgagtctcagcaaacgcctgcaagatctttgaccttgcaagaagcactggaagttcgtaagcctcagttcatttctcgctcacaagaacggctgaagaagcttgaacacatggtccagcagaggaaagcccagcggaaggaggacctgaggcagaagcagagcctccttcccatccgcaccagcaagaagcagttcacgattccccatcctctgagtgataacttgttcaaacccaaagaacggtgcatttcagagaaggagatgcatatgcgatctaagagaatctatgataacttgccggaagtt

SEQ ID NO: 1074 - DNA, 2785 bp, Homo sapiens
  source 1..2785: mol_type = genomic DNA
attctgagcctagccacagaggtaaactccggacatttttttctttcatgtcgccaaatacatccttgtcattaaaagacctttgaaactgagtaaaatggctttgaaacctcagtagaatatgctcaaactgtctggagaaggattacgggacagctaccacagtagaagagatcaaattgcccttaaaaatctccagtctgatgtcacagaggcaaaatctgacttcaccaaggagaccctggcatcacaaaacacaaaaatgatttcatccatagtcatctcccagatgattgatgagaataagtcaagagaaaacagggcctccttgcccctaccgtgtgccattgctcagtctcgtgcacatcacgccaagcaatctctggctaaccgcagcggagtcaacattcacagagcatttgcgttacttccgggcagattaggaatcccggcaccgtcagatgagcgaggacctgaggcagagctgccgcccaaagaggagagaccctgtgggggcccccgcagagggtttgcatccatcaccatcacggccagacgcgtgggccccccagcccgcgccctggtgtgggggactgctggggactctctgtgccccaagtgcagggctgaggacacactgttccaggcgcccccggctctggccaatggcgcccatccaggtcggcatcagagatcttttgcctgcacagagttctccagaaacagctccgtggtgcggctgaaggttcccgaggcccacactgggttgtgtgagagacgcaagtactgggtcacccatgcagacgacaaagagaccagtttttctccagacaccccactgtcaggaaagagcccgctggtgttcagttcctgtgtccacctcagggtgtctcagcagtgtccagattcaatctattacgtagacaagtctctctccgtccccattgagccacctcaaattgccagccccaaaatgcacagatccgtcctgtcgctcaacctcaattgtagttcccacagattaacagcagatggagtagatggcctagtgaacagagagccaataagcgaagccctgaagcaggagctcctggagggagaccaggacctcgtaggccagcgctggaacccaggtttacaagaaagtcacttgaaggaaaccccatcgttgaggcgggtgcatttggggaccggcgcttgtccttggagtggttcttttccattggaaaacacagaattggcaaatgtgggagctaaccaagtcactgtaagaaaaggggaaaaggaccatacaactcattgtcacgccagcgatcatgccaaccaactgtccattcacattcctggctggagttacagggcaggagattacacatgctgtgacttggttgtaaaaataaaggaatgtaagaagagtgaggaccccaccacacctgagccctccccagcagcaccctcgccagcaccccgcgatggagcagggagccctggcctgtccgaagactgttctgagtctcagcaaacgcctgcaagatctttgaccttgcaagaagcactggaagttcgtaagcctcagttcatttctcgctcacaagaacggctgaagaagcttgaacacatggtccagcagaggaaagcccagcggaaggaggacctgaggcagaagcagagcctccttcccatccgcaccagcaagaagcagttcacgattccccatcctctgagtgataacttgttcaaacccaaagaacggtgcatttcagagaaggagatgcatatgcgatctaagagaatctatgataacttgccggaagttaaaaagaaaaaagaagaacaaaggaaaagggtgatcttacaaagtaacagactccgtgccgaagtcttcaaaaagcaattactggaccagctccttcaaaggaatgcggtctaaccacaggctgccctgctgaccacactacctggacctgggaggacttcgaatgctggataagccattaaacttagcattatcttcatcatgggaaaacacttattttactttcgattttttttttccataaaggaaaacatcacttcctgaattactgacccaagccaaacagaaacaataaccctcgagaaaataggtcaacaatctgttgtggggaaaccacctccatgtaacccactggatacagtccccttaatgtttttgcttctaaattgtaccttttgcttctgatttcttctcccctgctgtttcctgcccatcagagaggcctgatacaagcaagtttgtttacatccctggggaatcttttacatcaaacttttgggatccaaatccatctccttttaaatttcaatctcagcacctgccagttatgcaaatgccaaaatgtgggtcatcatatagtatatttgaaacctttctgaacatgtacaccacccaatgctagaggctgacttggaaaccggtgggtgcaatgcccgaggctgtggaacaatcagcccatctctttgtgacctggagcagtcagagggccctcagtcaccccgccccattcctcaccagagaaaagaatccatttctatggaagctctgacgtaacttcagtgttttctacaatactcctcctgccccgccccattaaaacagttcttttgttaagaaatagcctaatggtccaactttgctgtctgttcttccaaatgtttataatacacattatttataaatatgtctgtttgggaagctaagaacaagctagtttttacaacacaaatggaaataaatgcaattatt

SEQ ID NO: 1075 - DNA, 2720 bp, Homo sapiens
  source 1..2720: mol_type = genomic DNA
actagctaaagtcacaagatactgagtctcatgcagcactctggaattcctacaaaaactcatccgcaggggtatgctgcccgctacacagaaacggccgtgcatcggactttccagataaaaacatttagtacagagttgaaaaaccatgtgatggtcatggattttgtgaagagtaactggtttccctcccagagaagagccaaagtttgtatcatccatatgtgtcaaggcttgaagacggctgagcagacagccagcagatatgagatccacagtcgactcttctcatcccccaaagatcattctgcctgggaaagaaatgaaagtctttccaatgcaggattacgggacagctaccacagtagaagagatcaaattgcccttaaaaatctccagtctgatgtcacagaggcaaaatctgacttcaccaaggagaccctggcatcacaaaacacaaaaatgatttcatccatagtcatctcccagatgattgatgagaataagtcaagagaaaacagggcctccttgcccctaccgtgtgccattgctcagtctcgtgcacatcacgccaagcaatctctggctaaccgcagcggagtcaacattcacagagcatttgcgttacttccgggcagattaggaatcccggcaccgtcagatgagcgaggacctgaggcagagctgccgcccaaagaggagagaccctgtgggggcccccgcagagggtttgcatccatcaccatcacggccagacgcgtgggccccccagcccgcgccctggtgtgggggactgctggggactctctgtgccccaagtgcagggctgaggacacactgttccaggcgcccccggctctggccaatggcgcccatccaggtcggcatcagagatcttttgcctgcacagagttctccagaaacagctccgtggtgcggctgaaggttcccgaggcccacactgggttgtgtgagagacgcaagtactgggtcacccatgcagacgacaaagagaccagtttttctccagacaccccactgtcaggaaagagcccgctggtgttcagttcctgtgtccacctcagggtgtctcagcagtgtccagattcaatctattacgtagacaagtctctctccgtccccattgagccacctcaaattgccagccccaaaatgcacagatccgtcctgtcgctcaacctcaattgtagttcccacagattaacagcagatggagtagatggcctagtgaacagagagccaataagcgaagccctgaagcaggagctcctggagggagaccaggacctcgtaggccagcgctggaacccaggtttacaagaaagtcacttgaaggaaaccccatcgttgaggcgggtgcatttggggaccggcgcttgtccttggagtggttcttttccattggaaaacacagaattggcaaatgtgggagctaaccaagtcactgtaagaaaaggggaaaaggaccatacaactcattgtcacgccagcgatcatgccaaccaactgtccattcacattcctggctggagttacagggcagtacacacaaaagtattttctggaagcagcaagaggcaacaaggagaagtatgtatgactgtgtctgctcctccagtggaacagaagcccactagacatttccttcccattggggatagctctccaagcgatgactgtctgtctagagacctttctgagcccacagagagacgacatcaaagcttcctgaaacccagaatcctttttcctgggtttctttgccccttacaagatgtatgtgcatctctgcaggaagacaatggtgttcagatagaaagcaagttccccaaaggagattacacatgctgtgacttggttgtaaaaataaaggaatgtaagaagagtgaggaccccaccacacctgagccctccccagcagcaccctcgccagcaccccgcgatggagcagggagccctggcctgtccgaagactgttctgagtctcagcaaacgcctgcaagatctttgaccttgcaagaagcactggaagttcgtaagcctcagttcatttctcgctcacaagaacggctgaagaagcttgaacacatggtccagcagaggaaagcccagcggaaggaggacctgaggcagaagcagagcctccttcccatccgcaccagcaagaagcagttcacgattccccatcctctgagtgataacttgttcaaacccaaagaacggtgcatttcagagaaggagatgcatatgcgatctaagagaatctatgataacttgccggaagttaaaaagaaaaaagaagaacaaaggaaaagggtgatcttacaaagtaacagactccgtgccgaagtcttcaaaaagcaattactggaccagctccttcaaaggaatgcggtctaaccacaggctgccctgctgaccacactacctggacctgggaggacttcgaatgctggataagccattaaacttagcattatcttcatcatgggaaaacacttattttactttcgattttttttttccataaaggaaaacatcacttcctgaattactgacccaagccaaacagaaacaataaccctcgagaaaataggtcaacaatctgttgtggggaaaccacctccatgtaacccactggatacagtccccttaatgtttttgcttctaaattgtaccttttgcttctgatttcttct

SEQ ID NO: 1076 - DNA, 3520 bp, Homo sapiens
  source 1..3520: mol_type = genomic DNA
gagcagacaagtgcctcttgggcccgcttctctaacaaatgtaaaaataatgcccttgaaccaggagcgaaactgagctatctaaggaaaacactgtgagcaaatactgagagcctagggaaaccatctgattagaagagctcccctcaggagcgcgttagcttcacaccttcggcagcaggagggcggcagcttctcgcaggcggcagggcgggcggccaggatcatgtccaccaccacatgccaagtggtggcgttcctcctgtccatcctggggctggccggctgcatcgcggccaccgggatggacatgtggagcacccaggacctgtacgacaaccccgtcacctccgtgttccagtacgaagggctctggaggagctgcgtgaggcagagttcaggcttcaccgaatgcaggccctatttcaccatcctgggacttccagccatgctgcaggcagtgcgagccctgatgatcgtaggcatcgtcctgggtgccattggcctcctggtatccatctttgccctgaaatgcatccgcattggcagcatggaggactctgccaaagccaacatgacactgacctccgggatcatgttcattgtctcaggtctttgtgcaattgctggagtgtctgtgtttgccaacatgctggtgactaacttctggatgtccacagctaacatgtacaccggcatgggtgggatggtgcagactgttcagaccaggtacacatttggtgcggctctgttcgtgggctgggtcgctggaggcctcacactaattgggggtgtgatgatgtgcatcgcctgccggggcctggcaccagaagaaaccaactacaaagccgtttcttatcatgcctcaggccacagtgttgcctacaagcctggaggcttcaaggccagcactggctttgggtccaacaccaaaaacaagaagatatacgatggaggtgcccgcacagaggacgaggtacaatcttatccttccaagcacgactatgtgtaatgctctaagacctctcagcacgggcggaagaaactcccggagagctcacccaaaaaacaaggagatcccatctagatttcttcttgcttttgactcacagctggaagttagaaaagcctcgatttcatctttggagaggccaaatggtcttagcctcagtctctgtctctaaatattccaccataaaacagctgagttatttatgaattagaggctatagctcacattttcaatcctctatttctttttttaaatataactttctactctgatgagagaatgtggttttaatctctctctcacattttgatgatttagacagactccccctcttcctcctagtcaataaacccattgatgatctatttcccagcttatccccaagaaaacttttgaaaggaaagagtagacccaaagatgttattttctgctgtttgaattttgtctccccacccccaacttggctagtaataaacacttactgaagaagaagcaataagagaaagatatttgtaatctctccagcccatgatctcggttttcttacactgtgatcttaaaagttaccaaaccaaagtcattttcagtttgaggcaaccaaacctttctactgctgttgacatcttcttattacagcaacaccattctaggagtttcctgagctctccactggagtcctctttctgtcgcgggtcagaaattgtccctagatgaatgagaaaattattttttttaatttaagtcctaaatatagttaaaataaataatgttttagtaaaatgatacactatctctgtgaaatagcctcacccctacatgtggatagaaggaaatgaaaaaataattgctttgacattgtctatatggtactttgtaaagtcatgcttaagtacaaattccatgaaaagctcactgatcctaattctttccctttgaggtctctatggctctgattgtacatgatagtaagtgtaagccatgtaaaaagtaaataatgtctgggcacagtggctcacgcctgtaatcctagcactttgggaggctgaggaggaaggatcacttgagcccagaagttcgagactagcctgggcaacatggagaagccctgtctctacaaaatacagagagaaaaaatcagccagtcatggtggcctacacctgtagtcccagcattccgggaggctgaggtgggaggatcacttgagcccagggaggttggggctgcagtgagccatgatcacaccactgcactccagccaggtgacatagcgagatcctgtctaaaaaaataaaaaataaataatggaacacagcaagtcctaggaagtaggttaaaactaattctttaaaaaaaaaaaaaagttgagcctgaattaaatgtaatgtttccaagtgacaggtatccacatttgcatggttacaagccactgccagttagcagtagcactttcctggcactgtggtcggttttgttttgttttgctttgtttagagacggggtctcactttccaggctggcctcaaactcctgcactcaagcaattcttctaccctggcctcccaagtagctggaattacaggtgtgcgccatcacaactagctggtggtcagttttgttactctgagagctgttcacttctctgaattcacctagagtggttggaccatcagatgtttgggcaaaactgaaagctctttgcaaccacacaccttccctgagcttacatcactgcccttttgagcagaaagtctaaattccttccaagacagtagaattccatcccagtaccaaagccagataggccccctaggaaactgaggtaagagcagtctctaaaaactacccacagcagcattggtgcaggggaacttggccattaggttattatttgagaggaaagtcctcacatcaatagtacatatgaaagtgacctccaaggggattggtgaatactcataaggatcttcaggctgaacagactatgtctggggaaagaacggattatgccccattaaataacaagttgtgttcaagagtcagagcagtgagctcagaggcccttctcactgagacagcaacatttaaaccaaaccagaggaagtatttgtggaactcactgcctcagtttgggtaaaggatgagcagacaagtcaactaaagaaaaaagaaaagcaaggaggagggttgagcaatctagagcatggagtttgttaagtgctctctggatttgagttgaagagcatccatttgagttgaaggccacagggcacaatgagctctcccttctaccaccagaaagtccctggtcaggtctcaggtagtgcggtgtggctcagctgggtttttaattagcgcattctctatccaacatttaattgtttgaaagcctccatatagttagattgtgctttgtaattttgttgttgttgctctatcttattgtatatgcattgagtattaacctgaatgttttgttacttaaatattaaaaacactgttatcctaca

SEQ ID NO: 1077 - DNA, 3431 bp, Homo sapiens
  source 1..3431: mol_type = genomic DNA
aaccgcctccattacatggtccgttcctgacgtgtacaccagcctctcagagaaaactccatccctacactcggtagtctcagaattgcgctgtccacttgtcgtgtggctctgtgtcgacactgtgcgccaccatggccgtgactgcctgtcagggcttggggttcgtggtttcactgattgggattgcgggcatcattgctgccacctgcatggaccagtggagcacccaagacttgtacaacaaccccgtaacagctgttttcaactaccaggggctgtggcgctcctgtgtccgagagagctctggcttcaccgagtgccggggctacttcaccctgctggggctgccagccatgctgcaggcagtgcgagccctgatgatcgtaggcatcgtcctgggtgccattggcctcctggtatccatctttgccctgaaatgcatccgcattggcagcatggaggactctgccaaagccaacatgacactgacctccgggatcatgttcattgtctcaggtctttgtgcaattgctggagtgtctgtgtttgccaacatgctggtgactaacttctggatgtccacagctaacatgtacaccggcatgggtgggatggtgcagactgttcagaccaggtacacatttggtgcggctctgttcgtgggctgggtcgctggaggcctcacactaattgggggtgtgatgatgtgcatcgcctgccggggcctggcaccagaagaaaccaactacaaagccgtttcttatcatgcctcaggccacagtgttgcctacaagcctggaggcttcaaggccagcactggctttgggtccaacaccaaaaacaagaagatatacgatggaggtgcccgcacagaggacgaggtacaatcttatccttccaagcacgactatgtgtaatgctctaagacctctcagcacgggcggaagaaactcccggagagctcacccaaaaaacaaggagatcccatctagatttcttcttgcttttgactcacagctggaagttagaaaagcctcgatttcatctttggagaggccaaatggtcttagcctcagtctctgtctctaaatattccaccataaaacagctgagttatttatgaattagaggctatagctcacattttcaatcctctatttctttttttaaatataactttctactctgatgagagaatgtggttttaatctctctctcacattttgatgatttagacagactccccctcttcctcctagtcaataaacccattgatgatctatttcccagcttatccccaagaaaacttttgaaaggaaagagtagacccaaagatgttattttctgctgtttgaattttgtctccccacccccaacttggctagtaataaacacttactgaagaagaagcaataagagaaagatatttgtaatctctccagcccatgatctcggttttcttacactgtgatcttaaaagttaccaaaccaaagtcattttcagtttgaggcaaccaaacctttctactgctgttgacatcttcttattacagcaacaccattctaggagtttcctgagctctccactggagtcctctttctgtcgcgggtcagaaattgtccctagatgaatgagaaaattattttttttaatttaagtcctaaatatagttaaaataaataatgttttagtaaaatgatacactatctctgtgaaatagcctcacccctacatgtggatagaaggaaatgaaaaaataattgctttgacattgtctatatggtactttgtaaagtcatgcttaagtacaaattccatgaaaagctcactgatcctaattctttccctttgaggtctctatggctctgattgtacatgatagtaagtgtaagccatgtaaaaagtaaataatgtctgggcacagtggctcacgcctgtaatcctagcactttgggaggctgaggaggaaggatcacttgagcccagaagttcgagactagcctgggcaacatggagaagccctgtctctacaaaatacagagagaaaaaatcagccagtcatggtggcctacacctgtagtcccagcattccgggaggctgaggtgggaggatcacttgagcccagggaggttggggctgcagtgagccatgatcacaccactgcactccagccaggtgacatagcgagatcctgtctaaaaaaataaaaaataaataatggaacacagcaagtcctaggaagtaggttaaaactaattctttaaaaaaaaaaaaaagttgagcctgaattaaatgtaatgtttccaagtgacaggtatccacatttgcatggttacaagccactgccagttagcagtagcactttcctggcactgtggtcggttttgttttgttttgctttgtttagagacggggtctcactttccaggctggcctcaaactcctgcactcaagcaattcttctaccctggcctcccaagtagctggaattacaggtgtgcgccatcacaactagctggtggtcagttttgttactctgagagctgttcacttctctgaattcacctagagtggttggaccatcagatgtttgggcaaaactgaaagctctttgcaaccacacaccttccctgagcttacatcactgcccttttgagcagaaagtctaaattccttccaagacagtagaattccatcccagtaccaaagccagataggccccctaggaaactgaggtaagagcagtctctaaaaactacccacagcagcattggtgcaggggaacttggccattaggttattatttgagaggaaagtcctcacatcaatagtacatatgaaagtgacctccaaggggattggtgaatactcataaggatcttcaggctgaacagactatgtctggggaaagaacggattatgccccattaaataacaagttgtgttcaagagtcagagcagtgagctcagaggcccttctcactgagacagcaacatttaaaccaaaccagaggaagtatttgtggaactcactgcctcagtttgggtaaaggatgagcagacaagtcaactaaagaaaaaagaaaagcaaggaggagggttgagcaatctagagcatggagtttgttaagtgctctctggatttgagttgaagagcatccatttgagttgaaggccacagggcacaatgagctctcccttctaccaccagaaagtccctggtcaggtctcaggtagtgcggtgtggctcagctgggtttttaattagcgcattctctatccaacatttaattgtttgaaagcctccatatagttagattgtgctttgtaattttgttgttgttgctctatcttattgtatatgcattgagtattaacctgaatgttttgttacttaaatattaaaaacactgttatcctacagtt

SEQ ID NO: 1078 - DNA, 985 bp, Homo sapiens
  source 1..985: mol_type = genomic DNA
gagagcctagggaaaccatctgattagaagagctcccctcaggagcgcgttagcttcacaccttcggcagcaggagggcggcagcttctcgcaggcggcagggcgggcggccaggatcatgtccaccaccacatgccaagtggtggcgttcctcctgtccatcctggggctggccggctgcatcgcggccaccgggatggacatgtggagcacccaggacctgtacgacaaccccgtcacctccgtgttccagtacgaagggctctggaggagctgcgtgaggcagagttcaggcttcaccgaatgcaggccctatttcaccatcctgggacttccagccatgctgcaggcagtgcgagccctgatgatcgtagccatctttgccctgaaatgcatccgcattggcagcatggaggactctgccaaagccaacatgacactgacctccgggatcatgttcattgtctcaggtctttgtgcaattgctggagtgtctgtgtttgccaacatgctggtgactaacttctggatgtccacagctaacatgtacaccggcatgggtgggatggtgcagactgttcagaccaggtacacatttggtgcggctctgttcgtgggctgggtcgctggaggcctcacactaattgggggtgtgatgatgtgcatcgcctgccggggcctggcaccagaagaaaccaactacaaagccgtttcttatcatgcctcaggccacagtgttgcctacaagcctggaggcttcaaggccagcactggctttgggtccaacaccaaaaacaagaagatatacgatggaggtgcccgcacagaggacgaggtacaatcttatccttccaagcacgactatgtgtaatgctctaagacctctcagcacgggcggaagaaactcccggagagctcacccaaaaaacaaggagatcccatctagatttcttcttgcttttgactcacagctggaagttagaaa

SEQ ID NO: 1079 - DNA, 3954 bp, Homo sapiens
  source 1..3954: mol_type = genomic DNA
aacctgctgggcccgccgggactcgcccccctgcccgctcctctcctccagccccggccggcctcggctcggcccccggcccgccccttccagccctcggcacctcccgccggccgcttggctccgccactcggcactcactgcccgggccgcccggacagggagcttcgctggcgcgcttggccggcgacaggacaggttcgggacgtccatctgtccatccgtccggagagaaattacagatccgcagccccgggatggggccggccccgctgccgctgctgctgggcctcttcctccccgcgctctggcgtagagctatcactgaggcaagggaagaagccaagccttacccgctattcccgggaccttttccagggagcctgcaaactgaccacacaccgctgttatcccttcctcacgccagtgggtaccagcctgccttgatgttttcaccaacccagcctggaagaccacatacaggaaacgtagccattccccaggtgacctctgtcgaatcaaagcccctaccgcctcttgccttcaaacacacagttggacacataatactttctgaacataaaggtgtcaaatttaattgctcaatcagtgtacctaatatataccaggacaccacaatttcttggtggaaagatgggaaggaattgcttggggcacatcatgcaattacacagttttatccagatgatgaagttacagcaataatcgcttccttcagcataaccagtgtgcagcgttcagacaatgggtcgtatatctgtaagatgaaaataaacaatgaagagatcgtgtctgatcccatctacatcgaagtacaaggacttcctcactttactaagcagcctgagagcatgaatgtcaccagaaacacagccttcaacctcacctgtcaggctgtgggcccgcctgagcccgtcaacattttctgggttcaaaacagtagccgtgttaacgaacagcctgaaaaatccccctccgtgctaactgttccaggcctgacggagatggcggtcttcagttgtgaggcccacaatgacaaagggctgaccgtgtccaagggagtgcagatcaacatcaaagcaattccctccccaccaactgaagtcagcatccgtaacagcactgcacacagcattctgatctcctgggttcctggttttgatggatactccccgttcaggaattgcagcattcaggtcaaggaagctgatccgctgagtaatggctcagtcatgatttttaacacctctgccttaccacatctgtaccaaatcaagcagctgcaagccctggctaattacagcattggtgtttcctgcatgaatgaaataggctggtctgcagtgagcccttggattctagccagcacgactgaaggagccccatcagtagcacctttaaatgtcactgtgtttctgaatgaatctagtgataatgtggacatcagatggatgaagcctccgactaagcagcaggatggagaactggtgggctaccggatatcccacgtgtggcagagtgcagggatttccaaagagctcttggaggaagttggccagaatggcagccgagctcggatctctgttcaagtccacaatgctacgtgcacagtgaggattgcagccgtcaccagagggggagttgggcccttcagtgatccagtgaaaatatttatccctgcacacggttgggtagattatgccccctcttcaactccggcgcctggcaacgcagatcctgtgctcatcatctttggctgcttttgtggatttattttgattgggttgattttatacatctccttggccatcagaaaaagagtccaggagacaaagtttgggaatgcattcacagaggaggattctgaattagtggtgaattatatagcaaagaaatccttctgtcggcgagccattgaacttaccttacatagcttgggagtcagtgaggaactacaaaataaactagaagatgttgtgattgacaggaatcttctaattcttggaaaaattctgggtgaaggagagtttgggtctgtaatggaaggaaatcttaagcaggaagatgggacctctctgaaagtggcagtgaagaccatgaagttggacaactcttcacagcgggagatcgaggagtttctcagtgaggcagcgtgcatgaaagacttcagccacccaaatgtcattcgacttctaggtgtgtgtatagaaatgagctctcaaggcatcccaaagcccatggtaattttacccttcatgaaatacggggacctgcatacttacttactttattcccgattggagacaggaccaaagcatattcctctgcagacactattgaagttcatggtggatattgccctgggaatggagtatctgagcaacaggaattttcttcatcgagatttagctgctcgaaactgcatgttgcgagatgacatgactgtctgtgttgcggacttcggcctctctaagaagatttacagtggcgattattaccgccaaggccgcattgctaagatgcctgttaaatggatcgccatagaaagtcttgcagaccgagtctacacaagtaaaagtgatgtgtgggcatttggcgtgaccatgtgggaaatagctacgcggggaatgactccctatcctggggtccagaaccatgagatgtatgactatcttctccatggccacaggttgaagcagcccgaagactgcctggatgaactgtatgaaataatgtactcttgctggagaaccgatcccttagaccgccccaccttttcagtattgaggctgcagctagaaaaactcttagaaagtttgcctgacgttcggaaccaagcagacgttatttacgtcaatacacagttgctggagagctctgagggcctggcccagggctccacccttgctccactggacttgaacatcgaccctgactctataattgcctcctgcactccccgcgctgccatcagtgtggtcacagcagaagttcatgacagcaaacctcatgaaggacggtacatcctgaatgggggcagtgaggaatgggaagatctgacttctgccccctctgctgcagtcacagctgaaaagaacagtgttttaccgggggagagacttgttaggaatggggtctcctggtcccattcgagcatgctgcccttgggaagctcattgcccgatgaacttttgtttgctgacgactcctcagaaggctcagaagtcctgatgtgaggagaggtgcggggagacattccaaaaatcaagccaattcttctgctgtaggagaatccaattgtacctgatgtttttggtatttgtcttccttaccaagtgaactccatggccccaaagcaccagatgaatgttgttaagtaagctgtcattaaaaatacataatatatatttatttaaagagaaaaaatatgtgtatatcatggaaaaagacaaggatattttaataaaacattacttatttcatttcacttatcttgcatatcttaaaattaagcttcagctgctccttgatattaacatttgtacagagttgaagttgttttttcaagttcttttctttttcatgactattaaatgtaaaaatatttgtaaaatgaaatgccatatttgacttggcttctggtcttgatgtatttgataagaatgattcattcaatgtttaaagttgtataactgattaattttctgatatggcttcctaataaaatatgaataaggaaggatatgttgaacttacttgagacttgaaagacagtggtcggcagcggccttgtggcctttgcaaaggaattcccttaatgcctggtccttggggcaattgctctgaccattcttggcattgctttatagagatatggaaaaaccacaccagggtctgtagataaggaataaagaatattgaaggattgaaaaa

SEQ ID NO: 1080 - DNA, 3810 bp, Homo sapiens
  source 1..3810: mol_type = genomic DNA
actcactgcccgggccgcccggacagggagcttcgctggcgcgcttggccggcgacaggacaggttcgggacgtccatctgtccatccgtccggagagaaattacagatccgcagccccgggatggggccggccccgctgccgctgctgctgggcctcttcctccccgcgctctggcgtagagctatcactgaggcaagggaagaagccaagccttacccgctattcccgggaccttttccagggagcctgcaaactgaccacacaccgctgttatcccttcctcacgccagtgggtaccagcctgccttgatgttttcaccaacccagcctggaagaccacatacaggaaacgtagccattccccaggtgacctctgtcgaatcaaagcccctaccgcctcttgccttcaaacacacagttggacacataatactttctgaacataaaggtgtcaaatttaattgctcaatcagtgtacctaatatataccaggacaccacaatttcttggtggaaagatgggaaggaattgcttggggcacatcatgcaattacacagttttatccagatgatgaagttacagcaataatcgcttccttcagcataaccagtgtgcagcgttcagacaatgggtcgtatatctgtaagatgaaaataaacaatgaagagatcgtgtctgatcccatctacatcgaagtacaaggacttcctcactttactaagcagcctgagagcatgaatgtcaccagaaacacagccttcaacctcacctgtcaggctgtgggcccgcctgagcccgtcaacattttctgggttcaaaacagtagccgtgttaacgaacagcctgaaaaatccccctccgtgctaactgttccaggcctgacggagatggcggtcttcagttgtgaggcccacaatgacaaagggctgaccgtgtccaagggagtgcagatcaacatcaaagcaattccctccccaccaactgaagtcagcatccgtaacagcactgcacacagcattctgatctcctgggttcctggttttgatggatactccccgttcaggaattgcagcattcaggtcaaggaagctgatccgctgagtaatggctcagtcatgatttttaacacctctgccttaccacatctgtaccaaatcaagcagctgcaagccctggctaattacagcattggtgtttcctgcatgaatgaaataggctggtctgcagtgagcccttggattctagccagcacgactgaaggagccccatcagtagcacctttaaatgtcactgtgtttctgaatgaatctagtgataatgtggacatcagatggatgaagcctccgactaagcagcaggatggagaactggtgggctaccggatatcccacgtgtggcagagtgcagggatttccaaagagctcttggaggaagttggccagaatggcagccgagctcggatctctgttcaagtccacaatgctacgtgcacagtgaggattgcagccgtcaccagagggggagttgggcccttcagtgatccagtgaaaatatttatccctgcacacggtgagagctatacccatgcacagattgccagaaacttacacaaagtgagacctgcctatatttctttgactatttgttcttccctgttacaagccagtgtttctcatatatttcaaaccatgactggtctattggtatctaccaggttgggtagattatgccccctcttcaactccggcgcctggcaacgcagatcctgtgctcatcatctttggctgcttttgtggattttgattgggttgattttatacatctccttggccatcagaaaaagagtccaggagacaaagtttgggaatgcattcacagaggaggattctgaattagtggtgaattatatagcaaagaaatccttctgtcggcgagccattgaacttaccttacatagcttgggagtcagtgaggaactacaaaataaactagaagatgttgtgattgacaggaatcttctaattcttggaaaaattctgggtgaaggagagtttgggtctgtaatggaaggaaatcttaagcaggaagatgggacctctctgaaagtggcagtgaagaccatgaagttggacaactcttcacagcgggagatcgaggagtttctcagtgaggcagcgtgcatgaaagacttcagccacccaaatgtcattcgacttctaggtacttccgagaaatgcaggtgggtggccaagagggctctgctgatctgctctgtgccaaaggaaaaaatctctggtgtagataaaaactgcttgcaaatacatattcctctgcagacactattgaagttcatggtggatattgccctgggaatggagtatctgagcaacaggaattttcttcatcgagatttagctgctcgaaactgcatgttgcgagatgacatgactgtctgtgttgcggacttcggcctctctaagaagatttacagtggcgattattaccgccaaggccgcattgctaagatgcctgttaaatggatcgccatagaaagtcttgcagaccgagtctacacaagtaaaagtgatgtgtgggcatttggcgtgaccatgtgggaaatagctacgcggggaatgactccctatcctggggtccagaaccatgagatgtatgactatcttctccatggccacaggttgaagcagcccactgcctggatgaactgtgaccaggtgggcatgtgcagaggggtggaacccacagacaccccagcccaggagccattcctgatgtgggagatagtgtatgaatgtactcttgctggagaaccgatccctgaccgccccaccttttcagtattgaggctgcagctagaaaaactcttagaaagtttgcctgacgttcggaaccaagcagacgttatttacgtcaatacacagttgctggagagctctgagggcctggccctccacccttgctccactggacttgaacatcgaccctgactctataattgcctcctgcactccccgcgctgccatcagtgtggtcacagcagaagttcatgacagcaaacctcatgaaggacggtacatcctgaatgggggcagtgaggaatgggaagatctgacttctgccccctctgctgcagtcacagctgaaaagaacagtgttttaccgggggagagacttgttaggaatggggtctcctggtcccattcgagcatgctgcccttgggaagctcattgcccgatgaacttttgtttgctgacgactcctcagaaggctcagaagtcctgatgtgaggagaggtgcggggagacattccaaaaatcaagccaattcttctgctgtaggagaatccaattgtacctgatgtttttggtatttgtcttccttaccaagtgaactccatggccccaaagcaccagatgaatgttgttaagtaagctgtcattaaaaatacataatatatatttatttaaagagaaaaaatatgtgtatatcatggaaaaagacaaggatattttaataaaacattacttatttcatttcacttatcttgcatatcttaaaattaagcttcagctgctccttgatattaacatttgtacagagttgaagttgttttttcaagttcttttctttttcatgactattaaatgtaaaaatatttgtaaaatgaaatgccatatttgacttggcttctggtcttgatgtatttgataagaatgattcattcaatgtttaaagttgtataactgattaattttctgatatggcttcctaataaaatatgaataagg

SEQ ID NO: 1081 - DNA, 3189 bp, Homo sapiens
  source 1..3189: mol_type = genomic DNA
cgcccggacagggagcttcgctggcgcgcttggccggcgacaggacaggttcgggacgtccatctgtccatccgtccggagagaaattacagatccgcagccccgggatggggccggccccgctgccgctgctgctgggcctcttcctccccgcgctctggcgtagagcataaccagtgtgcagcgttcagacaatgggtcgtatatctgtaagatgaaaataaacaatgaagagatcgtgtctgatcccatctacatcgaagtacaaggacttcctcactttactaagcagcctgagagcatgaatgtcaccagaaacacagccttcaacctcacctgtcaggctgtgggcccgcctgagcccgtcaacattttctgggttcaaaacagtagccgtgttaacgaacagcctgaaaaatccccctccgtgctaactgttccaggcctgacggagatggcggtcttcagttgtgaggcccacaatgacaaagggctgaccgtgtccaagggagtgcagatcaacatcaaagcaattccctccccaccaactgaagtcagcatccgtaacagcactgcacacagcattctgatctcctgggttcctggttttgatggatactccccgttcaggaattgcagcattcaggtcaaggaagctgatccgctgagtaatggctcagtcatgatttttaacacctctgccttaccacatctgtaccaaatcaagcagctgcaagccctggctaattacagcattggtgtttcctgcatgaatgaaataggctggtctgcagtgagcccttggattctagccagcacgactgaaggagccccatcagtagcacctttaaatgtcactgtgtttctgaatgaatctagtgataatgtggacatcagatggatgaagcctccgactaagcagcaggatggagaactggtgggctaccggatatcccacgtgtggcagagtgcagggatttccaaagagctcttggaggaagttggccagaatggcagccgagctcggatctctgttcaagtccacaatgctacgtgcacagtgaggattgcagccgtcaccagagggggagttgggcccttcagtgatccagtgaaaatatttatccctgcacacggttgggtagattatgccccctcttcaactccggcgcctggcaacgcagatcctgtgctcatcatctttggctgcttttgtggatttattttgattgggttgattttatacatctccttggccatcagaaaaagagtccaggagacaaagtttgggaatgcattcacagaggaggattctgaattagtggtgaattatatagcaaagaaatccttctgtcggcgagccattgaacttaccttacatagcttgggagtcagtgaggaactacaaaataaactagaagatgttgtgattgacaggaatcttctaattcttggaaaaattctgggtgaaggagagtttgggtctgtaatggaaggaaatcttaagcaggaagatgggacctctctgaaagtggcagtgaagaccatgaagttggacaactcttcacagcgggagatcgaggagtttctcagtgaggcagcgtgcatgaaagacttcagccacccaaatgtcattcgacttctaggtgtgtgtatagaaatgagctctcaaggcatcccaaagcccatggtaattttacccttcatgaaatacggggacctgcatacttacttactttattcccgattggagacaggaccaaagcatattcctctgcagacactattgaagttcatggtggatattgccctgggaatggagtatctgagcaacaggaattttcttcatcgagatttagctgctcgaaactgcatgttgcgagatgacatgactgtctgtgttgcggacttcggcctctctaagaagatttacagtggcgattattaccgccaaggccgcattgctaagatgcctgttaaatggatcgccatagaaagtcttgcagaccgagtctacacaagtaaaagtgatgtgtgggcatttggcgtgaccatgtgggaaatagctacgcggggaatgactccctatcctggggtccagaaccatgagatgtatgactatcttctccatggccacaggttgaagcagcccgaagactgcctggatgaactgtatgaaataatgtactcttgctggagaaccgatcccttagaccgccccaccttttcagtattgaggctgcagctagaaaaactcttagaaagtttgcctgacgttcggaaccaagcagacgttatttacgtcaatacacagttgctggagagctctgagggcctggcccagggctccacccttgctccactggacttgaacatcgaccctgactctataattgcctcctgcactccccgcgctgccatcagtgtggtcacagcagaagttcatgacagcaaacctcatgaaggacggtacatcctgaatgggggcagtgaggaatgggaagatctgacttctgccccctctgctgcagtcacagctgaaaagaacagtgttttaccgggggagagacttgttaggaatggggtctcctggtcccattcgagcatgctgcccttgggaagctcattgcccgatgaacttttgtttgctgacgactcctcagaaggctcagaagtcctgatgtgaggagaggtgcggggagacattccaaaaatcaagccaattcttctgctgtaggagaatccaattgtacctgatgtttttggtatttgtcttccttaccaagtgaactccatggccccaaagcaccagatgaatgttgttaagtaagctgtcattaaaaatacataatatatatttatttaaagagaaaaaatatgtgtatatcatggaaaaagacaaggatattttaataaaacattacttatttcatttcacttatcttgcatatcttaaaattaagcttcagctgctccttgatattaacatttgtacagagttgaagttgttttttcaagttcttttctttttcatgactattaaatgtaaaaatatttgtaaaatgaaatgccatatttgacttggcttctggtcttgatgtatttgataagaatgattcattcaatgtttaaagttgtataactgattaattttctgatatggcttcctaataaaatatgaataaggaa

SEQ ID NO: 1082 - DNA, 3600 bp, Homo sapiens
  source 1..3600: mol_type = genomic DNA
ctcggcactcactgcccgggccgcccggacagggagcttcgctggcgcgcttggccggcgacaggacaggttcgggacgtccatctgtccatccgtccggagagaaattacagatccgcagccccgggatggggccggccccgctgccgctgctgctgggcctcttcctccccgcgctctggcgtagagctatcactgaggcaagggaagaagccaagccttacccgctattcccgggaccttttccagggagcctgcaaactgaccacacaccgctgttatcccttcctcacgccagtgggtaccagcctgccttgatgttttcaccaacccagcctggaagaccacatacaggaaacgtagccattccccaggtgacctctgtcgaatcaaagcccctaccgcctcttgccttcaaacacacagttggacacataatactttctgaacataaaggtgtcaaatttaattgctcaatcagtgtacctaatatataccaggacaccacaatttcttggtggaaagatgggaaggaattgcttggggcacatcatgcaattacacagttttatccagatgatgaagttacagcaataatcgcttccttcagcataaccagtgtgcagcgttcagacaatgggtcgtatatctgtaagatgaaaataaacaatgaagagatcgtgtctgatcccatctacatcgaagtacaaggacttcctcactttactaagcagcctgagagcatgaatgtcaccagaaacacagccttcaacctcacctgtcaggctgtgggcccgcctgagcccgtcaacattttctgggttcaaaacagtagccgtgttaacgaacagcctgaaaaatccccctccgtgctaactgttccaggcctgacggagatggcggtcttcagttgtgaggcccacaatgacaaagggctgaccgtgtccaagggagtgcagatcaacatcaaagcaattccctccccaccaactgaagtcagcatccgtaacagcactgcacacagcattctgatctcctgggttcctggttttgatggatactccccgttcaggaattgcagcattcaggtcaaggaagctgatccgctgagtaatggctcagtcatgatttttaacacctctgccttaccacatctgtaccaaatcaagcagctgcaagccctggctaattacagcattggtgtttcctgcatgaatgaaataggctggtctgcagtgagcccttggattctagccagcacgactgaaggagccccatcagtagcacctttaaatgtcactgtgtttctgaatgaatctagtgataatgtggacatcagatggatgaagcctccgactaagcagcaggatggagaactggtgggctaccggatatcccacgtgtggcagagtgcagggatttccaaagagctcttggaggaagttggccagaatggcagccgagctcggatctctgttcaagtccacaatgctacgtgcacagtgaggattgcagccgtcaccagagggggagttgggcccttcagtgatccagtgaaaatatttatccctgcacacggttgggtagattatgccccctcttcaactccggcgcctggcaacgcagatcctgtgctcatcatctttggctgcttttgtggatttattttgattgggttgattttatacatctccttggccatcagaaaaagagtccaggagacaaagtttgggaatgcattcacagaggaggattctgaattagtggtgaattatatagcaaagaaatccttctgtcggcgagccattgaacttaccttacatagcttgggagtcagtgaggaactacaaaataaactagaagatgttgtgattgacaggaatcttctaattcttggaaaaattctgggtgaaggagagtttgggtctgtaatggaaggaaatcttaagcaggaagatgggacctctctgaaagtggcagtgaagaccatgaagttggacaactcttcacagcgggagatcgaggagtttctcagtgaggcagcgtgcatgaaagacttcagccacccaaatgtcattcgacttctaggtgtgtgtatagaaatgagctctcaaggcatcccaaagcccatggtaattttacccttcatgaaatacggggacctgcatacttacttactttattcccgattggagacaggaccaaagcatattcctctgcagacactattgaagttcatggtggatattgccctgggaatggagtatctgagcaacaggaattttcttcatcgagatttagctgctcgaaactgcatgttgcgagatgacatgactgtctgtgttgcggacttcggcctctctaagaagatttacagtggcgattattaccgccaaggccgcattgctaagatgcctgttaaatggatcgccatagaaagtcttgcagaccgagtctacacaagtaaaagtgatgtgtgggcatttggcgtgaccatgtgggaaatagctacgcggggaatgactccctatcctggggtccagaaccatgagatgtatgactatcttctccatggccacaggttgaagcagcccgaagactgcctggatgaactgtatgaaataatgtactcttgctggagaaccgatcccttagaccgccccaccttttcagtattgaggctgcagctagaaaaactcttagaaagtttgcctgacgttcggaaccaagcagacgttatttacgtcaatacacagttgctggagagctctgagggcctggcccagggctccacccttgctccactggacttgaacatcgaccctgactctataattgcctcctgcactccccgcgctgccatcagtgtggtcacagcagaagttcatgacagcaaacctcatgaaggacggtacatcctgaatgggggcagtgaggaatgggaagatctgacttctgccccctctgctgcagtcacagctgaaaagaacagtgttttaccgggggagagacttgttaggaatggggtctcctggtcccattcgagcatgctgcccttgggaagctcattgcccgatgaacttttgtttgctgacgactcctcagaaggctcagaagtcctgatgtgaggagaggtgcggggagacattccaaaaatcaagccaattcttctgctgtaggagaatccaattgtacctgatgtttttggtatttgtcttccttaccaagtgaactccatggccccaaagcaccagatgaatgttgttaagtaagctgtcattaaaaatacataatatatatttatttaaagagaaaaaatatgtgtatatcatggaaaaagacaaggatattttaataaaacattacttatttcatttcacttatcttgcatatcttaaaattaagcttcagctgctccttgatattaacatttgtacagagttgaagttgttttttcaagttcttttctttttcatgactattaaatgtaaaaatatttgtaaaatgaaatgccatatttgacttggcttctggtcttgatgtatttgataagaatgattaattttctgatatggcttcctaataaaatatgaataagga

SEQ ID NO: 1083 - DNA, 1234 bp, Homo sapiens
  source 1..1234: mol_type = genomic DNA
ggccggcgggaagactccgttacccagcgagcgaggcggcggcgcagggccagcggactccatttcccgtcggctcgcggtgggagcgccggaagcccgccccacccctcattgtgcggctcctactaaacggaaggggccgggagaggccgcgttcagtcgggtcccggcagcggctgcagcgctctcgtcttctgcggctctcggtgccctctccttttcgtttccggaaacatggcctccggtgtggctgtctctgatggtgtcatcaaggtgttcaacgacatgaaggtgcgtaagtcttcaacgccagaggaggtgaagaagcgcaagaaggcggtgctcttctgcctgagtgaggacaagaagaacatcatcctggaggagggcaaggagatcctggtgggcgatgtgggccagactgtcgacgacccctacgccacctttgtcaagatgctgccagataaggactgccgctatgccctctatgatgcaacctatgagaccaaggagagcaagaaggaggatctggtgtttatcttctgggcccccgagtctgcgccccttaagagcaaaatgatttatgccagctccaaggacgccatcaagaagaagctgacagggatcaagcatgaattgcaagcaaactgctacgaggaggtcaaggaccgctgcaccctggcagagaagctggggggcagtgccgtcatctccctggagggcaagcctttgtgagccccttctggccccctgcctggagcatctggcagccccacacctgcccttgggggttgcaggctgcccccttcctgccagaccggaggggctggggggatcccagcagggggagggcaatcccttcaccccagttgccaaacagaccccccaccccctggattttccttctccctccatcccttgacggttctggccttcccaaactgcttttgatcttttgattcctcttgggctgaagcagaccaagttccccccaggcaccccagttgtgggggagcctgtattttttttaacaacatccccattccccacctggtcctcccccttcccatgctgccaacttctaaccgcaatagtgactctgtgcttgtctgtttagttctgtgtataaatggaatgttgtggagatgacccctccctgtgccggctggttcctctcccttttcccctggtcacggctactcatggaagcaggaccagtaagggaccttcgatt

SEQ ID NO: 1084 - DNA, 1752 bp, Homo sapiens
  source 1..1752: mol_type = genomic DNA
aactgcgaagcccccctctctctccccgttgctcttggaaactctaaggctcagaaaagggggcgctagcctcatattcatgtagggtcgctcgcgggaggcggggtcaagctgctgtctccacctggagcgccgggagtccgggcgggggcggtgctgtggaatgtccccgactacaacccccggtcgggattccaggctaatcaatagttgcttcgattcagaaatgcaaaaccctaacctcactcaaaaatttcaggccaagggatccagataataccagatgggtcttaagaaagccgttttgctgtgggataaagagccgcttagtcggggatcgttttcgggtcattttactgagcgccgcctcgccgggctcagagcggttcctgggaaattggaccaatgggctcgcgctgcgcgctgcggtgccgcccaggacctgggcctacatttccctacatgcactgcagctcggagccggccggcgggaagactccgttacccagcgagcgaggcggcggcgcagggccagcggactccatttcccgtcggctcgcggtgggagcgccggaagcccgccccacccctcattgtgcggctcctactaaacggaaggggccgggagaggccgcgttcagtcgggtcccggcagcggctgcagcgctctcgtcttctgcggctctcggtgccctctccttttcgtttccggaaacatggcctccggtgtggctgtctctgatggtgtcatcaaggtgttcaacgacatgaaggtgcgtaagtcttcaacgccagaggaggtgaagaagcgcaagaaggcggtgctcttctgcctgagtgaggacaagaagaacatcatcctggaggagggcaaggagatcctggtgggcgatgtgggccagactgtcgacgacccctacgccacctttgtcaagatgctgccagataaggactgccgctatgccctctatgatgcaacctatgagaccaaggagagcaagaaggaggatctggtgtttatcttctgggcccccgagtctgcgccccttaagagcaaaatgatttatgccagctccaaggacgccatcaagaagaagctgacagggatcaagcatgaattgcaagcaaactgctacgaggaggtcaaggaccgctgcaccctggcagagaagctggggggcagtgccgtcatctccctggagggcaagcctttgtgagccccttctggccccctgcctggagcatctggcagccccacacctgcccttgggggttgcaggctgcccccttcctgccagaccggaggggctggggggatcccagcagggggagggcaatcccttcaccccagttgccaaacagaccccccaccccctggattttccttctccctccatcccttgacggttctggccttcccaaactgcttttgatcttttgattcctcttgggctgaagcagaccaagttccccccaggcaccccagttgtgggggagcctgtattttttttaacaacatccccattccccacctggtcctcccccttcccatgctgccaacttctaaccgcaatagtgactctgtgcttgtctgtttagttctgtgtataaatggaatgttgtggagatgacccctccctgtgccggctggttcctctcccttttcccctggtcacggctactcatggaagcaggaccagtaagggaccttcgattaaaaaaaaaaaagacaataataaaaaggctcattaa

SEQ ID NO: 1085 - DNA, 567 bp, Homo sapiens
  source 1..567: mol_type = genomic DNA
cgggagtccgggcgggggcggtgctgtggaatgtccccgactacaacccccgctcggagccggccggcgggaagactccgttacccagcgagcgaggcggcggcgcagggccagcggactccatttcccgtcggctcgcggtgggagcgccggaagcccgccccacccctcattgtgcggctcctactaaacggaaggggccgggagaggccgcgttcagtcgggtcccggcagcggctgcagcgctctcgtcttctgcggctctcggtgccctctccttttcgtttccggaaacatggcctccggtgtggctgtctctgatggtgtcatcaaggtgttcaacgacatgaaggtgcgtaagtcttcaacgccagaggaggtgaagaagcgcaagaaggcggtgctcttctgcctgagtgaggacaagaagaacatcatcctggaggagggcaaggagatcctggtgggcgatgtgggccagactgtcgacgacccctacgccacctttgtcaagatgctgccagataaggactgccgctatgccctctatgatgcaacctatgagac

SEQ ID NO: 1086 - DNA, 5411 bp, Homo sapiens
  source 1..5411: mol_type = genomic DNA
gtgtcccatagtgtttccaaacttggaaagggcgggggagggcgggaggatgcggagggcggaggtatgcagacaacgagtcagagtttccccttgaaagcctcaaaagtgtccacgtcctcaaaaagaatggaaccaatttaagaagccagccccgtggccacgtcccttcccccattcgctccctcctctgcgcccccgcaggctcctcccagctgtggctgcccgggcccccagccccagccctcccattggtggaggcccttttggaggcaccctagggccagggaaacttttgccgtataaatagggcagatccgggctttattattttagcaccacggcagcaggaggtttcggctaagttggaggtactggccacgactgcatgcccgcgcccgccaggtgatacctccgccggtgacccaggggctctgcgacacaaggagtctgcatgtctaagtgctagacatgctcagctttgtggatacgcggactttgttgctgcttgcagtaaccttatgcctagcaacatgccaatctttacaagaggaaactgtaagaaagggcccagccggagatagaggaccacgtggagaaaggggtccaccaggccccccaggcagagatggtgaagatggtcccacaggccctcctggtccacctggtcctcctggcccccctggtctcggtgggaactttgctgctcagtatgatggaaaaggagttggacttggccctggaccaatgggcttaatgggacctagaggcccacctggtgcagctggagccccaggccctcaaggtttccaaggacctgctggtgagcctggtgaacctggtcaaactggtcctgcaggtgctcgtggtccagctggccctcctggcaaggctggtgaagatggtcaccctggaaaacccggacgacctggtgagagaggagttgttggaccacagggtgctcgtggtttccctggaactcctggacttcctggcttcaaaggcattaggggacacaatggtctggatggattgaagggacagcccggtgctcctggtgtgaagggtgaacctggtgcccctggtgaaaatggaactccaggtcaaacaggagcccgtgggcttcctggtgagagaggacgtgttggtgcccctggcccagctggtgcccgtggcagtgatggaagtgtgggtcccgtgggtcctgctggtcccattgggtctgctggccctccaggcttcccaggtgcccctggccccaagggtgaaattggagctgttggtaacgctggtcctgctggtcccgccggtccccgtggtgaagtgggtcttccaggcctctccggccccgttggacctcctggtaatcctggagcaaacggccttactggtgccaagggtgctgctggccttcccggcgttgctggggctcccggcctccctggaccccgcggtattcctggccctgttggtgctgccggtgctactggtgccagaggacttgttggtgagcctggtccagctggctccaaaggagagagcggtaacaagggtgagcccggctctgctgggccccaaggtcctcctggtcccagtggtgaagaaggaaagagaggccctaatggggaagctggatctgccggccctccaggacctcctgggctgagaggtagtcctggttctcgtggtcttcctggagctgatggcagagctggcgtcatgggccctcctggtagtcgtggtgcaagtggccctgctggagtccgaggacctaatggagatgctggtcgccctggggagcctggtctcatgggacccagaggtcttcctggttcccctggaaatatcggccccgctggaaaagaaggtcctgtcggcctccctggcatcgacggcaggcctggcccaattggcccagctggagcaagaggagagcctggcaacattggattccctggacccaaaggccccactggtgatcctggcaaaaacggtgataaaggtcatgctggtcttgctggtgctcggggtgctccaggtcctgatggaaacaatggtgctcagggacctcctggaccacagggtgttcaaggtggaaaaggtgaacagggtccccctggtcctccaggcttccagggtctgcctggcccctcaggtcccgctggtgaagttggcaaaccaggagaaaggggtctccatggtgagtttggtctccctggtcctgctggtccaagaggggaacgcggtcccccaggtgagagtggtgctgccggtcctactggtcctattggaagccgaggtccttctggacccccagggcctgatggaaacaagggtgaacctggtgtggttggtgctgtgggcactgctggtccatctggtcctagtggactcccaggagagaggggtgctgctggcatacctggaggcaagggagaaaagggtgaacctggtctcagaggtgaaattggtaaccctggcagagatggtgctcgtggtgctcctggtgctgtaggtgcccctggtcctgctggagccacaggtgaccggggcgaagctggggctgctggtcctgctggtcctgctggtcctcggggaagccctggtgaacgtggtgaggtcggtcctgctggccccaatggatttgctggtcctgctggtgctgctggtcaacctggtgctaaaggagaaagaggagccaaagggcctaagggtgaaaacggtgttgttggtcccacaggccccgttggagctgctggcccagctggtccaaatggtccccccggtcctgctggaagtcgtggtgatggaggcccccctggtatgactggtttccctggtgctgctggacggactggtcccccaggaccctctggtatttctggccctcctggtccccctggtcctgctgggaaagaagggcttcgtggtcctcgtggtgaccaaggtccagttggccgaactggagaagtaggtgcagttggtccccctggcttcgctggtgagaagggtccctctggagaggctggtactgctggacctcctggcactccaggtcctcagggtcttcttggtgctcctggtattctgggtctccctggctcgagaggtgaacgtggtctaccaggtgttgctggtgctgtgggtgaacctggtcctcttggcattgccggccctcctggggcccgtggtcctcctggtgctgtgggtagtcctggagtcaacggtgctcctggtgaagctggtcgtgatggcaaccctgggaacgatggtcccccaggtcgcgatggtcaacccggacacaagggagagcgcggttaccctggcaatattggtcccgttggtgctgcaggtgcacctggtcctcatggccccgtgggtcctgctggcaaacatggaaaccgtggtgaaactggtccttctggtcctgttggtcctgctggtgctgttggcccaagaggtcctagtggcccacaaggcattcgtggcgataagggagagcccggtgaaaaggggcccagaggtcttcctggcttaaagggacacaatggattgcaaggtctgcctggtatcgctggtcaccatggtgatcaaggtgctcctggctccgtgggtcctgctggtcctaggggccctgctggtccttctggccctgctggaaaagatggtcgcactggacatcctggtacagttggacctgctggcattcgaggccctcagggtcaccaaggccctgctggcccccctggtccccctggccctcctggacctccaggtgtaagcggtggtggttatgactttggttacgatggagacttctacagggctgaccagcctcgctcagcaccttctctcagacccaaggactatgaagttgatgctactctgaagtctctcaacaaccagattgagacccttcttactcctgaaggctctagaaagaacccagctcgcacatgccgtgacttgagactcagccacccagagtggagcagtggttactactggattgaccctaaccaaggatgcactatggatgctatcaaagtatactgtgatttctctactggcgaaacctgtatccgggcccaacctgaaaacatcccagccaagaactggtataggagctccaaggacaagaaacacgtctggctaggagaaactatcaatgctggcagccagtttgaatataatgtagaaggagtgacttccaaggaaatggctacccaacttgccttcatgcgcctgctggccaactatgcctctcagaacatcacctaccactgcaagaacagcattgcatacatggatgaggagactggcaacctgaaaaaggctgtcattctacagggctctaatgatgttgaacttgttgctgagggcaacagcaggttcacttacactgttcttgtagatggctgctctaaaaagacaaatgaatggggaaagacaatcattgaatacaaaacaaataagccatcacgcctgcccttccttgatattgcacctttggacatcggtggtgctgaccaggaattctttgtggacattggcccagtctgtttcaaataaatgaactcaatctaaattaaaaaagaaagaaatttgaaaaaactttctctttgccatttcttcttcttcttttttaactgaaagctgaatccttccatttcttctgcacatctacttgcttaaattgtgggcaaaagagaaaaagaaggattgatcagagcattgtgcaatacagtttcattaactccttcccccgctcccccaaaaatttgaatttttttttcaacactcttacacctgttatggaaaatgtcaacctttgtaagaaaaccaaaataaaaattgaaaaataaaaaccataaacatttgcaccacttgtggcttttgaatatcttccacagagggaagtttaaaacccaaacttccaaaggtttaaactacctcaaaacactttcccatgagtgtgatccacattgttaggtgctgacctagacagagatgaactgaggtccttgttttgttttgttcataatacaaaggtgctaattaatagtatttcagatacttgaagaatgttgatggtgctagaagaatttgagaagaaatactcctgtattgagttgtatcgtgtggtgtattttttaaaaaatttgatttagcattcatattttccatcttattcccaattaaaagtatgcagattatttgcccaaatcttcttcagattcagcatttgttctttgccagtctcattttcatcttcttccatggttccacagaagctttgtttcttgggcaagcagaaaaattaaattgtacctattttgtatatgtgagatgtttaaataaattgtgaaaaaaatgaaataaagcatgtttggttttccaaaagaacatat

SEQ ID NO: 1087 - DNA, 5414 bp, Homo sapiens
  source 1..5414: mol_type = genomic DNA
gtgtcccatagtgtttccaaacttggaaagggcgggggagggcgggaggatgcggagggcggaggtatgcagacaacgagtcagagtttccccttgaaagcctcaaaagtgtccacgtcctcaaaaagaatggaaccaatttaagaagccagccccgtggccacgtcccttcccccattcgctccctcctctgcgcccccgcaggctcctcccagctgtggctgcccgggcccccagccccagccctcccattggtggaggcccttttggaggcaccctagggccagggaaacttttgccgtataaatagggcagatccgggctttattattttagcaccacggcagcaggaggtttcggctaagttggaggtactggccacgactgcatgcccgcgcccgccaggtgatacctccgccggtgacccaggggctctgcgacacaaggagtctgcatgtctaagtgctagacatgctcagctttgtggatacgcggactttgttgctgcttgcagtaaccttatgcctagcaacatgccaatgtacacttggagggcagactctcagtaaatttccaccctacttgcacatagaaaggtctgaacaaggtccaccaggccccccaggcagagatggtgaagatggtcccacaggccctcctggtccacctggtcctcctggcccccctggtctcggtgggaactttgctgctcagtatgatggaaaaggagttggacttggccctggaccaatgggcttaatgggacctagaggcccacctggtgcagctggagccccaggccctcaaggtttccaaggacctgctggtgagcctggtgaacctggtcaaactggtcctgcaggtgctcgtggtccagctggccctcctggcaaggctggtgaagatggtcaccctggaaaacccggacgacctggtgagagaggagttgttggaccacagggtgctcgtggtttccctggaactcctggacttcctggcttcaaaggcattaggggacacaatggtctggatggattgaagggacagcccggtgctcctggtgtgaagggtgaacctggtgcccctggtgaaaatggaactccaggtcaaacaggagcccgtgggcttcctggtgagagaggacgtgttggtgcccctggcccagctggtgcccgtggcagtgatggaagtgtgggtcccgtgggtcctgctggtcccattgggtctgctggccctccaggcttcccaggtgcccctggccccaagggtgaaattggagctgttggtaacgctggtcctgctggtcccgccggtccccgtggtgaagtgggtcttccaggcctctccggccccgttggacctcctggtaatcctggagcaaacggccttactggtgccaagggtgctgctggccttcccggcgttgctggggctcccggcctccctggaccccgcggtattcctggccctgttggtgctgccggtgctactggtgccagaggacttgttggtgagcctggtccagctggctccaaaggagagagcggtaacaagggtgagcccggctctgctgggccccaaggtcctcctggtcccagtggtgaagaaggaaagagaggccctaatggggaagctggatctgccggccctccaggacctcctgggctgagaggtagtcctggttctcgtggtcttcctggagctgatggcagagctggcgtcatgggccctcctggtagtcgtggtgcaagtggccctgctggagtccgaggacctaatggagatgctggtcgccctggggagcctggtctcatgggacccagaggtcttcctggttcccctggaaatatcggccccgctggaaaagaaggtcctgtcggcctccctggcatcgacggcaggcctggcccaattggcccagctggagcaagaggagagcctggcaacattggattccctggacccaaaggccccactggtgatcctggcaaaaacggtgataaaggtcatgctggtcttgctggtgctcggggtgctccaggtcctgatggaaacaatggtgctcagggacctcctggaccacagggtgttcaaggtggaaaaggtgaacagggtccccctggtcctccaggcttccagggtctgcctggcccctcaggtcccgctggtgaagttggcaaaccaggagaaaggggtctccatggtgagtttggtctccctggtcctgctggtccaagaggggaacgcggtcccccaggtgagagtggtgctgccggtcctactggtcctattggaagccgaggtccttctggacccccagggcctgatggaaacaagggtgaacctggtgtggttggtgctgtgggcactgctggtccatctggtcctagtggactcccaggagagaggggtgctgctggcatacctggaggcaagggagaaaagggtgaacctggtctcagaggtgaaattggtaaccctggcagagatggtgctcgtggtgctcctggtgctgtaggtgcccctggtcctgctggagccacaggtgaccggggcgaagctggggctgctggtcctgctggtcctgctggtcctcggggaagccctggtgaacgtggtgaggtcggtcctgctggccccaatggatttgctggtcctgctggtgctgctggtcaacctggtgctaaaggagaaagaggagccaaagggcctaagggtgaaaacggtgttgttggtcccacaggccccgttggagctgctggcccagctggtccaaatggtccccccggtcctgctggaagtcgtggtgatggaggcccccctggtatgactggtttccctggtgctgctggacggactggtcccccaggaccctctggtatttctggccctcctggtccccctggtcctgctgggaaagaagggcttcgtggtcctcgtggtgaccaaggtccagttggccgaactggagaagtaggtgcagttggtccccctggcttcgctggtgagaagggtccctctggagaggctggtactgctggacctcctggcactccaggtcctcagggtcttcttggtgctcctggtattctgggtctccctggctcgagaggtgaacgtggtctaccaggtgttgctggtgctgtgggtgaacctggtcctcttggcattgccggccctcctggggcccgtggtcctcctggtgctgtgggtagtcctggagtcaacggtgctcctggtgaagctggtcgtgatggcaaccctgggaacgatggtcccccaggtcgcgatggtcaacccggacacaagggagagcgcggttaccctggcaatattggtcccgttggtgctgcaggtgcacctggtcctcatggccccgtgggtcctgctggcaaacatggaaaccgtggtgaaactggtccttctggtcctgttggtcctgctggtgctgttggcccaagaggtcctagtggcccacaaggcattcgtggcgataagggagagcccggtgaaaaggggcccagaggtcttcctggcttaaagggacacaatggattgcaaggtctgcctggtatcgctggtcaccatggtgatcaaggtgctcctggctccgtgggtcctgctggtcctaggggccctgctggtccttctggccctgctggaaaagatggtcgcactggacatcctggtacagttggacctgctggcattcgaggccctcagggtcaccaaggccctgctggcccccctggtccccctggccctcctggacctccaggtgtaagcggtggtggttatgactttggttacgatggagacttctacagggctgaccagcctcgctcagcaccttctctcagacccaaggactatgaagttgatgctactctgaagtctctcaacaaccagattgagacccttcttactcctgaaggctctagaaagaacccagctcgcacatgccgtgacttgagactcagccacccagagtggagcagtggttactactggattgaccctaaccaaggatgcactatggatgctatcaaagtatactgtgatttctctactggcgaaacctgtatccgggcccaacctgaaaacatcccagccaagaactggtataggagctccaaggacaagaaacacgtctggctaggagaaactatcaatgctggcagccagtttgaatataatgtagaaggagtgacttccaaggaaatggctacccaacttgccttcatgcgcctgctggccaactatgcctctcagaacatcacctaccactgcaagaacagcattgcatacatggatgaggagactggcaacctgaaaaaggctgtcattctacagggctctaatgatgttgaacttgttgctgagggcaacagcaggttcacttacactgttcttgtagatggctgctctaaaaagacaaatgaatggggaaagacaatcattgaatacaaaacaaataagccatcacgcctgcccttccttgatattgcacctttggacatcggtggtgctgaccaggaattctttgtggacattggcccagtctgtttcaaataaatgaactcaatctaaattaaaaaagaaagaaatttgaaaaaactttctctttgccatttcttcttcttcttttttaactgaaagctgaatccttccatttcttctgcacatctacttgcttaaattgtgggcaaaagagaaaaagaaggattgatcagagcattgtgcaatacagtttcattaactccttcccccgctcccccaaaaatttgaatttttttttcaacactcttacacctgttatggaaaatgtcaacctttgtaagaaaaccaaaataaaaattgaaaaataaaaaccataaacatttgcaccacttgtggcttttgaatatcttccacagagggaagtttaaaacccaaacttccaaaggtttaaactacctcaaaacactttcccatgagtgtgatccacattgttaggtgctgacctagacagagatgaactgaggtccttgttttgttttgttcataatacaaaggtgctaattaatagtatttcagatacttgaagaatgttgatggtgctagaagaatttgagaagaaatactcctgtattgagttgtatcgtgtggtgtattttttaaaaaatttgatttagcattcatattttccatcttattcccaattaaaagtatgcagattatttgcccaaatcttcttcagattcagcatttgttctttgccagtctcattttcatcttcttccatggttccacagaagctttgtttcttgggcaagcagaaaaattaaattgtacctattttgtatatgtgagatgtttaaataaattgtgaaaaaaatgaaataaagcatgtttggttttccaaaagaacatat

SEQ ID NO: 1088 - DNA, 5543 bp, Homo sapiens
  source 1..5543: mol_type = genomic DNA
gtgagggaagccaaactttttcctatttaaggccaaagcaaaggaatctcagtggctgagttttatgacgggcccggtgctgaagggcagggaacaacttgatggtgctactttgaactgcttttcttttctcctttttgcacaaagagtctcatgtctgatatttagacatgatgagctttgtgcaaaaggggagctggctacttctcgctctgcttcatcccactattattttggcacaacaggaagctgttgaaggaggatgttcccatcttggtcagtcctatgcggatagagatgtctggaagccagaaccatgccaaatatgtgtctgtgactcaggatccgttctctgcgatgacataatatgtgacgatcaagaattagactgccccaacccagaaattccatttggagaatgttgtgcagtttgcccacagcctccaactgctcctactcgccctcctaatggtcaaggacctcaaggccccaagggagatccaggccctcctggtattcctgggagaaatggtgaccctggtattccaggacaaccagggtcccctggttctcctggcccccctggaatctgtgaatcatgccctactggtcctcagaactattctccccagtatgattcatatgatgtcaagtctggagtagcagtaggaggactcgcaggctatcctggaccagctggccccccaggccctcccggtccccctggtacatctggtcatcctggttcccctggatctccaggataccaaggaccccctggtgaacctgggcaagctggtccttcaggccctccaggacctcctggtgctataggtccatctggtcctgctggaaaagatggagaatcaggtagacccggacgacctggagagcgaggattgcctggacctccaggtatcaaaggtccagctgggatacctggattccctggtatgaaaggacacagaggcttcgatggacgaaatggagaaaagggtgaaacaggtgctcctggattaaagggtgaaaatggtcttccaggcgaaaatggagctcctggacccatgggtccaagaggggctcctggtgagcgaggacggccaggacttcctggggctgcaggtgctcggggtaatgacggtgctcgaggcagtgatggtcaaccaggccctcctggtcctcctggaactgccggattccctggatcccctggtgctaagggtgaagttggacctgcagggtctcctggttcaaatggtgcccctggacaaagaggagaacctggacctcagggacacgctggtgctcaaggtcctcctggccctcctgggattaatggtagtcctggtggtaaaggcgaaatgggtcccgctggcattcctggagctcctggactgatgggagcccggggtcctccaggaccagccggtgctaatggtgctcctggactgcgaggtggtgcaggtgagcctggtaagaatggtgccaaaggagagcccggaccacgtggtgaacgcggtgaggctggtattccaggtgttccaggagctaaaggcgaagatggcaaggatggatcacctggagaacctggtgcaaatgggcttccaggagctgcaggagaaaggggtgcccctgggttccgaggacctgctggaccaaatggcatcccaggagaaaagggtcctgctggagagcgtggtgctccaggccctgcagggcccagaggagctgctggagaacctggcagagatggcgtccctggaggtccaggaatgaggggcatgcccggaagtccaggaggaccaggaagtgatgggaaaccagggcctcccggaagtcaaggagaaagtggtcgaccaggtcctcctgggccatctggtccccgaggtcagcctggtgtcatgggcttccccggtcctaaaggaaatgatggtgctcctggtaagaatggagaacgaggtggccctggaggacctggccctcagggtcctcctggaaagaatggtgaaactggacctcagggacccccagggcctactgggcctggtggtgacaaaggagacacaggaccccctggtccacaaggattacaaggcttgcctggtacaggtggtcctccaggagaaaatggaaaacctggggaaccaggtccaaagggtgatgccggtgcacctggagctccaggaggcaagggtgatgctggtgcccctggtgaacgtggacctcctggattggcaggggccccaggacttagaggtggagctggtccccctggtcccgaaggaggaaagggtgctgctggtcctcctgggccacctggtgctgctggtactcctggtctgcaaggaatgcctggagaaagaggaggtcttggaagtcctggtccaaagggtgacaagggtgaaccaggcggtccaggtgctgatggtgtcccagggaaagatggcccaaggggtcctactggtcctattggtcctcctggcccagctggccagcctggagataagggtgaaggtggtgcccccggacttccaggtatagctggacctcgtggtagccctggtgagagaggtgaaactggccctccaggacctgctggtttccctggtgctcctggacagaatggtgaacctggtggtaaaggagaaagaggggctccgggtgagaaaggtgaaggaggccctcctggagttgcaggaccccctggaggttctggacctgctggtcctcctggtccccaaggtgtcaaaggtgaacgtggcagtcctggtggacctggtgctgctggcttccctggtgctcgtggtcttcctggtcctcctggtagtaatggtaacccaggacccccaggtcccagcggttctccaggcaaggatgggcccccaggtcctgcgggtaacactggtgctcctggcagccctggagtgtctggaccaaaaggtgatgctggccaaccaggagagaagggatcgcctggtgcccagggcccaccaggagctccaggcccacttgggattgctgggatcactggagcacggggtcttgcaggaccaccaggcatgccaggtcctaggggaagccctggccctcagggtgtcaagggtgaaagtgggaaaccaggagctaacggtctcagtggagaacgtggtccccctggaccccagggtcttcctggtctggctggtacagctggtgaacctggaagagatggaaaccctggatcagatggtcttccaggccgagatggatctcctggtggcaagggtgatcgtggtgaaaatggctctcctggtgcccctggcgctcctggtcatccaggcccacctggtcctgtcggtccagctggaaagagtggtgacagaggagaaagtggccctgctggccctgctggtgctcccggtcctgctggttcccgaggtgctcctggtcctcaaggcccacgtggtgacaaaggtgaaacaggtgaacgtggagctgctggcatcaaaggacatcgaggattccctggtaatccaggtgccccaggttctccaggccctgctggtcagcagggtgcaatcggcagtccaggacctgcaggccccagaggacctgttggacccagtggacctcctggcaaagatggaaccagtggacatccaggtcccattggaccaccagggcctcgaggtaacagaggtgaaagaggatctgagggctccccaggccacccagggcaaccaggccctcctggacctcctggtgcccctggtccttgctgtggtggtgttggagccgctgccattgctgggattggaggtgaaaaagctggcggttttgccccgtattatggagatgaaccaatggatttcaaaatcaacaccgatgagattatgacttcactcaagtctgttaatggacaaatagaaagcctcattagtcctgatggttctcgtaaaaaccccgctagaaactgcagagacctgaaattctgccatcctgaactcaagagtggagaatactgggttgaccctaaccaaggatgcaaattggatgctatcaaggtattctgtaatatggaaactggggaaacatgcataagtgccaatcctttgaatgttccacggaaacactggtggacagattctagtgctgagaagaaacacgtttggtttggagagtccatggatggtggttttcagtttagctacggcaatcctgaacttcctgaagatgtccttgatgtgcatctggcattccttcgacttctctccagccgagcttcccagaacatcacatatcactgcaaaaatagcattgcatacatggatcaggccagtggaaatgtaaagaaggccctgaagctgatggggtcaaatgaaggtgaattcaaggctgaaggaaatagcaaattcacctacacagttctggaggatggttgcacgaaacacactggggaatggagcaaaacagtctttgaatatcgaacacgcaaggctgtgagactacctattgtagatattgcaccctatgacattggtggtcctgatcaagaatttggtgtggacgttggccctgtttgctttttataaaccaaactctatctgaaatcccaacaaaaaaaatttaactccatatgtgttcctcttgttctaatcttgtcaaccagtgcaagtgaccgacaaaattccagttatttatttccaaaatgtttggaaacagtataatttgacaaagaaaaatgatacttctctttttttgctgttccaccaaatacaattcaaatgctttttgttttatttttttaccaattccaatttcaaaatgtctcaatggtgctataataaataaacttcaacactctttatgataacaacactgtgttatattctttgaatcctagcccatctgcagagcaatgactgtgctcaccagtaaaagataacctttctttctgaaatagtcaaatacgaaattagaaaagccctccctattttaactacctcaactggtcagaaacacagattgtattctatgagtcccagaagatgaaaaaaattttatacgttgataaaacttataaatttcattgattaatctcctggaagattggtttaaaaagaaaagtgtaatgcaagaatttaaagaaatatttttaaagccacaattattttaatattggatatcaactgcttgtaaaggtgctcctcttttttcttgtcattgctggtcaagattactaatatttgggaaggctttaaagacgcatgttatggtgctaatgtactttcacttttaaactctagatcagaattgttgacttgcattcagaacataaatgcacaaaatctgtacatgtctcccatcagaaagattcattggcatgccacaggggattctcctccttcatcctgtaaaggtcaacaataaaaaccaaattatggggctgcttttgtcacactagcatagagaatgtgttgaaatttaactttgtaagcttgtatgtggttgttgatcttttttttccttacagacacccataataaaatatcatattaaaattc

SEQ ID NO: 1089 - DNA, 4581 bp, Homo sapiens
  source 1..4581: mol_type = genomic DNA
ggctgagttttatgacgggcccggtgctgaagggcagggaacaacttgatggtgctactttgaactgcttttcttttctcctttttgcacaaagagtctcatgtctgatatttagacatgatgagctttgtgcaaaaggggagctggctacttctcgctctgcttcatcccactattattttggcacaacaggaagctgttgaaggaggatgttcccatcttggtcagtcctatgcggatagagatgtctggaagccagaaccatgccaaatatgtgtctgtgactcaggatccgttctctgcgatgacataatatgtgacgatcaagaattagactgccccaacccagaaattccatttggagaatgttgtgcagtttgcccacagcctccaactgctcctactcgccctcctaatggtcaaggacctcaaggccccaagggagatccaggccctcctggtattcctgggagaaatggtgaccctggtattccaggacaaccagggtcccctggttctcctggcccccctggaatctgtgaatcatgccctactggtcctcagaactattctccccagtatgattcatatgatgtcaagtctggagtagcagtaggaggactcgcaggctatcctggaccagctggccccccaggccctcccggtccccctggtacatctggtcatcctggttcccctggatctccaggataccaaggaccccctggtgaacctgggcaagctggtccttcaggccctccaggacctcctggtgctataggtccatctggtcctgctggaaaagatggagaatcaggtagacccggacgacctggagagcgaggattgcctggacctccaggtatcaaaggtccagctgggatacctggattccctggtatgaaaggacacagaggcttcgatggacgaaatggagaaaagggtgaaacaggtgctcctggattaaagggtgaaaatggtcttccaggcgaaaatggagctcctggacccatgggtccaagaggggctcctggtgagcgaggacggccaggacttcctggggctgcaggtgctcggggtaatgacggtgctcgaggcagtgatggtcaaccaggccctcctggtcctcctggaactgccggattccctggatcccctggtgctaagggtgaagttggacctgcagggtctcctggttcaaatggtgcccctggacaaagaggagaacctggacctcagggacacgctggtgctcaaggtcctcctggccctcctgggattaatggtagtcctggtggtaaaggcgaaatgggtcccgctggcattcctggagctcctggactgatgggagcccggggtcctccaggaccagccggtgctaatggtgctcctggactgcgaggtggtgcaggtgagcctggtaagaatggtgccaaaggagagcccggaccacgtggtgaacgcggtgaggctggtattccaggtgttccaggagctaaaggcgaagatggcaaggatggatcacctggagaacctggtgcaaatgggcttccaggagctgcaggagaaaggggtgcccctgggttccgaggacctgctggaccaaatggcatcccaggagaaaagggtcctgctggagagcgtggtgctccaggccctgcagggcccagaggagctgctggagaacctggcagagatggcgtccctggaggtccaggaatgaggggcatgcccggaagtccaggaggaccaggaagtgatgggaaaccagggcctcccggaagtcaaggagaaagtggtcgaccaggtcctcctgggccatctggtccccgaggtcagcctggtgtcatgggcttccccggtcctaaaggaaatgatggtgctcctggtaagaatggagaacgaggtggccctggaggacctggccctcagggtcctcctggaaagaatggtgaaactggacctcagggacccccagggcctactgggcctggtggtgacaaaggagacacaggaccccctggtccacaaggattacaaggcttgcctggtacaggtggtcctccaggagaaaatggaaaacctggggaaccaggtccaaagggtgatgccggtgcacctggagctccaggaggcaagggtgatgctggtgcccctggtgaacgtggacctcctggattggcaggggccccaggacttagaggtggagctggtccccctggtcccgaaggaggaaagggtgctgctggtcctcctgggccacctggtgctgctggtactcctggtctgcaaggaatgcctggagaaagaggaggtcttggaagtcctggtccaaagggtgacaagggtgaaccaggcggtccaggtgctgatggtgtcccagggaaagatggcccaaggggtcctactggtcctattggtcctcctggcccagctggccagcctggagataagggtgaaggtggtgcccccggacttccaggtatagctggacctcgtggtagccctggtgagagaggtgaaactggccctccaggacctgctggtttccctggtgctcctggacagaatggtgaacctggtggtaaaggagaaagaggggctccgggtgagaaaggtgaaggaggccctcctggactctttggacctcctggcaaagatggaaccagtggacatccaggtcccattggaccaccagggcctcgaggtaacagaggtgaaagaggatctgagggctccccaggccacccagggcaaccaggccctcctggacctcctggtgcccctggtccttgctgtggtggtgttggagccgctgccattgctgggattggaggtgaaaaagctggcggttttgccccgtattatggagatgaaccaatggatttcaaaatcaacaccgatgagattatgacttcactcaagtctgttaatggacaaatagaaagcctcattagtcctgatggttctcgtaaaaaccccgctagaaactgcagagacctgaaattctgccatcctgaactcaagagtggagaatactgggttgaccctaaccaaggatgcaaattggatgctatcaaggtattctgtaatatggaaactggggaaacatgcataagtgccaatcctttgaatgttccacggaaacactggtggacagattctagtgctgagaagaaacacgtttggtttggagagtccatggatggtggttttcagtttagctacggcaatcctgaacttcctgaagatgtccttgatgtgcatctggcattccttcgacttctctccagccgagcttcccagaacatcacatatcactgcaaaaatagcattgcatacatggatcaggccagtggaaatgtaaagaaggccctgaagctgatggggtcaaatgaaggtgaattcaaggctgaaggaaatagcaaattcacctacacagttctggaggatggttgcacgaaacacactggggaatggagcaaaacagtctttgaatatcgaacacgcaaggctgtgagactacctattgtagatattgcaccctatgacattggtggtcctgatcaagaatttggtgtggacgttggccctgtttgctttttataaaccaaactctatctgaaatcccaacaaaaaaaatttaactccatatgtgttcctcttgttctaatcttgtcaaccagtgcaagtgaccgacaaaattccagttatttatttccaaaatgtttggaaacagtataatttgacaaagaaaaatgatacttctctttttttgctgttccaccaaatacaattcaaatgctttttgttttatttttttaccaattccaatttcaaaatgtctcaatggtgctataataaataaacttcaacactctttatgataacaacactgtgttatattctttgaatcctagcccatctgcagagcaatgactgtgctcaccagtaaaagataacctttctttctgaaatagtcaaatacgaaattagaaaagccctccctattttaactacctcaactggtcagaaacacagattgtattctatgagtcccagaagatgaaaaaaattttatacgttgataaaacttataaatttcattgattaatctcctggaagattggtttaaaaagaaaagtgtaatgcaagaatttaaagaaatatttttaaagccacaattattttaatattggatatcaactgcttgtaaaggtgctcctcttttttcttgtcattgctggtcaagattactaatatttgggaaggctttaaagacgcatgttatggtgctaatgtactttcacttttaaactctagatcagaattgttgacttgcattcagaacataaatgcacaaaatctgtacatgtctcccatcagaaagattcattggcatgccacaggggattctcctccttcatcctgtaaaggtcaacaataaaaaccaaattatggggctgcttttgtcacactagcatagagaatgtgttgaaatttaactttgtaagcttgtatgtggttgttgatcttttttttccttacagacacccataataaaatatcatattaaaattc

SEQ ID NO: 1090 - DNA, 6264 bp, Homo sapiens
  source 1..6264: mol_type = genomic DNA
gagtgtggctgcagtgcgccgggacaccagggctccgcgctccgcactcaagaggctcccgcgtcccaacccctcgcgcccgcgcgttcgcggatccaggccgaggaccgaaaggggccgcccgagcccccggggccggcgcccagagagcccagcaaggccggccgccctgccggtgtgccgccggcgggtgcttctggaagggccaatgcgttcgggcagcagcccctgaagccgagcccgaggctaagtgggactgaccggggcccagagtggacgaaccgccagcatggggagagaccagcgcgcggtggccggccctgccctacggcggtggctgctgctggggacagtgaccgtggggttcctcgcccagagcgtcttggcgggtgtgaagaagtttgatgtgccgtgtggaggaagagattgcagtgggggctgccagtgctaccctgagaaaggtggacgtggtcagcctgggccagtgggcccccaggggtacaatgggccaccaggattacaaggattcccgggactgcagggacgtaaaggagacaagggtgaaaggggagcccccggagtaacgggacccaagggcgacgtgggagcaagaggcgtttctggattccctggtgccgatggaattcctggacacccggggcaaggtgggcccaggggaaggccgggctacgatggctgcaacggaacccagggagactcaggtccacaggggccccccggctctgaggggttcaccgggcctcccgggccccaaggaccaaaagggcagaaaggtgagccttatgcactgcctaaagaggagcgcgacagatatcggggtgaacctggagagcctggattggtcggtttccagggacctcccggccgccctgggcatgtgggacagatgggtccagttggagctccagggagaccaggaccatcgtccgatgagagctttaagaacaagttgaagaataagggcttaaattattatactgtaaatagtatgcagggtgacgtagggcagccgggacccaacgggattccatcagacaccctccaccccatcatcgcgcccacaggagtcaccttccacccagatcagtacaagggccctgttggctggaggggccgcccctgggttgctggcatttccttgaagggagaagaaggaatcatgggctttcctggactgaggggttaccctggcttgagtggtgaaaaaggatcaccaggacagaagggaagccgaggcctggatggctatcaagggcctgatggaccccggggacccaagggagaagccggagacccagggccccctggactacctgcctactcccctcacccttccctagcaaaaggtgccagaggtgacccgggattcccaggggcccaaggggagccaggaagccagggtgagccaggagacccgggcctcccaggtccccctggcctctccatcggagatggagatcagaggagaggcctgccgggtgagatgggacccaagggcttcatcggagaccccggcatccctgcgctctacgggggcccacctggacctgatggaaagcgagggcctccaggaccccccgggctccctggaccacctggacctgatggcttcctgtttgggctgaaaggagcaaaaggaagagcaggcttccctgggcttcccggctcccctggagcccgcggaccaaaggggtggaaaggtgacgctggggaatgcagatgtacagaaggcgacgaagctatcaaaggtcttccgggactgccaggacccaagggcttcgcaggcatcaacggggagccggggaggaaaggggacagaggagaccccggccaacacggcctccctgggttcccagggctcaagggagtgcctggcaacattggtgctcccggacccaaaggagcaaaaggagattccagaacaatcacaaccaaaggtgagcggggacagcccggcgtcccaggtgtgcccgggatgaaaggtgacgatggcagcccaggccgcgatgggctcgatggattccccggcctcccaggccctcccggtgatggcatcaagggccctccaggggacccaggctatccaggaatacctggaacgaagggtactccaggagaaatgggccccccaggactgggccttcccggcctcaaaggccaacgtggtttccctggagacgccggcttacctggaccaccaggcttcctgggccctcctggccccgcagggaccccaggacaaatagattgtgacacagatgtgaaaagggccgttggaggtgacagacaggaggccatccagccaggttgcataggagggcccaagggattgccaggcctgccaggacccccaggccccacaggtgccaaaggcctccgaggaatcccaggcttcgcaggagctgatggaggaccagggcccaggggcttgccaggagacgcaggtcgtgaagggttcccaggacccccagggttcataggaccccgaggatccaaaggtgcagtgggcctccctggcccagatggatccccaggtcccatcggcctgccagggccagatgggccccctggggaaaggggcctccctggagaagtcctgggagctcagcccgggccacggggagatgctggtgtgcctggacagcctgggcttaaaggccttcccggagacagaggcccccctggattcagaggaagccaagggatgcctgggatgccagggctgaagggccagccaggcctcccaggaccttccggccagccaggcctgtatgggcctccaggactgcatggattcccaggagctcctggccaagaggggcccttggggctgccaggaatcccaggccgtgaaggtctgcctggtgatagaggggaccctggggacacaggcgctcctggccctgtgggcatgaaaggtctctctggtgacagaggagatgctggcttcacaggggagcaaggccatccaggaagccctggatttaaaggaattgatggaatgcctgggacccccgggctaaaaggagatagaggctcacctgggatggatggtttccaaggcatgcctggactcaaagggagacccgggtttccagggagcaaaggcgaggctggatttttcggaatacccggtctgaagggtctggctggtgagccaggttttaaaggcagccgaggggaccctgggcccccaggaccacctcctgtcatcctgccaggaatgaaagacattaaaggagagaaaggagatgaagggcctatggggctgaaaggatacctgggcgcaaaaggtatccaaggaatgccaggcatcccagggctgtcaggaatccctgggctgcctgggaggcccggccacatcaaaggagtcaagggagacatcggagtccccggcatccccggtttgccaggattccctggggtggctggcccccctggaattacgggattcccaggattcataggaagccggggtgacaaaggtgccccagggagagcaggcctgtatggcgagattggcgcgactggtgatttcggtgacatcggggacactataaatttaccaggaagaccaggcctgaagggggagcggggcaccactggaataccaggtctgaagggattctttggagagaagggaacagaaggtgacatcggcttccctgggataacaggcgtgactggagtccaaggccctcctggacttaaaggacaaacaggctttccagggctgactgggcctccagggtcgcagggagagctggggcggattggactgcctggtggcaaaggagatgatggctggccgggagctccgggcttaccaggttttccgggactccgtgggatccgcggcttacacggcttgccaggcaccaagggctttccaggatccccaggttctgacatccacggagacccaggcttcccaggccctcctggggaaagaggtgacccaggagaggccaacacccttccaggccctgtgggagtcccaggacagaaaggagaccaaggagctccaggggaacgaggcccacctgggagcccaggacttcaggggttccctggtatcacacccccttccaacatctctggggcacctggtgacaaaggggcgccagggatatttggcctgaaaggttatcggggcccaccagggccaccaggttctgctgctcttcctggaagcaaaggtgacacagggaacccaggagctccaggaaccccagggaccaaaggatgggccggggactccgggccccagggcaggcctggtgtgtttggtctcccaggagaaaaagggcccaggggtgaacaaggcttcatggggaacactggacccactggggcggtgggcgacagaggccccaagggacccaagggagacccaggattccctggtgcccccgggactgtgggagcccccgggattgcaggaatcccccagaagattgccgtccaaccagggacagtgggtccccaggggaggcgaggcccccctggggcaccgggggagatggggccccagggcccccccggagaaccaggtttccgtggggctccagggaaagctgggccccaaggaagaggtggtgtgtctgctgttcccggcttccggggagatgaaggacccataggccaccaggggccgattggccaagaaggtgcaccaggccgtccagggagcccgggcctgccgggtatgccaggccgcagcgtcagcatcggctacctcctggtgaagcacagccagacggaccaggagcccatgtgcccagtgggcatgaacaaactctggagtggatacagcctgctgtacttcgagggccaggagaaggcgcacaaccaggacctggggctggcgggctcctgcctggcgcggttcagcaccatgcccttcctgtactgcaaccctggtgatgtctgctactatgccagccggaacgacaagtcctactggctctctaccactgcgccgctgcccatgatgcccgtggccgaggacgagatcaagccctacatcagccgctgttctgtgtgtgaggccccggccatcgccatcgcggtccacagtcaggatgtctccatcccacactgcccagctgggtggcggagtttgtggatcggatattccttcctcatgcacacggcggcgggagacgaaggcggtggccaatcactggtgtcaccgggcagctgtctagaggacttccgcgccacaccattcatcgaatgcaatggaggccgcggcacctgccactactacgccaacaagtacagcttctggctgaccaccattcccgagcagagcttccagggctcgccctccgccgacacgctcaaggccggcctcatccgcacacacatcagccgctgccaggtgtgcatgaagaacctgtgagccggcgcgtgccaggaagggccattttggtgcttattcttaacttattacctcaggtgccaacccaaaaattggttttatttttttcttaaaaaaaaaaaagtctaccaaaggaatttgcatccagcagcagcacttagacctgccagccactgtcaccgagcgggtgcaagcactcggggtccctggagggcaagccctgcccacagaaagccaggagcagccctggcccccatcagccctgctagacgcaccgcctgaaggcacagctaaccacttcgcacacacccatgtaaccactgcactttccaatgccacagacaactcacattgttcaactcccttctcggggtgggacagacgagacaacagcacacaggcagccagccgtggccagaggctcgaggggctcagggcctcaggcacccgtccccacacgagggccccgtgggtgggcctggccctgctttctacgccaatgttatgccagctccatgttctcccaaataccgttgatgtgaattattttaaaggcaaaaccgtgctctttattttaaaaaacactgataatcacactgcggtaggtcattcttttgccacatccctatagaccactgggtttggcaaaactcaggcagaagtggagacctttctagacatcattgtcagccttgctacttgaaggtacaccccatagggtcggaggtgctgtccccactgccccacgttgtccctgagatttaacccctccactgctgggggtgagctgtactcttctgactgccccctcctgtgtaacgactacaaaataaaacttggttctgaatatttttaaa

SEQ ID NO: 1091 - DNA, 6281 bp, Homo sapiens
  source 1..6281: mol_type = genomic DNA
gggagcgcgcggcccgggagtgtggctgcagtgcgccgggacaccagggctccgcgctccgcactcaagaggctcccgcgtcccaacccctcgcgcccgcgcgttcgcggatccaggccgaggaccgaaaggggccgcccgagcccccggggccggcgcccagagagcccagcaaggccggccgccctgccggtgtgccgccggcgggtgcttctggaagggccaatgcgttcgggcagcagcccctgaagccgagcccgaggctaagtgggactgaccggggcccagagtggacgaaccgccagcatggggagagaccagcgcgcggtggccggccctgccctacggcggtggctgctgctggggacagtgaccgtggggttcctcgcccagagcgtcttggcgggtgtgaagaagtttgatgtgccgtgtggaggaagagattgcagtgggggctgccagtgctaccctgagaaaggtggacgtggtcagcctgggccagtgggcccccaggggtacaatgggccaccaggattacaaggattcccgggactgcagggacgtaaaggagacaagggtgaaaggggagcccccggagtaacgggacccaagggcgacgtgggagcaagaggcgtttctggattccctggtgccgatggaattcctggacacccggggcaaggtgggcccaggggaaggccgggctacgatggctgcaacggaacccagggagactcaggtccacaggggccccccggctctgaggggttcaccgggcctcccgggccccaaggaccaaaagggcagaaaggtgagccttatgcactgcctaaagaggagcgcgacagatatcggggtgaacctggagagcctggattggtcggtttccagggacctcccggccgccctgggcatgtgggacagatgggtccagttggagctccagggagaccaggaccacctggaccccctggaccaaaaggacagcaaggcaacagaggacttggtttctacggagttaagggtgaaaagggtgacgtagggcagccgggacccaacgggattccatcagacaccctccaccccatcatcgcgcccacaggagtcaccttccacccagatcagtacaagggtgaaaaaggcagtgagggggaaccaggaataagaggcatttccttgaagggagaagaaggaatcatgggctttcctggactgaggggttaccctggcttgagtggtgaaaaaggatcaccaggacagaagggaagccgaggcctggatggctatcaagggcctgatggaccccggggacccaagggagaagccggagacccagggccccctggactacctgcctactcccctcacccttccctagcaaaaggtgccagaggtgacccgggattcccaggggcccaaggggagccaggaagccagggtgagccaggagacccgggcctcccaggtccccctggcctctccatcggagatggagatcagaggagaggcctgccgggtgagatgggacccaagggcttcatcggagaccccggcatccctgcgctctacgggggcccacctggacctgatggaaagcgagggcctccaggaccccccgggctccctggaccacctggacctgatggcttcctgtttgggctgaaaggagcaaaaggaagagcaggcttccctgggcttcccggctcccctggagcccgcggaccaaaggggtggaaaggtgacgctggggaatgcagatgtacagaaggcgacgaagctatcaaaggtcttccgggactgccaggacccaagggcttcgcaggcatcaacggggagccggggaggaaaggggacagaggagaccccggccaacacggcctccctgggttcccagggctcaagggagtgcctggcaacattggtgctcccggacccaaaggagcaaaaggagattccagaacaatcacaaccaaaggtgagcggggacagcccggcgtcccaggtgtgcccgggatgaaaggtgacgatggcagcccaggccgcgatgggctcgatggattccccggcctcccaggccctcccggtgatggcatcaagggccctccaggggacccaggctatccaggaatacctggaacgaagggtactccaggagaaatgggccccccaggactgggccttcccggcctcaaaggccaacgtggtttccctggagacgccggcttacctggaccaccaggcttcctgggccctcctggccccgcagggaccccaggacaaatagattgtgacacagatgtgaaaagggccgttggaggtgacagacaggaggccatccagccaggttgcataggagggcccaagggattgccaggcctgccaggacccccaggccccacaggtgccaaaggcctccgaggaatcccaggcttcgcaggagctgatggaggaccagggcccaggggcttgccaggagacgcaggtcgtgaagggttcccaggacccccagggttcataggaccccgaggatccaaaggtgcagtgggcctccctggcccagatggatccccaggtcccatcggcctgccagggccagatgggccccctggggaaaggggcctccctggagaagtcctgggagctcagcccgggccacggggagatgctggtgtgcctggacagcctgggcttaaaggccttcccggagacagaggcccccctggattcagaggaagccaagggatgcctgggatgccagggctgaagggccagccaggcctcccaggaccttccggccagccaggcctgtatgggcctccaggactgcatggattcccaggagctcctggccaagaggggcccttggggctgccaggaatcccaggccgtgaaggtctgcctggtgatagaggggaccctggggacacaggcgctcctggccctgtgggcatgaaaggtctctctggtgacagaggagatgctggcttcacaggggagcaaggccatccaggaagccctggatttaaaggaattgatggaatgcctgggacccccgggctaaaaggagatagaggctcacctgggatggatggtttccaaggcatgcctggactcaaagggagacccgggtttccagggagcaaaggcgaggctggatttttcggaatacccggtctgaagggtctggctggtgagccaggttttaaaggcagccgaggggaccctgggcccccaggaccacctcctgtcatcctgccaggaatgaaagacattaaaggagagaaaggagatgaagggcctatggggctgaaaggatacctgggcgcaaaaggtatccaaggaatgccaggcatcccagggctgtcaggaatccctgggctgcctgggaggcccggccacatcaaaggagtcaagggagacatcggagtccccggcatccccggtttgccaggattccctggggtggctggcccccctggaattacgggattcccaggattcataggaagccggggtgacaaaggtgccccagggagagcaggcctgtatggcgagattggcgcgactggtgatttcggtgacatcggggacactataaatttaccaggaagaccaggcctgaagggggagcggggcaccactggaataccaggtctgaagggattctttggagagaagggaacagaaggtgacatcggcttccctgggataacaggcgtgactggagtccaaggccctcctggacttaaaggacaaacaggctttccagggctgactgggcctccagggtcgcagggagagctggggcggattggactgcctggtggcaaaggagatgatggctggccgggagctccgggcttaccaggttttccgggactccgtgggatccgcggcttacacggcttgccaggcaccaagggctttccaggatccccaggttctgacatccacggagacccaggcttcccaggccctcctggggaaagaggtgacccaggagaggccaacacccttccaggccctgtgggagtcccaggacagaaaggagaccaaggagctccaggggaacgaggcccacctgggagcccaggacttcaggggttccctggtatcacacccccttccaacatctctggggcacctggtgacaaaggggcgccagggatatttggcctgaaaggttatcggggcccaccagggccaccaggttctgctgctcttcctggaagcaaaggtgacacagggaacccaggagctccaggaaccccagggaccaaaggatgggccggggactccgggccccagggcaggcctggtgtgtttggtctcccaggagaaaaagggcccaggggtgaacaaggcttcatggggaacactggacccactggggcggtgggcgacagaggccccaagggacccaagggagacccaggattccctggtgcccccgggactgtgggagcccccgggattgcaggaatcccccagaagattgccgtccaaccagggacagtgggtccccaggggaggcgaggcccccctggggcaccgggggagatggggccccagggcccccccggagaaccaggtttccgtggggctccagggaaagctgggccccaaggaagaggtggtgtgtctgctgttcccggcttccggggagatgaaggacccataggccaccaggggccgattggccaagaaggtgcaccaggccgtccagggagcccgggcctgccgggtatgccaggccgcagcgtcagcatcggctacctcctggtgaagcacagccagacggaccaggagcccatgtgcccagtgggcatgaacaaactctggagtggatacagcctgctgtacttcgagggccaggagaaggcgcacaaccaggacctggggctggcgggctcctgcctggcgcggttcagcaccatgcccttcctgtactgcaaccctggtgatgtctgctactatgccagccggaacgacaagtcctactggctctctaccactgcgccgctgcccatgatgcccgtggccgaggacgagatcaagccctacatcagccgctgttctgtgtgtgaggccccggccatcgccatcgcggtccacagtcaggatgtctccatcccacactgcccagctgggtggcggagtttgtggatcggatattccttcctcatgcacacggcggcgggagacgaaggcggtggccaatcactggtgtcaccgggcagctgtctagaggacttccgcgccacaccattcatcgaatgcaatggaggccgcggcacctgccactactacgccaacaagtacagcttctggctgaccaccattcccgagcagagcttccagggctcgccctccgccgacacgctcaaggccggcctcatccgcacacacatcagccgctgccaggtgtgcatgaagaacctgtgagccggcgcgtgccaggaagggccattttggtgcttattcttaacttattacctcaggtgccaacccaaaaattggttttatttttttcttaaaaaaaaaaaagtctaccaaaggaatttgcatccagcagcagcacttagacctgccagccactgtcaccgagcgggtgcaagcactcggggtccctggagggcaagccctgcccacagaaagccaggagcagccctggcccccatcagccctgctagacgcaccgcctgaaggcacagctaaccacttcgcacacacccatgtaaccactgcactttccaatgccacagacaactcacattgttcaactcccttctcggggtgggacagacgagacaacagcacacaggcagccagccgtggccagaggctcgaggggctcagggcctcaggcacccgtccccacacgagggccccgtgggtgggcctggccctgctttctacgccaatgttatgccagctccatgttctcccaaataccgttgatgtgaattattttaaaggcaaaaccgtgctctttattttaaaaaacactgataatcacactgcggtaggtcattcttttgccacatccctatagaccactgggtttggcaaaactcaggcagaagtggagacctttctagacatcattgtcagccttgctacttgaaggtacaccccatagggtcggaggtgctgtccccactgccccacgttgtccctgagatttaacccctccactgctgggggtgagctgtactcttctgactgccccctcctgtgtaacgactacaaaataaaacttggttctgaatatttttaaa

SEQ ID NO: 1092 - DNA, 491 bp, Homo sapiens
  source 1..491: mol_type = genomic DNA
agttaacaatttctatacagttaagtggatttagtgagtatcattcttccaggagagaagtaaaatttttttttaaagaggaaaacaaagaacaagattaagaacagtaaaagaataagtatggaaaatctggctaagtgggactgaccggggcccagagtggacgaaccgccagcatggggagagaccagcgcgcggtggccggccctgccctacggcggtggctgctgctggggacagtgaccgtggggttcctcgcccagagcgtcttggcgggtgtgaagaagtttgatgtgccgtgtggaggaagagattgcagtgggggctgccagtgctaccctgagaaaggtggacgtggtcagcctgggccagtgggcccccaggggtacaatgggccaccaggattacaaggattcccgggactgcagggacgtaaaggagacaagggtgaaaggggagcccccggagtaacgggacccaagggcgacgtg

SEQ ID NO: 1093 - DNA, 7918 bp, Homo sapiens
  source 1..7918: mol_type = genomic DNA
gggagggacgaaccgcgcgaccgagccctacaaaacccgccccggccgagtggcgaggcgagctttccagccgggctcccagagccgcgctgcgcaggagacgcggtggcctgagagcctgagggtccccggactcgcccaggctctgagcgcgcgcccaccatgagcgcccggaccgcccccaggccgcaggtgctcctgctgccgctcctgctggtgctcctggcggcggcgcccgcagccagcaagggttgtgtctgtaaagacaaaggccagtgcttctgtgacggggccaaaggggagaagggggagaagggctttcctggaccccccggttctcctggccagaaaggattcacaggtcctgaaggcttgcctggaccgcagggacccaagtcgtttcgagctattcccagttatagtggaggaaaaagtcttcagggaataagtggattgccaggattttctggttctcctggacttccaggcaccccaggcaataccgggccttacggacttgtcggtgtaccaggatgcagtggttctaagggtgagcaggggtttccaggactcccagggacactgggctacccagggatcccgggaatacataacttgaaaattttcaagggtgctcctgctaaagaagaagatatagaacttgatgcaaaaggcgaccccgggttgccaggggctccaggaccccagggtttgccaggccctccaggttttcctgggcctgttggcccacctggtcctccgggattctttggctttccaggagccatgggacctagaggacctaagtcatttgttctatcttcccgtataagcactaaaggggaaaagggtgtgaaagggttaacaggacccccgggaccaccaggaacagttattgtgaccctaactggcccagataacagaacggacctcaagggggaaaagggagacaagggagcaatgggcgagcctggacctcctggaccctcaggactgcctggagaatcatatggatctgaaaagggtgctcctggagaccctggcctgcagggaaaacccggaaaagatggtgttcctggcttccctggaagtgagggagtcaagggcaacaggggtttccctgggttaatgggtgaagatggcattaaggaagaaaagagagatgtggcaattgtttctttctcctctaagacagaatattatgacacataccaggaaaagggagatgaaggcactccaggcccaccagggcccagaggagctcgtggcccacaaggtaagaataaatttcgttgtataccaggaagccaaggatcatcaaggcctggcctcagaggagcccctggatggccaggcctgaaaggaagtaaaggggaacgaggccgcccaggaaaggatgccatggggactcctgggtccccaggttgtgctggttcaccaggtcttccaggatcaccgggacctccaggaccgccaggtgacatcgtttttcgcaagggtccacctggagatcacggactgccaggctatctagggtctccaggaatcccaggagttgatgggcccaaaggagaaccaggcctcctgtgtacacagtgcccttatatcccagggcctcccggtctcccaggattgccagggttacatggtgtaaaaggaatcccaggaagacaaggcgcagctggcttgaaaggaagcccagggtccccaggaaatacaggtcttccaggatttccaggtttcccaggtgcccagggtgacccaggacttaaaggagaaaaaggtgaaacacttcagcctgaggggcaagtgggtgtcccaggtgacccggggctcagaggccaacctgggagaaagggcttggatggaattcctggaactccgggagtgaaaggattaccaggacctaaaggcgaactggctctgagtggtgagaaaggggaccaaggtcctccaggggatcctggctcccctgggtccccaggacctgcaggaccagctggaccacctggctacggaccccaaggagaacctggtctccagggcacgcaaggagttcctggagcccccggaccacccggagaagccggccctaggggagagctcagtgtttcaacaccagttccaggcccaccaggacctccagggccccctggccatcctggcccccaaggtccacctggtatccctggatccctggggaaatgtggagatcctggtcttccagggcctgatggtgaaccaggaattccaggaattggatttcctgggcctcctggacctaagggagaccaaggttttccaggtacaaaaggatcactgggttgtcctggaaaaatgggagagcctgggttacctggaaagccaggcctcccaggagccaagggagaaccagcagtagccatgcctggaggaccaggaacaccaggttttccaggagaaagaggcaattctggggaacatggagaaattggactccctggacttccaggtctccctggaactccaggaaatgaagggcttgatggaccacgaggagatccagggcagcctggaccacctggagaacaaggacccccaggaaggtgcatagagggtcccaggggagcccaaggacttccaggcttaaatggattgaaagggcaacaaggcagaagaggtaaaacggggccaaagggagacccaggaattccaggcttggatagatcaggatttcctggagaaactggatcaccaggaattccaggtcatcaaggtgaaatgggaccactgggtcaaagaggatatccaggaaatccgggaattttagggccaccaggtgaagatggagtgattgggatgatgggctttcctggagccattggccctccagggccccctgggaacccaggcacaccagggcagagggggagccctggaattccaggagtaaagggccagagaggaaccccaggagccaagggggaacaaggagataaaggaaatcccgggccttcagagatatcccacgtaataggggacaaaggagaaccaggtctcaaaggattcgcaggaaatccaggtgagaaaggaaacagaggcgttccagggatgccaggtttaaagggcctcaaaggactacccggaccagcaggaccaccaggccccagaggagatttgggcagcactgggaatcctggagaaccaggactgcgtggtataccaggaagcatggggaacatgggcatgccaggttctaaaggaaaaaggggaactttgggattcccaggtcgagcaggaagaccaggcctcccaggtattcatggtctccagggagataagggagagccaggttattcagaaggtacaaggccaggaccaccgggaccaacgggggatccaggactgccgggtgatatgggaaagaaaggagaaatggggcaacctggcccacctggacatttggggcctgctggacctgagggagcccctggaagtcctggaagtcctggcctcccaggaaagccaggtcctcatggtgatttgggttttaaaggaatcaaaggcctcctgggccctccaggaatcagaggccctccaggtcttccaggatttccaggatctcctggaccaatgggtataagaggtgaccaaggacgtgatggaattcctggtccagccggagaaaagggagaaacgggtttattgagggcccctccaggcccaagagggaaccctggtgctcaaggagccaaaggagacaggggagccccaggttttcctggcctcccgggcagaaaaggggccatgggagatgctggacctcgaggacccacaggcatagaaggattcccagggccaccaggtctgcccggtgcaattatccctggccagacaggaaatcgtggtccaccaggctcaagaggaagcccaggtgcgcctggtccccctggacctccagggagtcatgtaataggcataaaaggagacaaagggtctatgggccaccctggcccaaaaggtccacctggaactgcaggagacatgggaccaccaggtcgtctgggagcaccaggtactccaggtcttccaggacccagaggtgatcctggattccaggggtttccaggcgtgaaaggagaaaagggtaatcctggatttctaggatccattggacctccaggaccaattgggccaaaaggaccacctggtgtacgtggagaccctggcacacttaagattatctcccttccaggaagcccagggccacctggcacacctggagaaccagggatgcagggagaacctgggccaccagggccacctggaaacctaggaccctgtgggccaagaggtaagccaggcaaggatggaaaaccaggaactcctggaccagctggagaaaaaggcaacaaaggttctaaaggagagccaggaccagctggatcagatggattgccaggtttgaaaggaaaacgtggagacagtggatcacctgcaacctggacaacgagaggctttgtcttcacccgacacagtcaaaccacagcaattccttcatgtccagaggggacagtgccactctacagtgggttttcttttctttttgtacaaggaaatcaacgagcccacggacaagaccttgatgcactgtttgtgaaggtcctgcgatcgccatagccgttcacagccaaaccactgacattcctccatgtcctcacggctggatttctctctggaaaggattttcattcatcatgttcacaagtgcaggttctgagggcaccgggcaagcactggcctcccctggctcctgcctggaagaattccgagccagcccatttctagaatgtcatggaagaggaacgtgcaactactattcaaattcctacagtttctggctggcttcattaaacccagaaagaatgttcagaaagcctattccatcaactgtgaaagctggggaattagaaaaaataataagtcgctgtcaggtgtgcatgaagaaaagacactgaagctaaaaaagacagcagaactgctatttttcatcctaaagaacaaagtaatgacagaacatgctgttatttaggtatttttctttaaccaaacaatattgctccatgatgacttagtacaaagtttcaatttgtttccccacaaaacaaagcaattctttcaagtcagttctgtgatctgggtctctaatctgtgctgtttcaaagttctctgtggcaaagcagcaactattcacaaaatatcaccaaaaacctattccacttacatccaaggcactgtcactacggtgattgtatgaagtttgaatgctgcaagttatgaaatatttggcccgctggattcccacatttgtcttctttctgtctttaagactcagggaggctaaatcagtgtttgattgccccgccaacccttcctgaaacttcagaccctgggtaggggaagagaagggggcatgtggtatcctggagcattgtgtatagaactggattttcagacctgctgaggaccgtaaggcctgatggaacacagaactgaactgaggttcatggattttccaggactgtttcaaacatgcccattactaacggcaaaagggggattccctgatggaaccataatacccttggaaatactgtatggttttgttttgttttgttggtttttaaagatttttgtttgtttattgaattcatttcactgtagctctaaaatctgcttgtattccaagcatataaaattttcccccttagtgaattagttttaaaatgatattgttatatacatactatgaaatatgtataactttaacttctgttttaccagcatacccacacaaataacaagaatactacttatgaaatgtgcactttatcctcattccataaatgtcggtgcataccttatgtaagggagcagttcaataatccatgaaagaacttaaggcatttgttggtttatcagactcggaatctattttctcattgctctgaatatgtcatcactctaggttttacagatttattcctttgttacttctctaattcttcctttgtaaaaaaaaaaaaaagcaacactttttatgttatatgttgttcttacaaaccatactgaaagagtccattgtttaaaaatcttaatgtatcaaactgtataacttggccgctgtatgtcttaaaacctgcttttcaatgtgttgatacattcccaaggttacttaattcaacttaactatcatcttattcagcaccaagcatgtcccaggcactgtactaacctacagagatgctaagagaaaaaaaagacttgtttctgatctaatatcccagaaaaagtaactcattgctctgttaataatctcacatatacaagtagcttccctcccctctagttttttcttccttttcactgctgttatatttcatcatgataattcagcaggcccaagtaaaggttaaaaataaggtctatgcctagggaaactcagggcttctagtttctcttagaaaagctaagagaagataaggtctgaataatagcagaaaaaccaacatctacaaaacattaaactagtgttatacttgatgataacactatttgatgagtcttagagtccagacacaaagagacaaagctttgaagatgctttttgatctacctaggtggagttggtggtgctgatatttaaattcaggctactgcttcaatctcaattgctttgtaagtgaaaaacatgacccagaggacagcacagactatggccatggctcacatggtttacatccttcactgctcacgtgtttgctgtcaagccatttttacatctaaactaagatgtgcagcatttcacttatttagattcacttaacaaacaaatttttctgctttaaaaatgtcttattgtcccaagtgtactatagcggcatatagagctagctaatctctacaaaccctctgtaggccagtagttctcaaagtgtggtctctggaagagcagtatcagcatcatctgggaacttgtcacagatgcagattctagggaccactccagacctacacaatcagaaactcttgggggagggcccgaaatatctatgttttaccaagcccaccacatgattctgatgtactctaaatactgagaaaacctgttctagacaaatacccaagcaacaactccgcaggcagttaccaagtacggctggctacaactgctccatccgtgcctctttttaaagttcaaactcacaggtgactctaaggttatctacttttactcataagtaaaagccctagactggtgctaatgtcaaaccactggcctccactcaggcctccatcttctcatgccctcttaccagtatttaacttctgaggaagacaagtgatgctaaaacctgaaattccaatgaagccatatgaacagctgttcagttgcacttctaagactttacttagcagtaaattatagctcatgtgcattattttccagataacttagcttatgagtagcttatacaattatgaagatttaatattacagataaaatgtaaactgtttctttaaaattggggcttcaactttggaatttcacagcgtgctaaaataacagatttctcagaagtctttcagcaagataaacattattaagtaacttatttatgaaagtattaaaatgcttacatttgaacttgatggctaacttacaaagattctctatgtatcaaatgtaacttactgcgactaaacttaatttaatatttactctataaccaaatgaaatatatttaaaatatattgaatattttatattgttatatcctgacaagattataatattttaatgtactaatatttctgtaattatatctaaaatattattttattatattgcctaagaataaacatttgttaaattgg

SEQ ID NO: 1094 - DNA, 7923 bp, Homo sapiens
  source 1..7923: mol_type = genomic DNA
gggagggacgaaccgcgcgaccgagccctacaaaacccgccccggccgagtggcgaggcgagctttccagccgggctcccagagccgcgctgcgcaggagacgcggtggcctgagagcctgagggtccccggactcgcccaggctctgagcgcgcgcccaccatgagcgcccggaccgcccccaggccgcaggtgctcctgctgccgctcctgctggtgctcctggcggcggcgcccgcagccagcaagggttgtgtctgtaaagacaaaggccagtgcttctgtgacggggccaaaggggagaagggggagaagggctttcctggaccccccggttctcctggccagaaaggattcacaggtcctgaaggcttgcctggaccgcagggacccaagtcgtttcgagctattcccagttatagtggaggaaaaagtcttcagggaataagtggattgccaggattttctggttctcctggacttccaggcaccccaggcaataccgggccttacggacttgtcggtgtaccaggatgcagtggttctaagggtgagcaggggtttccaggactcccagggacactgggctacccagggatcccgggaatacataacttgaaaattttcaagggtgctcctgctaaagaagaagatatagaacttgatgcaaaaggcgaccccgggttgccaggggctccaggaccccagggtttgccaggccctccaggttttcctgggcctgttggcccacctggtcctccgggattctttggctttccaggagccatgggacctagaggacctaagtcatttgttctatcttcccgtataagcactaaaggggaaaagggtgtgaaagggttaacaggacccccgggaccaccaggaacagttattgtgaccctaactggcccagataacagaacggacctcaagggggaaaagggagacaagggagcaatgggcgagcctggacctcctggaccctcaggactgcctggagaatcatatggatctgaaaagggtgctcctggagaccctggcctgcagggaaaacccggaaaagatggtgttcctggcttccctggaagtgagggagtcaagggcaacaggggtttccctgggttaatgggtgaagatggcattaaggaagaaaagagagatgtggcaattgtttctttctcctctaagacagaatattatgacacataccaggaaaagggagatgaaggcactccaggcccaccagggcccagaggagctcgtggcccacaaggtaagaataaatttcgttgtataccaggaagccaaggatcatcaaggcctggcctcagaggagcccctggatggccaggcctgaaaggaagtaaaggggaacgaggccgcccaggaaaggatgccatggggactcctgggtccccaggttgtgctggttcaccaggtcttccaggatcaccgggacctccaggaccgccaggtgacatcgtttttcgcaagggtccacctggagatcacggactgccaggctatctagggtctccaggaatcccaggagttgatgggcccaaaggagaaccaggcctcctgtgtacacagtgcccttatatcccagggcctcccggtctcccaggattgccagggttacatggtgtaaaaggaatcccaggaagacaaggcgcagctggcttgaaaggaagcccagggtccccaggaaatacaggtcttccaggatttccaggtttcccaggtgcccagggtgacccaggacttaaaggagaaaaaggtgaaacacttcagcctgaggggcaagtgggtgtcccaggtgacccggggctcagaggccaacctgggagaaagggcttggatggaattcctggaactccgggagtgaaaggattaccaggacctaaaggcgaactggctctgagtggtgagaaaggggaccaaggtcctccaggggatcctggctcccctgggtccccaggacctgcaggaccagctggaccacctggctacggaccccaaggagaacctggtctccagggcacgcaaggagttcctggagcccccggaccacccggagaagccggccctaggggagagctcagtgtttcaacaccagttccaggcccaccaggacctccagggccccctggccatcctggcccccaaggtccacctggtatccctggatccctggggaaatgtggagatcctggtcttccagggcctgatggtgaaccaggaattccaggaattggatttcctgggcctcctggacctaagggagaccaaggttttccaggtacaaaaggatcactgggttgtcctggaaaaatgggagagcctgggttacctggaaagccaggcctcccaggagccaagggagaaccagcagtagccatgcctggaggaccaggaacaccaggttttccaggagaaagaggcaattctggggaacatggagaaattggactccctggacttccaggtctccctggaactccaggaaatgaagggcttgatggaccacgaggagatccagggcagcctggaccacctggagaacaaggacccccaggaaggtgcatagagggtcccaggggagcccaaggacttccaggcttaaatggattgaaagggcaacaaggcagaagaggtaaaacggggccaaagggagacccaggaattccaggcttggatagatcaggatttcctggagaaactggatcaccaggaattccaggtcatcaaggtgaaatgggaccactgggtcaaagaggatatccaggaaatccgggaattttagggccaccaggtgaagatggagtgattgggatgatgggctttcctggagccattggccctccagggccccctgggaacccaggcacaccagggcagagggggagccctggaattccaggagtaaagggccagagaggaaccccaggagccaagggggaacaaggagataaaggaaatcccgggccttcagagatatcccacgtaataggggacaaaggagaaccaggtctcaaaggattcgcaggaaatccaggtgagaaaggaaacagaggcgttccagggatgccaggtttaaagggcctcaaaggactacccggaccagcaggaccaccaggccccagaggagatttgggcagcactgggaatcctggagaaccaggactgcgtggtataccaggaagcatggggaacatgggcatgccaggttctaaaggaaaaaggggaactttgggattcccaggtcgagcaggaagaccaggcctcccaggtattcatggtctccagggagataagggagagccaggttattcagaaggtacaaggccaggaccaccgggaccaacgggggatccaggactgccgggtgatatgggaaagaaaggagaaatggggcaacctggcccacctggacatttggggcctgctggacctgagggagcccctggaagtcctggaagtcctggcctcccaggaaagccaggtcctcatggtgatttgggttttaaaggaatcaaaggcctcctgggccctccaggaatcagaggccctccaggtcttccaggatttccaggatctcctggaccaatgggtataagaggtgaccaaggacgtgatggaattcctggtccagccggagaaaagggagaaacgggtttattgagggcccctccaggcccaagagggaaccctggtgctcaaggagccaaaggagacaggggagccccaggttttcctggcctcccgggcagaaaaggggccatgggagatgctggacctcgaggacccacaggcatagaaggattcccagggccaccaggtctgcccggtgcaattatccctggccagacaggaaatcgtggtccaccaggctcaagaggaagcccaggtgcgcctggtccccctggacctccagggagtcatgtaataggcataaaaggagacaaagggtctatgggccaccctggcccaaaaggtccacctggaactgcaggagacatgggaccaccaggtcgtctgggagcaccaggtactccaggtcttccaggacccagaggtgatcctggattccaggggtttccaggcgtgaaaggagaaaagggtaatcctggatttctaggatccattggacctccaggaccaattgggccaaaaggaccacctggtgtacgtggagaccctggcacacttaagattatctcccttccaggaagcccagggccacctggcacacctggagaaccagggatgcagggagaacctgggccaccagggccacctggaaacctaggaccctgtgggccaagaggtaagccaggcaaggatggaaaaccaggaactcctggaccagctggagaaaaaggcaacaaaggttctaaaggagagccaggaccagctggatcagatggattgccaggtttgaaaggaaaacgtggagacagtggatcacctgcaacctggacaacgagaggctttgtcttcacccgacacagtcaaaccacagcaattccttcatgtccagaggggacagtgccactctacagtgggttttcttttctttttgtacaaggaaatcaacgagcccacggacaagaccttggaactcttggcagctgcctgcagcgatttaccacaatgccattcttattctgcaatgtcaatgatgtatgtaattttgcatctcgaaatgattattcatactggctgtcaacaccagctctgatgccaatgaacatggctcccattactggcagagcccttgagccttatataagcagatgcactgtttgtgaaggtcctgcgatcgccatagccgttcacagccaaaccactgacattcctccatgtcctcacggctggatttctctctggaaaggattttcattcatcatgaaagcctattccatcaactgtgaaagctggggaattagaaaaaataataagtcgctgtcaggtgtgcatgaagaaaagacactgaagctaaaaaagacagcagaactgctatttttcatcctaaagaacaaagtaatgacagaacatgctgttatttaggtatttttctttaaccaaacaatattgctccatgatgacttagtacaaagtttcaatttgtttccccacaaaacaaagcaattctttcaagtcagttctgtgatctgggtctctaatctgtgctgtttcaaagttctctgtggcaaagcagcaactattcacaaaatatcaccaaaaacctattccacttacatccaaggcactgtcactacggtgattgtatgaagtttgaatgctgcaagttatgaaatatttggcccgctggattcccacatttgtcttctttctgtctttaagactcagggaggctaaatcagtgtttgattgccccgccaacccttcctgaaacttcagaccctgggtaggggaagagaagggggcatgtggtatcctggagcattgtgtatagaactggattttcagacctgctgaggaccgtaaggcctgatggaacacagaactgaactgaggttcatggattttccaggactgtttcaaacatgcccattactaacggcaaaagggggattccctgatggaaccataatacccttggaaatactgtatggttttgttttgttttgttggtttttaaagatttttgtttgtttattgaattcatttcactgtagctctaaaatctgcttgtattccaagcatataaaattttcccccttagtgaattagttttaaaatgatattgttatatacatactatgaaatatgtataactttaacttctgttttaccagcatacccacacaaataacaagaatactacttatgaaatgtgcactttatcctcattccataaatgtcggtgcataccttatgtaagggagcagttcaataatccatgaaagaacttaaggcatttgttggtttatcagactcggaatctattttctcattgctctgaatatgtcatcactctaggttttacagatttattcctttgttacttctctaattcttcctttgtaaaaaaaaaaaaaagcaacactttttatgttatatgttgttcttacaaaccatactgaaagagtccattgtttaaaaatcttaatgtatcaaactgtataacttggccgctgtatgtcttaaaacctgcttttcaatgtgttgatacattcccaaggttacttaattcaacttaactatcatcttattcagcaccaagcatgtcccaggcactgtactaacctacagagatgctaagagaaaaaaaagacttgtttctgatctaatatcccagaaaaagtaactcattgctctgttaataatctcacatatacaagtagcttccctcccctctagttttttcttccttttcactgctgttatatttcatcatgataattcagcaggcccaagtaaaggttaaaaataaggtctatgcctagggaaactcagggcttctagtttctcttagaaaagctaagagaagataaggtctgaataatagcagaaaaaccaacatctacaaaacattaaactagtgttatacttgatgataacactatttgatgagtcttagagtccagacacaaagagacaaagctttgaagatgctttttgatctacctaggtggagttggtggtgctgatatttaaattcaggctactgcttcaatctcaattgctttgtaagtgaaaaacatgacccagaggacagcacagactatggccatggctcacatggtttacatccttcactgctcacgtgtttgctgtcaagccatttttacatctaaactaagatgtgcagcatttcacttatttagattcacttaacaaacaaatttttctgctttaaaaatgtcttattgtcccaagtgtactatagcggcatatagagctagctaatctctacaaaccctctgtaggccagtagttctcaaagtgtggtctctggaagagcagtatcagcatcatctgggaacttgtcacagatgcagattctagggaccactccagacctacacaatcagaaactcttgggggagggcccgaaatatctatgttttaccaagcccaccacatgattctgatgtactctaaatactgagaaaacctgttctagacaaatacccaagcaacaactccgcaggcagttaccaagtacggctggctacaactgctccatccgtgcctctttttaaagttcaaactcacaggtgactctaaggttatctacttttactcataagtaaaagccctagactggtgctaatgtcaaaccactggcctccactcaggcctccatcttctcatgccctcttaccagtatttaacttctgaggaagacaagtgatgctaaaacctgaaattccaatgaagccatatgaacagctgttcagttgcacttctaagactttacttagcagtaaattatagctcatgtgcattattttccagataacttagcttatgagtagcttatacaattatgaagatttaatattacagataaaatgtaaactgtttctttaaaattggggcttcaactttggaatttcacagcgtgctaaaataacagatttctcagaagtctttcagcaagataaacattattaagtaacttatttatgaaagtattaaaatgcttacatttgaacttgatggctaacttacaaagattctctatgtatcaaatgtaacttactgcgactaaacttaatttaatatttactctataaccaaatgaaatatatttaaaatatattgaatattttatattgttatatcctgacaagattataatattttaatgtactaatatttctgtaattatatctaaaatattattttattatattgcctaagaataaacatttgttaaattgg

SEQ ID NO: 1095 - DNA, 7630 bp, Homo sapiens
  source 1..7630: mol_type = genomic DNA
gggagggacgaaccgcgcgaccgagccctacaaaacccgccccggccgagtggcgaggcgagctttccagccgggctcccagagccgcgctgcgcaggagacgcggtggcctgagagcctgagggtccccggactcgcccaggctctgagcgcgcgcccaccatgagcgcccggaccgcccccaggccgcaggtgctcctgctgccgctcctgctggtgctcctggcggcggcgcccgcagccagcaagggttgtgtctgtaaagacaaaggccagtgcttctgtgacggggccaaaggggagaagggggagaagggctttcctggaccccccggttctcctggccagaaaggattcacaggtcctgaaggcttgcctggaccgcagggacccaagtcgtttcgagctattcccagttatagtggaggaaaaagtcttcagggaataagtggattgccaggattttctggttctcctggacttccaggcaccccaggcaataccgggccttacggacttgtcggtgtaccaggatgcagtggttctaagggtgagcaggggtttccaggactcccagggacactgggctacccagggatcccgggaatacataacttgaaaattttcaagggtgctcctgctaaagaagaagatatagaacttgatgcaaaaggcgaccccgggttgccaggggctccaggaccccagggtttgccaggccctccaggttttcctgggcctgttggcccacctggtcctccgggattctttggctttccaggagccatgggacctagaggacctaagtcatttgttctatcttcccgtataagcactaaaggggaaaagggtgtgaaagggttaacaggacccccgggaccaccaggaacagttattgtgaccctaactggcccagataacagaacggacctcaagggggaaaagggagacaagggagcaatgggcgagcctggacctcctggaccctcaggactgcctggagaatcatatggatctgaaaagggtgctcctggagaccctggcctgcagggaaaacccggaaaagatggtgttcctggcttccctggaagtgagggagtcaagggcaacaggggtttccctgggttaatgggtgaagatggcattaaggaagaaaagagagatgtggcaattgtttctttctcctctaagacagaatattatgacacataccaggaaaagggagatgaaggcactccaggcccaccagggcccagaggagctcgtggcccacaaggtaagaataaatttcgttgtataccaggaagccaaggatcatcaaggcctggcctcagaggagcccctggatggccaggcctgaaaggaagtaaaggggaacgaggccgcccaggaaaggatgccatggggactcctgggtccccaggttgtgctggttcaccaggtcttccaggatcaccgggacctccaggaccgccaggtgacatcgtttttcgcaagggtccacctggagatcacggactgccaggctatctagggtctccaggaatcccaggagttgatgggcccaaaggagaaccaggcctcctgtgtacacagtgcccttatatcccagggcctcccggtctcccaggattgccagggttacatggtgtaaaaggaatcccaggaagacaaggcgcagctggcttgaaaggaagcccagggtccccaggaaatacaggtcttccaggatttccaggtttcccaggtgcccagggtgacccaggacttaaaggagaaaaaggtgaaacacttcagcctgaggggcaagtgggtgtcccaggtgacccggggctcagaggccaacctgggagaaagggcttggatggaattcctggaactccgggagtgaaaggattaccaggacctaaaggcgaactggctctgagtggtgagaaaggggaccaaggtcctccaggggatcctggctcccctgggtccccaggacctgcaggaccagctggaccacctggctacggaccccaaggagaacctggtctccagggcacgcaaggagttcctggagcccccggaccacccggagaagccggccctaggggagagctcagtgtttcaacaccagttccaggcccaccaggacctccagggccccctggccatcctggcccccaaggtccacctggtatccctggatccctggggaaatgtggagatcctggtcttccagggcctgatggtgaaccaggaattccaggaattggatttcctgggcctcctggacctaagggagaccaaggttttccaggtacaaaaggatcactgggttgtcctggaaaaatgggagagcctgggttacctggaaagccaggcctcccaggagccaagggagaaccagcagtagccatgcctggaggaccaggaacaccaggttttccaggagaaagaggcaattctggggaacatggagaaattggactccctggacttccaggtctccctggaactccaggaaatgaagggcttgatggaccacgaggagatccagggcagcctggaccacctggagaacaaggacccccaggaaggtgcatagagggtcccaggggagcccaaggacttccaggcttaaatggattgaaagggcaacaaggcagaagaggtaaaacggggccaaagggagacccaggaattccaggcttggatagatcaggatttcctggagaaactggatcaccaggaattccaggtcatcaaggtgaaatgggaccactgggtcaaagaggatatccaggaaatccgggaattttagggccaccaggtgaagatggagtgattgggatgatgggctttcctggagccattggccctccagggccccctgggaacccaggcacaccagggcagagggggagccctggaattccaggagtaaagggccagagaggaaccccaggagccaagggggaacaaggagataaaggaaatcccgggccttcagagatatcccacgtaataggggacaaaggagaaccaggtctcaaaggattcgcaggaaatccaggtgagaaaggaaacagaggcgttccagggatgccaggtttaaagggcctcaaaggactacccggaccagcaggaccaccaggccccagaggagatttgggcagcactgggaatcctggagaaccaggactgcgtggtataccaggaagcatggggaacatgggcatgccaggttctaaaggaaaaaggggaactttgggattcccaggtcgagcaggaagaccaggcctcccaggtattcatggtctccagggagataagggagagccaggttattcagaaggtacaaggccaggaccaccgggaccaacgggggatccaggactgccgggtgatatgggaaagaaaggagaaatggggcaacctggcccacctggacatttggggcctgctggacctgagggagcccctggaagtcctggaagtcctggcctcccaggaaagccaggtcctcatggtgatttgggttttaaaggaatcaaaggcctcctgggccctccaggaatcagaggccctccaggtcttccaggatttccaggatctcctggaccaatgggtataagaggtgaccaaggacgtgatggaattcctggtccagccggagaaaagggagaaacgggtttattgagggcccctccaggcccaagagggaaccctggtgctcaaggagccaaaggagacaggggagccccaggttttcctggcctcccgggcagaaaaggggccatgggagatgctggacctcgaggacccacaggcatagaaggattcccagggccaccaggtctgcccggtgcaattatccctggccagacaggaaatcgtggtccaccaggctcaagaggaagcccaggtgcgcctggtccccctggacctccagggagtcatgtaataggcataaaaggagacaaagggtctatgggccaccctggcccaaaaggtccacctggaactgcaggagacatgggaccaccaggtcgtctgggagcaccaggtactccaggtcttccaggacccagaggtgatcctggattccaggggtttccaggcgtgaaaggagaaaagggtaatcctggatttctaggatccattggacctccaggaccaattgggccaaaaggaccacctggtgtacgtggagaccctggcacacttaagattatctcccttccaggaagcccagggccacctggcacacctggagaaccagggatgcagggagaacctgggccaccagggccacctggaaacctaggaccctgtgggccaagaggtaagccaggcaaggatggaaaaccaggaactcctggaccagctggagaaaaaggcaacaaaggttctaaaggagagccaggaccagctggatcagatggattgccaggtttgaaaggaaaacgtggagacagtggatcacctgcaacctggacaacgagaggctttgtcttcacccgacacagtcaaaccacagcaattccttcatgtccagaggggacagtgccactctacagtgggttttcttttctttttgtacaaggaaatcaacgagcccacggacaagaccttgaaagcctattccatcaactgtgaaagctggggaattagaaaaaataataagtcgctgtcaggtgtgcatgaagaaaagacactgaagctaaaaaagacagcagaactgctatttttcatcctaaagaacaaagtaatgacagaacatgctgttatttaggtatttttctttaaccaaacaatattgctccatgatgacttagtacaaagtttcaatttgtttccccacaaaacaaagcaattctttcaagtcagttctgtgatctgggtctctaatctgtgctgtttcaaagttctctgtggcaaagcagcaactattcacaaaatatcaccaaaaacctattccacttacatccaaggcactgtcactacggtgattgtatgaagtttgaatgctgcaagttatgaaatatttggcccgctggattcccacatttgtcttctttctgtctttaagactcagggaggctaaatcagtgtttgattgccccgccaacccttcctgaaacttcagaccctgggtaggggaagagaagggggcatgtggtatcctggagcattgtgtatagaactggattttcagacctgctgaggaccgtaaggcctgatggaacacagaactgaactgaggttcatggattttccaggactgtttcaaacatgcccattactaacggcaaaagggggattccctgatggaaccataatacccttggaaatactgtatggttttgttttgttttgttggtttttaaagatttttgtttgtttattgaattcatttcactgtagctctaaaatctgcttgtattccaagcatataaaattttcccccttagtgaattagttttaaaatgatattgttatatacatactatgaaatatgtataactttaacttctgttttaccagcatacccacacaaataacaagaatactacttatgaaatgtgcactttatcctcattccataaatgtcggtgcataccttatgtaagggagcagttcaataatccatgaaagaacttaaggcatttgttggtttatcagactcggaatctattttctcattgctctgaatatgtcatcactctaggttttacagatttattcctttgttacttctctaattcttcctttgtaaaaaaaaaaaaaagcaacactttttatgttatatgttgttcttacaaaccatactgaaagagtccattgtttaaaaatcttaatgtatcaaactgtataacttggccgctgtatgtcttaaaacctgcttttcaatgtgttgatacattcccaaggttacttaattcaacttaactatcatcttattcagcaccaagcatgtcccaggcactgtactaacctacagagatgctaagagaaaaaaaagacttgtttctgatctaatatcccagaaaaagtaactcattgctctgttaataatctcacatatacaagtagcttccctcccctctagttttttcttccttttcactgctgttatatttcatcatgataattcagcaggcccaagtaaaggttaaaaataaggtctatgcctagggaaactcagggcttctagtttctcttagaaaagctaagagaagataaggtctgaataatagcagaaaaaccaacatctacaaaacattaaactagtgttatacttgatgataacactatttgatgagtcttagagtccagacacaaagagacaaagctttgaagatgctttttgatctacctaggtggagttggtggtgctgatatttaaattcaggctactgcttcaatctcaattgctttgtaagtgaaaaacatgacccagaggacagcacagactatggccatggctcacatggtttacatccttcactgctcacgtgtttgctgtcaagccatttttacatctaaactaagatgtgcagcatttcacttatttagattcacttaacaaacaaatttttctgctttaaaaatgtcttattgtcccaagtgtactatagcggcatatagagctagctaatctctacaaaccctctgtaggccagtagttctcaaagtgtggtctctggaagagcagtatcagcatcatctgggaacttgtcacagatgcagattctagggaccactccagacctacacaatcagaaactcttgggggagggcccgaaatatctatgttttaccaagcccaccacatgattctgatgtactctaaatactgagaaaacctgttctagacaaatacccaagcaacaactccgcaggcagttaccaagtacggctggctacaactgctccatccgtgcctctttttaaagttcaaactcacaggtgactctaaggttatctacttttactcataagtaaaagccctagactggtgctaatgtcaaaccactggcctccactcaggcctccatcttctcatgccctcttaccagtatttaacttctgaggaagacaagtgatgctaaaacctgaaattccaatgaagccatatgaacagctgttcagttgcacttctaagactttacttagcagtaaattatagctcatgtgcattattttccagataacttagcttatgagtagcttatacaattatgaagatttaatattacagataaaatgtaaactgtttctttaaaattggggcttcaactttggaatttcacagcgtgctaaaataacagatttctcagaagtctttcagcaagataaacattattaagtaacttatttatgaaagtattaaaatgcttacatttgaacttgatggctaacttacaaagattctctatgtatcaaatgtaacttactgcgactaaacttaatttaatatttactctataaccaaatgaaatatatttaaaatatattgaatattttatattgttatatcctgacaagattataatattttaatgtactaatatttctgtaattatatctaaaatattattttattatattgcctaagaataaacatttgttaaattgg

SEQ ID NO: 1096 - DNA, 7420 bp, Homo sapiens
  source 1..7420: mol_type = genomic DNA
gggagggacgaaccgcgcgaccgagccctacaaaacccgccccggccgagtggcgaggcgagctttccagccgggctcccagagccgcgctgcgcaggagacgcggtggcctgagagcctgagggtccccggactcgcccaggctctgagcgcgcgcccaccatgagcgcccggaccgcccccaggccgcaggtgctcctgctgccgctcctgctggtgctcctggcggcggcgcccgcagccagcaagggttgtgtctgtaaagacaaaggccagtgcttctgtgacggggccaaaggggagaagggggagaagggctttcctggaccccccggttctcctggccagaaaggattcacaggtcctgaaggcttgcctggaccgcagggacccaagtcgtttcgagctattcccagttatagtggaggaaaaagtcttcagggaataagtggattgccaggattttctggttctcctggacttccaggcaccccaggcaataccgggccttacggacttgtcggtgtaccaggatgcagtggttctaagggtgagcaggggtttccaggactcccagggacactgggctacccagggatcccgggaatacataacttgaaaattttcaagggtgctcctgctaaagaagaagatatagaacttgatgcaaaaggcgaccccgggttgccaggggctccaggaccccagggtttgccaggccctccaggttttcctgggcctgttggcccacctggtcctccgggattctttggctttccaggagccatgggacctagaggacctaagtcatttgttctatcttcccgtataagcactaaaggggaaaagggtgtgaaagggttaacaggacccccgggaccaccaggaacagttattgtgaccctaactggcccagataacagaacggacctcaagggggaaaagggagacaagggagcaatgggcgagcctggacctcctggaccctcaggactgcctggagaatcatatggatctgaaaagggtgctcctggagaccctggcctgcagggaaaacccggaaaagatggtgttcctggcttccctggaagtgagggagtcaagggcaacaggggtttccctgggttaatgggtgaagatggcattaaggaagaaaagagagatgtggcaattgtttctttctcctctaagacagaatattatgacacataccaggaaaagggagatgaaggcactccaggcccaccagggcccagaggagctcgtggcccacaaggtaagaataaatttcgttgtataccaggaagccaaggatcatcaaggcctggcctcagaggagcccctggatggccaggcctgaaaggaagtaaaggggaacgaggccgcccaggaaaggatgccatggggactcctgggtccccaggttgtgctggttcaccaggtcttccaggatcaccgggacctccaggaccgccaggtgacatcgtttttcgcaagggtccacctggagatcacggactgccaggctatctagggtctccaggaatcccaggagttgatgggcccaaaggagaaccaggcctcctgtgtacacagtgcccttatatcccagggcctcccggtctcccaggattgccagggttacatggtgtaaaaggaatcccaggaagacaaggcgcagctggcttgaaaggaagcccagggtccccaggaaatacaggtcttccaggatttccaggtttcccaggtgcccagggtgacccaggacttaaaggagaaaaaggtgaaacacttcagcctgaggggcaagtgggtgtcccaggtgacccggggctcagaggccaacctgggagaaagggcttggatggaattcctggaactccgggagtgaaaggattaccaggacctaaaggcgaactggctctgagtggtgagaaaggggaccaaggtcctccaggggatcctggctcccctgggtccccaggacctgcaggaccagctggaccacctggctacggaccccaaggagaacctggtctccagggcacgcaaggagttcctggagcccccggaccacccggagaagccggccctaggggagagctcagtgtttcaacaccagttccaggcccaccaggacctccagggccccctggccatcctggcccccaaggtccacctggtatccctggatccctggggaaatgtggagatcctggtcttccagggcctgatggtgaaccaggaattccaggaattggatttcctgggcctcctggacctaagggagaccaaggttttccaggtacaaaaggatcactgggttgtcctggaaaaatgggagagcctgggttacctggaaagccaggcctcccaggagccaagggagaaccagcagtagccatgcctggaggaccaggaacaccaggttttccaggagaaagaggcaattctggggaacatggagaaattggactccctggacttccaggtctccctggaactccaggaaatgaagggcttgatggaccacgaggagatccagggcagcctggaccacctggagaacaaggacccccaggaaggtgcatagagggtcccaggggagcccaaggacttccaggcttaaatggattgaaagggcaacaaggcagaagaggtaaaacggggccaaagggagacccaggaattccaggcttggatagatcaggatttcctggagaaactggatcaccaggaattccaggtcatcaaggtgaaatgggaccactgggtcaaagaggatatccaggaaatccgggaattttagggccaccaggtgaagatggagtgattgggatgatgggctttcctggagccattggccctccagggccccctgggaacccaggcacaccagggcagagggggagccctggaattccaggagtaaagggccagagaggaaccccaggagccaagggggaacaaggagataaaggaaatcccgggccttcagagatatcccacgtaataggggacaaaggagaaccaggtctcaaaggattcgcaggaaatccaggtgagaaaggaaacagaggcgttccagggatgccaggtttaaagggcctcaaaggactacccggaccagcaggaccaccaggccccagaggagatttgggcagcactgggaatcctggagaaccaggactgcgtggtataccaggaagcatggggaacatgggcatgccaggttctaaaggaaaaaggggaactttgggattcccaggtcgagcaggaagaccaggcctcccaggtattcatggtctccagggagataagggagagccaggttattcagaaggtacaaggccaggaccaccgggaccaacgggggatccaggactgccgggtgatatgggaaagaaaggagaaatggggcaacctggcccacctggacatttggggcctgctggacctgagggagcccctggaagtcctggaagtcctggcctcccaggaaagccaggtcctcatggtgatttgggttttaaaggaatcaaaggcctcctgggccctccaggaatcagaggccctccaggtcttccaggatttccaggatctcctggaccaatgggtataagaggtgaccaaggacgtgatggaattcctggtccagccggagaaaagggagaaacgggtttattgagggcccctccaggcccaagagggaaccctggtgctcaaggagccaaaggagacaggggagccccaggttttcctggcctcccgggcagaaaaggggccatgggagatgctggacctcgaggacccacaggcatagaaggattcccagggccaccaggtctgcccggtgcaattatccctggccagacaggaaatcgtggtccaccaggctcaagaggaagcccaggtgcgcctggtccccctggacctccagggagtcatgtaataggcataaaaggagacaaagggtctatgggccaccctggcccaaaaggtccacctggaactgcaggagacatgggaccaccaggtcgtctgggagcaccaggtactccaggtcttccaggacccagaggtgatcctggattccaggggtttccaggcgtgaaaggagaaaagggtaatcctggatttctaggatccattggacctccaggaccaattgggccaaaaggaccacctggtgtacgtggagaccctggcacacttaagattatctcccttccaggaagcccagggccacctggcacacctggagaaccagggatgcagggagaacctgggccaccagggccacctggaaacctaggaccctgtgggccaagaggtaagccaggcaaggatggaaaaccaggaactcctggaccagctggagaaaaaggcaacaaaggttctaaaggagagccagaaagcctattccatcaactgtgaaagctggggaattagaaaaaataataagtcgctgtcaggtgtgcatgaagaaaagacactgaagctaaaaaagacagcagaactgctatttttcatcctaaagaacaaagtaatgacagaacatgctgttatttaggtatttttctttaaccaaacaatattgctccatgatgacttagtacaaagtttcaatttgtttccccacaaaacaaagcaattctttcaagtcagttctgtgatctgggtctctaatctgtgctgtttcaaagttctctgtggcaaagcagcaactattcacaaaatatcaccaaaaacctattccacttacatccaaggcactgtcactacggtgattgtatgaagtttgaatgctgcaagttatgaaatatttggcccgctggattcccacatttgtcttctttctgtctttaagactcagggaggctaaatcagtgtttgattgccccgccaacccttcctgaaacttcagaccctgggtaggggaagagaagggggcatgtggtatcctggagcattgtgtatagaactggattttcagacctgctgaggaccgtaaggcctgatggaacacagaactgaactgaggttcatggattttccaggactgtttcaaacatgcccattactaacggcaaaagggggattccctgatggaaccataatacccttggaaatactgtatggttttgttttgttttgttggtttttaaagatttttgtttgtttattgaattcatttcactgtagctctaaaatctgcttgtattccaagcatataaaattttcccccttagtgaattagttttaaaatgatattgttatatacatactatgaaatatgtataactttaacttctgttttaccagcatacccacacaaataacaagaatactacttatgaaatgtgcactttatcctcattccataaatgtcggtgcataccttatgtaagggagcagttcaataatccatgaaagaacttaaggcatttgttggtttatcagactcggaatctattttctcattgctctgaatatgtcatcactctaggttttacagatttattcctttgttacttctctaattcttcctttgtaaaaaaaaaaaaaagcaacactttttatgttatatgttgttcttacaaaccatactgaaagagtccattgtttaaaaatcttaatgtatcaaactgtataacttggccgctgtatgtcttaaaacctgcttttcaatgtgttgatacattcccaaggttacttaattcaacttaactatcatcttattcagcaccaagcatgtcccaggcactgtactaacctacagagatgctaagagaaaaaaaagacttgtttctgatctaatatcccagaaaaagtaactcattgctctgttaataatctcacatatacaagtagcttccctcccctctagttttttcttccttttcactgctgttatatttcatcatgataattcagcaggcccaagtaaaggttaaaaataaggtctatgcctagggaaactcagggcttctagtttctcttagaaaagctaagagaagataaggtctgaataatagcagaaaaaccaacatctacaaaacattaaactagtgttatacttgatgataacactatttgatgagtcttagagtccagacacaaagagacaaagctttgaagatgctttttgatctacctaggtggagttggtggtgctgatatttaaattcaggctactgcttcaatctcaattgctttgtaagtgaaaaacatgacccagaggacagcacagactatggccatggctcacatggtttacatccttcactgctcacgtgtttgctgtcaagccatttttacatctaaactaagatgtgcagcatttcacttatttagattcacttaacaaacaaatttttctgctttaaaaatgtcttattgtcccaagtgtactatagcggcatatagagctagctaatctctacaaaccctctgtaggccagtagttctcaaagtgtggtctctggaagagcagtatcagcatcatctgggaacttgtcacagatgcagattctagggaccactccagacctacacaatcagaaactcttgggggagggcccgaaatatctatgttttaccaagcccaccacatgattctgatgtactctaaatactgagaaaacctgttctagacaaatacccaagcaacaactccgcaggcagttaccaagtacggctggctacaactgctccatccgtgcctctttttaaagttcaaactcacaggtgactctaaggttatctacttttactcataagtaaaagccctagactggtgctaatgtcaaaccactggcctccactcaggcctccatcttctcatgccctcttaccagtatttaacttctgaggaagacaagtgatgctaaaacctgaaattccaatgaagccatatgaacagctgttcagttgcacttctaagactttacttagcagtaaattatagctcatgtgcattattttccagataacttagcttatgagtagcttatacaattatgaagatttaatattacagataaaatgtaaactgtttctttaaaattggggcttcaactttggaatttcacagcgtgctaaaataacagatttctcagaagtctttcagcaagataaacattattaagtaacttatttatgaaagtattaaaatgcttacatttgaacttgatggctaacttacaaagattctctatgtatcaaatgtaacttactgcgactaaacttaatttaatatttactctataaccaaatgaaatatatttaaaatatattgaatattttatattgttatatcctgacaagattataatattttaatgtactaatatttctgtaattatatctaaaatattattttattatattgcctaagaataaacatttgttaaattgg

SEQ ID NO: 1097 - DNA, 8097 bp, Homo sapiens
  source 1..8097: mol_type = genomic DNA
gggagggacgaaccgcgcgaccgagccctacaaaacccgccccggccgagtggcgaggcgagctttccagccgggctcccagagccgcgctgcgcaggagacgcggtggcctgagagcctgagggtccccggactcgcccaggctctgagcgcgcgcccaccatgagcgcccggaccgcccccaggccgcaggtgctcctgctgccgctcctgctggtgctcctggcggcggcgcccgcagccagcaagggttgtgtctgtaaagacaaaggccagtgcttctgtgacggggccaaaggggagaagggggagaagggctttcctggaccccccggttctcctggccagaaaggattcacaggtcctgaaggcttgcctggaccgcagggacccaagggctttccaggacttccaggactcacgggttccaaaggtgtaaggggaataagtggattgccaggattttctggttctcctggacttccaggcaccccaggcaataccgggccttacggacttgtcggtgtaccaggatgcagtggttctaagggtgagcaggggtttccaggactcccagggacactgggctacccagggatcccgggtgctgctggtttgaaaggacaaaagggtgctcctgctaaagaagaagatatagaacttgatgcaaaaggcgaccccgggttgccaggggctccaggaccccagggtttgccaggccctccaggttttcctgggcctgttggcccacctggtcctccgggattctttggctttccaggagccatgggacctagaggacctaagggtcacatgggtgaaagagtgataggacataaaggagagcggggtgtgaaagggttaacaggacccccgggaccaccaggaacagttattgtgaccctaactggcccagataacagaacggacctcaagggggaaaagggagacaagggagcaatgggcgagcctggacctcctggaccctcaggactgcctggagaatcatatggatctgaaaagggtgctcctggagaccctggcctgcagggaaaacccggaaaagatggtgttcctggcttccctggaagtgagggagtcaagggcaacaggggtttccctgggttaatgggtgaagatggcattaagggacagaaaggggacattggccctccaggatttcgtggtccaacagaatattatgacacataccaggaaaagggagatgaaggcactccaggcccaccagggcccagaggagctcgtggcccacaaggtcccagtggtccccccggagttcctggaagtcctggatcatcaaggcctggcctcagaggagcccctggatggccaggcctgaaaggaagtaaaggggaacgaggccgcccaggaaaggatgccatggggactcctgggtccccaggttgtgctggttcaccaggtcttccaggatcaccgggacctccaggaccgccaggtgacatcgtttttcgcaagggtccacctggagatcacggactgccaggctatctagggtctccaggaatcccaggagttgatgggcccaaaggagaaccaggcctcctgtgtacacagtgcccttatatcccagggcctcccggtctcccaggattgccagggttacatggtgtaaaaggaatcccaggaagacaaggcgcagctggcttgaaaggaagcccagggtccccaggaaatacaggtcttccaggatttccaggtttcccaggtgcccagggtgacccaggacttaaaggagaaaaaggtgaaacacttcagcctgaggggcaagtgggtgtcccaggtgacccggggctcagaggccaacctgggagaaagggcttggatggaattcctggaactccgggagtgaaaggattaccaggacctaaaggcgaactggctctgagtggtgagaaaggggaccaaggtcctccaggggatcctggctcccctgggtccccaggacctgcaggaccagctggaccacctggctacggaccccaaggagaacctggtctccagggcacgcaaggagttcctggagcccccggaccacccggagaagccggccctaggggagagctcagtgtttcaacaccagttccaggcccaccaggacctccagggccccctggccatcctggcccccaaggtccacctggtatccctggatccctggggaaatgtggagatcctggtcttccagggcctgatggtgaaccaggaattccaggaattggatttcctgggcctcctggacctaagggagaccaaggttttccaggtacaaaaggatcactgggttgtcctggaaaaatgggagagcctgggttacctggaaagccaggcctcccaggagccaagggagaaccagcagtagccatgcctggaggaccaggaacaccaggttttccaggagaaagaggcaattctggggaacatggagaaattggactccctggacttccaggtctccctggaactccaggaaatgaagggcttgatggaccacgaggagatccagggcagcctggaccacctggagaacaaggacccccaggaaggtgcatagagggtcccaggggagcccaaggacttccaggcttaaatggattgaaagggcaacaaggcagaagaggtaaaacggggccaaagggagacccaggaattccaggcttggatagatcaggatttcctggagaaactggatcaccaggaattccaggtcatcaaggtgaaatgggaccactgggtcaaagaggatatccaggaaatccgggaattttagggccaccaggtgaagatggagtgattgggatgatgggctttcctggagccattggccctccagggccccctgggaacccaggcacaccagggcagagggggagccctggaattccaggagtaaagggccagagaggaaccccaggagccaagggggaacaaggagataaaggaaatcccgggccttcagagatatcccacgtaataggggacaaaggagaaccaggtctcaaaggattcgcaggaaatccaggtgagaaaggaaacagaggcgttccagggatgccaggtttaaagggcctcaaaggactacccggaccagcaggaccaccaggccccagaggagatttgggcagcactgggaatcctggagaaccaggactgcgtggtataccaggaagcatggggaacatgggcatgccaggttctaaaggaaaaaggggaactttgggattcccaggtcgagcaggaagaccaggcctcccaggtattcatggtctccagggagataagggagagccaggttattcagaaggtacaaggccaggaccaccgggaccaacgggggatccaggactgccgggtgatatgggaaagaaaggagaaatggggcaacctggcccacctggacatttggggcctgctggacctgagggagcccctggaagtcctggaagtcctggcctcccaggaaagccaggtcctcatggtgatttgggttttaaaggaatcaaaggcctcctgggccctccaggaatcagaggccctccaggtcttccaggatttccaggatctcctggaccaatgggtataagaggtgaccaaggacgtgatggaattcctggtccagccggagaaaagggagaaacgggtttattgagggcccctccaggcccaagagggaaccctggtgctcaaggagccaaaggagacaggggagccccaggttttcctggcctcccgggcagaaaaggggccatgggagatgctggacctcgaggacccacaggcatagaaggattcccagggccaccaggtctgcccggtgcaattatccctggccagacaggaaatcgtggtccaccaggctcaagaggaagcccaggtgcgcctggtccccctggacctccagggagtcatgtaataggcataaaaggagacaaagggtctatgggccaccctggcccaaaaggtccacctggaactgcaggagacatgggaccaccaggtcgtctgggagcaccaggtactccaggtcttccaggacccagaggtgatcctggattccaggggtttccaggcgtgaaaggagaaaagggtaatcctggatttctaggatccattggacctccaggaccaattgggccaaaaggaccacctggtgtacgtggagaccctggcacacttaagattatctcccttccaggaagcccagggccacctggcacacctggagaaccagggatgcagggagaacctgggccaccagggccacctggaaacctaggaccctgtgggccaagaggtaagccaggcaaggatggaaaaccaggaactcctggaccagctggagaaaaaggcaacaaaggttctaaaggagagccaggaccagctggatcagatggattgccaggtttgaaaggaaaacgtggagacagtggatcacctgcaacctggacaacgagaggctttgtcttcacccgacacagtcaaaccacagcaattccttcatgtccagaggggacagtgccactctacagtgggttttcttttctttttgtacaaggaaatcaacgagcccacggacaagaccttggaactcttggcagctgcctgcagcgatttaccacaatgccattcttattctgcaatgtcaatgatgtatgtaattttgcatctcgaaatgattattcatactggctgtcaacaccagctctgatgccaatgaacatggctcccattactggcagagcccttgagccttatataagcagatgcactgtttgtgaaggtcctgcgatcgccatagccgttcacagccaaaccactgacattcctccatgtcctcacggctggatttctctctggaaaggattttcattcatcatgttcacaagtgcaggttctgagggcaccgggcaagcactggcctcccctggctcctgcctggaagaattccgagccagcccatttctagaatgtcatggaagaggaacgtgcaactactattcaaattcctacagtttctggctggcttcattaaacccagaaagaatgttcagaaagcctattccatcaactgtgaaagctggggaattagaaaaaataataagtcgctgtcaggtgtgcatgaagaaaagacactgaagctaaaaaagacagcagaactgctatttttcatcctaaagaacaaagtaatgacagaacatgctgttatttaggtatttttctttaaccaaacaatattgctccatgatgacttagtacaaagtttcaatttgtttccccacaaaacaaagcaattctttcaagtcagttctgtgatctgggtctctaatctgtgctgtttcaaagttctctgtggcaaagcagcaactattcacaaaatatcaccaaaaacctattccacttacatccaaggcactgtcactacggtgattgtatgaagtttgaatgctgcaagttatgaaatatttggcccgctggattcccacatttgtcttctttctgtctttaagactcagggaggctaaatcagtgtttgattgccccgccaacccttcctgaaacttcagaccctgggtaggggaagagaagggggcatgtggtatcctggagcattgtgtatagaactggattttcagacctgctgaggaccgtaaggcctgatggaacacagaactgaactgaggttcatggattttccaggactgtttcaaacatgcccattactaacggcaaaagggggattccctgatggaaccataatacccttggaaatactgtatggttttgttttgttttgttggtttttaaagatttttgtttgtttattgaattcatttcactgtagctctaaaatctgcttgtattccaagcatataaaattttcccccttagtgaattagttttaaaatgatattgttatatacatactatgaaatatgtataactttaacttctgttttaccagcatacccacacaaataacaagaatactacttatgaaatgtgcactttatcctcattccataaatgtcggtgcataccttatgtaagggagcagttcaataatccatgaaagaacttaaggcatttgttggtttatcagactcggaatctattttctcattgctctgaatatgtcatcactctaggttttacagatttattcctttgttacttctctaattcttcctttgtaaaaaaaaaaaaaagcaacactttttatgttatatgttgttcttacaaaccatactgaaagagtccattgtttaaaaatcttaatgtatcaaactgtataacttggccgctgtatgtcttaaaacctgcttttcaatgtgttgatacattcccaaggttacttaattcaacttaactatcatcttattcagcaccaagcatgtcccaggcactgtactaacctacagagatgctaagagaaaaaaaagacttgtttctgatctaatatcccagaaaaagtaactcattgctctgttaataatctcacatatacaagtagcttccctcccctctagttttttcttccttttcactgctgttatatttcatcatgataattcagcaggcccaagtaaaggttaaaaataaggtctatgcctagggaaactcagggcttctagtttctcttagaaaagctaagagaagataaggtctgaataatagcagaaaaaccaacatctacaaaacattaaactagtgttatacttgatgataacactatttgatgagtcttagagtccagacacaaagagacaaagctttgaagatgctttttgatctacctaggtggagttggtggtgctgatatttaaattcaggctactgcttcaatctcaattgctttgtaagtgaaaaacatgacccagaggacagcacagactatggccatggctcacatggtttacatccttcactgctcacgtgtttgctgtcaagccatttttacatctaaactaagatgtgcagcatttcacttatttagattcacttaacaaacaaatttttctgctttaaaaatgtcttattgtcccaagtgtactatagcggcatatagagctagctaatctctacaaaccctctgtaggccagtagttctcaaagtgtggtctctggaagagcagtatcagcatcatctgggaacttgtcacagatgcagattctagggaccactccagacctacacaatcagaaactcttgggggagggcccgaaatatctatgttttaccaagcccaccacatgattctgatgtactctaaatactgagaaaacctgttctagacaaatacccaagcaacaactccgcaggcagttaccaagtacggctggctacaactgctccatccgtgcctctttttaaagttcaaactcacaggtgactctaaggttatctacttttactcataagtaaaagccctagactggtgctaatgtcaaaccactggcctccactcaggcctccatcttctcatgccctcttaccagtatttaacttctgaggaagacaagtgatgctaaaacctgaaattccaatgaagccatatgaacagctgttcagttgcacttctaagactttacttagcagtaaattatagctcatgtgcattattttccagataacttagcttatgagtagcttatacaattatgaagatttaatattacagataaaatgtaaactgtttctttaaaattggggcttcaactttggaatttcacagcgtgctaaaataacagatttctcagaagtctttcagcaagataaacattattaagtaacttatttatgaaagtattaaaatgcttacatttgaacttgatggctaacttacaaagattctctatgtatcaaatgtaacttactgcgactaaacttaatttaatatttactctataaccaaatgaaatatatttaaaatatattgaatattttatattgttatatcctgacaagattataatattttaatgtactaatatttctgtaattatatctaaaatattattttattatattgcctaagaataaacatttgttaaattgga

SEQ ID NO: 1098 - DNA, 6949 bp, Homo sapiens
  source 1..6949: mol_type = genomic DNA
gaccgttgcttggcagacactggatggttatgagcctgaacaagctgaaaaggggcaggaaaagaagtggaggcagcattcttcctatttaaagctgcatcgcttgaaaaaagttttcgcagactgtgctggagctggtgctgaaaaagggggtttgcagaggctgccctggggctggtgctgaaagaagagcccacagctgacttcatggtgctacaataacctcagaatctacttttcactctcaggagaacccacatgtctaatatttagacatgatggcaaactgggcggaagcaagacctctcctcattcttattgttttattagggcaatttgtctcaataaaagcccaggaagaagacgaggatgaaggatatggtgaagaaatagcctgcactcagaatggccagatgtacttaaacagggacatttggaaacctgccccttgtcagatctgtgtctgtgacaatggagccattctctgtgacaagatagaatgccaggatgtgctggactgtgccgaccctgtaacgccccctggggaatgctgtcctgtctgttcacaaacacctggaggtggcaataccaattttggtagaggaagaaagggacaaaagggagaaccaggattagtgcctgttgtaacaggcatacgtggtcgtccaggaccggcaggacctccaggatcacagggaccaagaggagagcgagggccaaaaggaagacctggccctcgtggacctcagggaattgatggagaaccaggtgttcctggtcaacctggtgctccaggacctcctggacatccgtcccacccaggacccgatggcttgagcaggccgttttcagctcaaatggctgggttggatgaaaaatctggacttgggagtcaagtaggactaatgcctggctctgtgggtcctgttggcccaaggggaccacagggtttacaaggacagcaaggtggtgcaggacctacaggacctcctggtgaacctggtgatcctggaccaatgggtccgattggttcacgtggaccagagggccctcctggtaaacctggggaagatggtgaacctggcagaaatggaaatcctggtgaagtgggatttgcaggatctccgggagctcgtggatttcctggggctcctggtcttccaggtctgaagggtcaccgaggacacaaaggtcttgaaggccctaaaggtgaagttggagcacctggttccaagggtgaagctggccccactggtccaatgggtgccatgggtcctctgggtccgaggggaatgccaggagagagagggagacttgggccacagggtgctcctggacaacgaggtgcacatggtatgcctggaaaacctggaccaatgggtcctcttgggataccaggctcttctggttttccaggaaatcctggaatgaagggagaagcaggtcctacaggggcgcgaggccctgaaggtcctcaggggcagagaggtgaaactgggcccccaggtccagttggctctccaggtcttcctggtgcaataggaactgatggtactcctggtgccaaaggcccaacgggctctccaggtacctctggtcctcctggctcagcagggcctcctggatctccaggacctcagggtagcactggtcctcagggaattcgaggccaaccgggtgatccaggagttccaggtttcaaaggagaagctggcccaaaaggggaaccagggccacatggtattcagggtccgataggcccacccggtgaagaaggcaaaagaggtcccagaggtgacccaggaacagttggtcctccagggccagtgggagaaaggggtgctcctggcaatcgtggttttccaggctctgatggtttacctgggccaaagggtgctcaaggagaacggggtcctgtaggttcttcaggacccaaaggaagccagggggatccaggacgtccaggggaacctgggcttccaggtgctcggggtttgacaggaaatcctggtgttcaaggtcctgaaggaaaacttggacctttgggtgcgccaggggaagatggccgtccaggtcctccaggctccataggaatcagagggcagcccgggagcatgggccttccaggccccaaaggtagcagtggtgaccctgggaaacctggagaagcaggaaatgctggagttcctgggcagaggggagctcctggaaaagatggtgaagttggtccttctggtcctgtgggcccgccgggtctagctggtgaaagaggagaacaaggacctccaggccccacaggttttcaggggcttcctggtcctccagggcctcctggagaaggtggaaaaccaggtgatcaaggtgttcctggagatcccggagcagttggcccgttaggacctagaggagaacgaggaaatcctggggaaagaggagaacctgggataactggactccctggtgagaagggaatggctggaggacatggtcctgatggcccaaaaggcagtccaggtccatctgggacccctggagatacaggcccaccaggtcttcaaggtatgccgggagaaagaggaattgcaggaactcctggccccaagggtgacagaggtggcataggagaaaaaggtgctgaaggcacagctggaaatgatggtgcaagaggtcttccaggtcctttgggccctccaggtccggcaggtcctactggagaaaagggtgaacctggtcctcgaggtttagttggccctcctggctcccggggcaatcctggttctcgaggtgaaaatgggccaactggagctgttggttttgccggaccccagggtcctgacggacagcctggagtaaaaggtgaacctggagagccaggacagaagggagatgctggttctcctggaccacaaggtttagcaggatcccctggccctcatggtcctaatggtgttcctggactaaaaggtggtcgaggaacccaaggtccgcctggtgctacaggatttcctggttctgcgggcagagttggacctccaggccctgctggagctccaggacctgcgggacccctaggggaacccgggaaggagggacctccaggtcttcgtggggaccctggctctcatgggcgtgtgggagatcgaggaccagctggcccccctggtggcccaggagacaaaggggacccaggagaagatgggcaacctggtccagatggcccccctggtccagctggaacgaccgggcagagaggaattgttggcatgcctgggcaacgtggagagagaggcatgcccggcctaccaggcccagcgggaacaccaggaaaagtaggaccaactggtgcaacaggagataaaggtccacctggacctgtggggcccccaggctccaatggtcctgtaggggaacctggaccagaaggtccagctggcaatgatggtaccccaggacgggatggtgctgttggagaacgtggtgatcgtggagaccctgggcctgcaggtctgccaggctctcagggtgcccctggaactcctggccctgtgggtgctccaggagatgcaggacaaagaggagatccgggttctcggggtcctataggaccacctggtcgagctgggaaacgtggattacctggaccccaaggacctcgtggtgacaaaggtgatcatggagaccgaggtgacagaggtcagaagggccacagaggctttactggtcttcagggtcttcctggccctcctggtccaaatggtgaacaaggaagtgctggaatccctggaccatttggcccaagaggtcctccaggcccagttggtccttcaggtaaagaaggaaaccctgggccacttgggccaattggacctccaggtgtacgaggcagtgtaggagaagcaggacctgagggccctcctggtgagcctggcccacctggccctccgggtccccctggccaccttacagctgctcttggggatatcatggggcactatgatgaaagcatgccagatccacttcctgagtttactgaagatcaggcggctcctgatgacaaaaacaaaacggacccaggggttcatgctaccctgaagtcactcagtagtcagattgaaaccatgcgcagccccgatggctcgaaaaagcacccagcccgcacgtgtgatgacctaaagctttgccattccgcaaagcagagtggtgaatactggattgatcctaaccaaggatctgttgaagatgcaatcaaagtttactgcaacatggaaacaggagaaacatgtatttcagcaaacccatccagtgtaccacgtaaaacctggtgggccagtaaatctcctgacaataaacctgtttggtatggtcttgatatgaacagagggtctcagttcgcttatggagaccaccaatcacctaatacagccattactcagatgacttttttgcgccttttatcaaaagaagcctcccagaacatcacttacatctgtaaaaacagtgtaggatacatggacgatcaagctaagaacctcaaaaaagctgtggttctcaaaggggcaaatgacttagatatcaaagcagagggaaatattagattccggtatatcgttcttcaagacacttgctctaagcggaatggaaatgtgggcaagactgtctttgaatatagaacacagaatgtggcacgcttgcccatcatagatcttgctcctgtggatgttggcggcacagaccaggaattcggcgttgaaattgggccagtttgttttgtgtaaagtaagccaagacacatcgacaatgagcaccaccatcaatgaccaccgccattcacaagaactttgactgtttgaagttgatcctgagactcttgaagtaatggctgatcctgcatcagcattgtatatatggtcttaagtgcctggcctccttatccttcagaatatttattttacttacaatcctcaagttttaattgattttaaatatttttcaatacaacagtttaggtttaagatgaccaatgacaatgaccacctttgcagaaagtaaactgattgaataaataaatctccgttttcttcaatttatttcagtgtaatgaaaaagttgcttagtatttatgaggaaattcttcttcctggcaggtagcttaaagagtggggtatatagagccacaacacatgtttattttgcttggctgcagttgaaaaatagaaattagtgcccttttgtgacctctcattccaagattgtcaattaaaaatgagtttaaaatgtttaacttgtgatcgagacctacatgcatgtcttgatattgtgtaactataatagagactctttaaggagaatcttaaaaaaaaaaaaacgtttctcactgtcttaaatagaatttttaaatagtatatattcagtggcattttggagaacaaagtgaatttacttcgacttcttaaatttttgtaaaagactataagtttagacatctttctcattcaaatttaaagatatctttctcctcttgatcaatctatcaatattgatagaagtcacactagtatataccatttaatacatttacactttcttatttaagaagatattgaatgcaaaataattgacatatagaactttacaaacatatgtccaaggactctaaattgagactcttccacatgtacaatctcatcatcctgaagcctataatgaagaaaaagatctagaaactgagttgtggagctgactctaatcaaatgtgatgattggaattagaccatttggcctttgaactttcataggaaaaatgacccaacatttcttagcatgagctacctcatctctagaagctgggatggacttactattcttgtttatattttagatactgaaaggtgctatgcttctgttattattccaagactggagataggcagggctaaaaaggtattattatttttcctttaatgatggtgctaaaattcttcctataaaattccttaaaaataaagatggtttaatcactaccattgtgaaaacataactgttagacttcccgtttctgaaagaaagagcatcgttccaatgcttgttcactgttcctctgtcatactgtatctggaatgctttgtaatacttgcatgcttcttagaccagaacatgtaggtccccttgtgtctcaatactttttttttcttaattgcatttgttggctctattttaatttttttcttttaaaataaacagctgggaccatcccaaaagacaagccatgcatacaactttggtcatgtatctctgcaaagcatcaaattaaatgcacgcttttgtcatgtcagtggtttttgttttgtgaaattcctttgaccatattagatctatttcatttccaatagtgaaaaggagatgtggtggtatactttgtttgccatttgtttaaaagatacaacggataccttctatcatgtatgtactggcttataaatgaaaatctatctacaacattacccacaaaggcaacatgacaccaattatcactgcctctgcccttaaaaatgtcagagtagtattattgataaaaagggcaagcaatagatttttcatgactgaataaactgtaataataaaacatatgtctcaaagtgtatcacatatgaatttagcctaattgttttcagtttcattctcaatatttagtttacaacatcattttcccctaaactggttatattttgacctgtatatcttaaatttgagtatttatatgcctaaatacatgtgtgagttttgtttgacttccaagtccaaactataagattatataagttcatatagatgaatcagaaatatgtggtaatactattaagtcacaaacactaacaatttccaactatagaaataacagttcttatttggattttgggaatgctaccaataaaagcctgcccagaccatt

SEQ ID NO: 1099 - DNA, 5575 bp, Homo sapiens
  source 1..5575: mol_type = genomic DNA
ttacctgggagaagacatagacttggacctccaggatcacagggaccaagaggagagcgagggccaaaaggaagacctggccctcgtggacctcagggaattgatggagaaccaggtgttcctggtcaacctggtgctccaggtggtgcaggacctacaggacctcctggtgaacctggtgatcctggaccaatgggtccgattggttcacgtggaccagagggccctcctggtaaacctggggaagatggtgaacctggcagaaatggaaatcctggtgaagtgggatttgcaggatctccgggagctcgtggatttcctggggctcctggtcttccaggtctgaagggtcaccgaggacacaaaggtcttgaaggccctaaaggtgaagttggagcacctggttccaagggagaagcaggtcctacagggcccagaggtgacccaggaacagttggtcctccagggccagtgggagaaaggggtgctcctggcaatcgtggttttccaggctctgatggtttacctgggccaaagggtgctcaaggagaacggggtcctgtaggttcttcaggacccaaaggaagccagggggatccaggacgtccaggggaacctgggcttccaggtgctcggggtttgacaggaaatcctggtgttcaaggtcctgaaggaaaacttggacctttgggtgcgccaggggaagatggccgtccaggtcctccaggctccataggaatcagagggcagcccgggagcatgggccttccaggccccaaaggtagcagtggtgaccctgggaaacctggagaagcaggaaatgctggagttcctgggcagaggggagctcctggaaaagatggtgaagttggtccttctggtcctgtgggcccgccgggtctagctggtgaaagaggagaacaaggacctccaggccccacaggttttcaggggcttcctggtcctccagggcctcctggagaaggtggaaaaccaggtgatcaaggtgttcctggagatcccggagcagttggcccgttaggacctagaggagaacgaggaaatcctggggaaagaggagaacctgggataactggactccctggtgagaagggaatggctggaggacatggtcctgatggcccaaaaggcagtccaggtccatctgggacccctggagatacaggcccaccaggtcttcaaggtatgccgggagaaagaggaattgcaggaactcctggccccaagggtgacagaggtggcataggagaaaaaggtgctgaaggcacagctggaaatgatggtgcaagaggtcttccaggtcctttgggccctccaggtccggcaggtcctactggagaaaagggtgaacctggtcctcgaggtttagttggccctcctggctcccggggcaatcctggttctcgaggtgaaaatgggccaactggagctgttggttttgccggaccccagggtcctgacggacagcctggagtaaaaggtgaacctggagagccaggacagaagggagatgctggttctcctggaccacaaggtttagcaggatcccctggccctcatggtcctaatggtgttcctggactaaaaggtggtcgaggaacccaaggtccgcctggtgctacaggatttcctggttctgcgggcagagttggacctccaggccctgctggagctccaggacctgcgggacccctaggggaacccgggaaggagggacctccaggtcttcgtggggaccctggctctcatgggcgtgtgggagatcgaggaccagctggcccccctggtggcccaggagacaaaggggacccaggagaagatgggcaacctggtccagatggcccccctggtccagctggaacgaccgggcagagaggaattgttggcatgcctgggcaacgtggagagagaggcatgcccggcctaccaggcccagcgggaacaccaggaaaagtaggaccaactggtgcaacaggagataaaggtccacctggacctgtggggcccccaggctccaatggtcctgtaggggaacctggaccagaaggtccagctggcaatgatggtaccccaggacgggatggtgctgttggagaacgtggtgatcgtggagaccctgggcctgcaggtctgccaggctctcagggtgcccctggaactcctggccctgtgggtgctccaggagatgcaggacaaagaggagatccgggttctcggggtcctataggaccacctggtcgagctgggaaacgtggattacctggaccccaaggacctcgtggtgacaaaggtgatcatggagaccgaggtgacagaggtcagaagggccacagaggctttactggtcttcagggtcttcctggccctcctggtccaaatggtgaacaaggaagtgctggaatccctggaccatttggcccaagaggtcctccaggcccagttggtccttcaggtaaagaaggaaaccctgggccacttgggccaattggacctccaggtgtacgaggcagtgtaggagaagcaggacctgagggccctcctggtgagcctggcccacctggccctccgggtccccctggccaccttacagctgctcttggggatatcatggggcactatgatgaaagcatgccagatccacttcctgagtttactgaagatcaggcggctcctgatgacaaaaacaaaacggacccaggggttcatgctaccctgaagtcactcagtagtcagattgaaaccatgcgcagccccgatggctcgaaaaagcacccagcccgcacgtgtgatgacctaaagctttgccattccgcaaagcagagtggtgaatactggattgatcctaaccaaggatctgttgaagatgcaatcaaagtttactgcaacatggaaacaggagaaacatgtatttcagcaaacccatccagtgtaccacgtaaaacctggtgggccagtaaatctcctgacaataaacctgtttggtatggtcttgatatgaacagagggtctcagttcgcttatggagaccaccaatcacctaatacagccattactcagatgacttttttgcgccttttatcaaaagaagcctcccagaacatcacttacatctgtaaaaacagtgtaggatacatggacgatcaagctaagaacctcaaaaaagctgtggttctcaaaggggcaaatgacttagatatcaaagcagagggaaatattagattccggtatatcgttcttcaagacacttgctctaagcggaatggaaatgtgggcaagactgtctttgaatatagaacacagaatgtggcacgcttgcccatcatagatcttgctcctgtggatgttggcggcacagaccaggaattcggcgttgaaattgggccagtttgttttgtgtaaagtaagccaagacacatcgacaatgagcaccaccatcaatgaccaccgccattcacaagaactttgactgtttgaagttgatcctgagactcttgaagtaatggctgatcctgcatcagcattgtatatatggtcttaagtgcctggcctccttatccttcagaatatttattttacttacaatcctcaagttttaattgattttaaatatttttcaatacaacagtttaggtttaagatgaccaatgacaatgaccacctttgcagaaagtaaactgattgaataaataaatctccgttttcttcaatttatttcagtgtaatgaaaaagttgcttagtatttatgaggaaattcttcttcctggcaggtagcttaaagagtggggtatatagagccacaacacatgtttattttgcttggctgcagttgaaaaatagaaattagtgcccttttgtgacctctcattccaagattgtcaattaaaaatgagtttaaaatgtttaacttgtgatcgagacctacatgcatgtcttgatattgtgtaactataatagagactctttaaggagaatcttaaaaaaaaaaaaacgtttctcactgtcttaaatagaatttttaaatagtatatattcagtggcattttggagaacaaagtgaatttacttcgacttcttaaatttttgtaaaagactataagtttagacatctttctcattcaaatttaaagatatctttctcctcttgatcaatctatcaatattgatagaagtcacactagtatataccatttaatacatttacactttcttatttaagaagatattgaatgcaaaataattgacatatagaactttacaaacatatgtccaaggactctaaattgagactcttccacatgtacaatctcatcatcctgaagcctataatgaagaaaaagatctagaaactgagttgtggagctgactctaatcaaatgtgatgattggaattagaccatttggcctttgaactttcataggaaaaatgacccaacatttcttagcatgagctacctcatctctagaagctgggatggacttactattcttgtttatattttagatactgaaaggtgctatgcttctgttattattccaagactggagataggcagggctaaaaaggtattattatttttcctttaatgatggtgctaaaattcttcctataaaattccttaaaaataaagatggtttaatcactaccattgtgaaaacataactgttagacttcccgtttctgaaagaaagagcatcgttccaatgcttgttcactgttcctctgtcatactgtatctggaatgctttgtaatacttgcatgcttcttagaccagaacatgtaggtccccttgtgtctcaatactttttttttcttaattgcatttgttggctctattttaatttttttcttttaaaataaacagctgggaccatcccaaaagacaagccatgcatacaactttggtcatgtatctctgcaaagcatcaaattaaatgcacgcttttgtcatgtcagtggtttttgttttgtgaaattcctttgaccatattagatctatttcatttccaatagtgaaaaggagatgtggtggtatactttgtttgccatttgtttaaaagatacaacggataccttctatcatgtatgtactggcttataaatgaaaatctatctacaacattacccacaaaggcaacatgacaccaattatcactgcctctgcccttaaaaatgtcagagtagtattattgataaaaagggcaagcaatagatttttcatgactgaataaactgtaataataaaacatatgtctcaaagtgtatcacatatgaatttagcctaattgttttcagtttcattctcaatatttagtttacaacatcattttcccctaaactggttatattttgacctgtatatcttaaatttgagtatttatatgcctaaatacatgtgtgagttttgtttgacttccaagtccaaactataagattatataagttcatatagatgaatcagaaatatgtggtaatactattaagtcacaaacactaacaatttccaactatagaaataacagttcttatttggattttgggaatgctaccaata

SEQ ID NO: 1100 - DNA, 7174 bp, Homo sapiens
  source 1..7174: mol_type = genomic DNA
acacagtactctcagcttgttggtggaagcccctcatctgccttcattctgaaggcagggcccggcagaggaaggatcagagggtcgcggccggagggtcccggccggtggggccaactcagagggagaggaaagggctagagacacgaagaacgcaaaccatcaaatttagaagaaaaagccctttgactttttccccctctccctccccaatggctgtgtagcaaacatccctggcgataccttggaaaggacgaagttggtctgcagtcgcaatttcgtgggttgagttcacagttgtgagtgcggggctcggagatggagccgtggtcctctaggtggaaaacgaaacggtggctctgggatttcaccgtaacaaccctcgcattgaccttcctcttccaagctagagaggtcagaggagctgctccagttgatgtactaaaagcactagattttcacaattctccagagggaatatcaaaaacaacgggattttgcacaaacagaaagaattctaaaggctcagatactgcttacagagtttcaaagcaagcacaactcagtgccccaacaaaacagttatttccaggtggaactttcccagaagacttttcaatactatttacagtaaaaccaaaaaaaggaattcagtctttccttttatctatatataatgagcatggtattcagcaaattggtgttgaggttgggagatcacctgtttttctgtttgaagaccacactggaaaacctgccccagaagactatcccctcttcagaactgttaacatcgctgacgggaagtggcatcgggtagcaatcagcgtggagaagaaaactgtgacaatgattgttgattgtaagaagaaaaccacgaaaccacttgatagaagtgagagagcaattgttgataccaatggaatcacggtttttggaacaaggattttggatgaagaagtttttgagggggacattcagcagtttttgatcacaggtgatcccaaggcagcatatgactactgtgagcattatagtccagactgtgactcttcagcacccaaggctgctcaagctcaggaacctcagatagatgaggcaaacatcgttgatgattttcaagaatacaactatggaacaatggaaagttaccagacagaagctcctaggcatgtttctgggacaaatgagccaaatccagttgaagaaatatttactgaagaatatctaacgggagaggattatgattcccagaggaaaaattctgaggatacactatatgaaaacaaagaaatagacggcagggattctgatcttctggtagatggagatttaggcgaatatgatttttatgaatataaagaatatgaagataaaccaacaagcccccctaatgaagaatttggtccaggtgtaccagcagaaactgatattacagaaacaagcataaatggccatggtgcatatggagagaaaggacagaaaggagaaccagcagtggttgagcctggtatgcttgtcgaaggaccaccaggaccagcaggacctgcaggtattatgggtcctccaggtctacaaggccccactggaccccctggtgaccctggcgataggggccccccaggacgtcctggcttaccaggggctgatggtctacctggtcctcctggtactatgttgatgttaccgttccgttatggtggtgatggttccaaaggaccaaccatctctgctcaggaagctcaggctcaagctattcttcagcaggctcggattgctctgagaggcccacctggcccaatgggtctaactggaagaccaggtcctgtgggggggcctggttcatctggggccaaaggtgagagtggtgatccaggtcctcagggccctcgaggcgtccagggtccccctggtccaacgggaaaacctggaaaaaggggtcgtccaggtgcagatggaggaagaggaatgccaggagaacctggggcaaagggagatcgagggtttgatggacttccgggtctgccaggtgacaaaggtcacaggggtgaacgaggtcctcaaggtcctccaggtcctcctggtgatgatggaatgaggggagaagatggagaaattggaccaagaggtcttccaggtgaagctggcccacgaggtttgctgggtccaaggggaactccaggagctccagggcagcctggtatggcaggtgtagatggccccccaggaccaaaagggaacatgggtccccaaggggagcctgggcctccaggtcaacaagggaatccaggacctcagggtcttcctggtccacaaggtccaattggtcctcctggtgaaaaaggaccacaaggaaaaccaggacttgctggacttcctggtgctgatgggcctcctggtcatcctgggaaagaaggccagtctggagaaaagggggctctgggtccccctggtccacaaggtcctattggatacccgggcccccggggagtaaagggagcagatggtgtcagaggtctcaagggatctaaaggtgaaaagggtgaagatggttttccaggattcaaaggtgacatgggtctaaaaggtgacagaggagaagttggtcaaattggcccaagaggggaagatggccctgaaggacccaaaggtcgagcaggcccaactggagacccaggtccttcaggtcaagcaggagaaaagggaaaacttggagttccaggattaccaggatatccaggaagacaaggtccaaagggttccactggattccctgggtttccaggtgccaatggagagaaaggtgcacggggagtagctggcaaaccaggccctcggggtcagcgtggtccaacgggtcctcgaggttcaagaggtgcaagaggtcccactgggaaacctgggccaaagggcacttcaggtggcgatggccctcctggccctccaggtgaaagaggtcctcaaggacctcagggtccagttggattccctggaccaaaaggccctcctggaccacctgggaaggatgggctgccaggacaccctgggcaacgtggggagactggatttcaaggcaagaccggccctcctgggccagggggagtggttggaccacagggaccaaccggtgagactggtccaataggggaacgtgggcatcctggccctcctggccctcctggtgagcaaggtcttcctggtgctgcaggaaaagaaggtgcaaagggtgatccaggtcctcaaggtatctcagggaaagatggaccagcaggattacgtggtttcccaggggaaagaggtcttcctggagctcagggtgcacctggactgaaaggaggggaaggtccccagggcccaccaggtccagttggctcaccaggagaacgtgggtcagcaggtacagctggcccaattggtttaccagggcgcccgggacctcagggtcctcctggtccagctggagagaaaggtgctcctggagaaaaaggtccccaagggcctgcagggagagatggagttcaaggtcctgttggtctcccagggccagctggtcctgccggctcccctggggaagacggagacaagggtgaaattggtgagccgggacaaaaaggcagcaagggtgacaagggagaaaatggccctcccggtcccccaggtcttcaaggaccagttggtgcccctggaattgctggaggtgatggtgaaccaggtcctagaggacagcaggggatgtttgggcaaaaaggtgatgagggtgccagaggcttccctggacctcctggtccaataggtcttcagggtctgccaggcccacctggtgaaaaaggtgaaaatggggatgttggtcccatggggccacctggtcctccaggcccaagaggccctcaaggtcccaatggagctgatggaccacaaggacccccagggtctgttggttcagttggtggtgttggagaaaagggtgaacctggagaagcagggaacccagggcctcctggggaagcaggtgtaggcggtcccaaaggagaaagaggagagaaaggggaagctggtccacctggagctgctggacctccaggtgccaaggggccaccaggtgatgatggccctaagggtaacccgggtcctgttggttttcctggagatcctggtcctcctggggaacctggccctgcaggtcaagatggtgttggtggtgacaagggtgaagatggagatcctggtcaaccgggtcctcctggcccatctggtgaggctggcccaccaggtcctcctggaaaacgaggtcctcctggagctgcaggtgcagagggaagacaaggtgaaaaaggtgctaagggggaagcaggtgcagaaggtcctcctggaaaaaccggcccagtcggtcctcagggacctgcaggaaagcctggtccagaaggtcttcggggcatccctggtcctgtgggagaacaaggtctccctggagctgcaggccaagatggaccacctggtcctatgggacctcctggcttacctggtctcaaaggtgaccctggctccaagggtgaaaagggacatcctggtttaattggcctgattggtcctccaggagaacaaggggaaaaaggtgaccgagggctccctggaactcaaggatctccaggagcaaaaggggatgggggaattcctggtcctgctggtcccttaggtccacctggtcctccaggtttaccaggtcctcaaggcccaaagggtaacaaaggctctactggacccgctggccagaaaggtgacagtggtcttccagggcctcctgggtctccaggtccacctggtgaagtcattcagcctttaccaatcttgtcctccaaaaaaacgagaagacatactgaaggcatgcaagcagatgcagatgataatattcttgattactcggatggaatggaagaaatatttggttccctcaattccctgaaacaagacattgagcatatgaaatttccaatgggtactcagaccaatccagcccgaacttgtaaagacctgcaactcagccatcctgacttcccagatggtgaatattggattgatcctaaccaaggttgctcaggagattccttcaaagtttactgtaatttcacatctggtggtgagacttgcatttatccagacaaaaaatctgagggagtaagaatttcatcatggccaaaggagaaaccaggaagttggtttagtgaatttaagaggggaaaactgctttcatacttagatgttgaaggaaattccatcaatatggtgcaaatgacattcctgaaacttctgactgcctctgctcggcaaaatttcacctaccactgtcatcagtcagcagcctggtatgatgtgtcatcaggaagttatgacaaagcacttcgcttcctgggatcaaatgatgaggagatgtcctatgacaataatccttttatcaaaacactgtatgatggttgtgcgtccagaaaaggctatgaaaagactgtcattgaaatcaatacaccaaaaattgatcaagtacctattgttgatgtcatgatcaatgactttggtgatcagaatcagaagttcggatttgaagttggtcctgtttgttttcttggctaagattaagacaaagaacatatcaaatcaacagaaaatataccttggtgccaccaacccattttgtgccacatgcaagttttgaataaggatggtatagaaaacaacgctgcatatacaggtaccatttaggaaataccgatgcctttgtgggggcagaatcacatggcaaaagctttgaaaatcataaagatataagttggtgtggctaagatggaaacagggctgattcttgattcccaattctcaactctccttttcctatttgaatttctttggtgctgtagaaaacaaaaaaagaaaaatatatattcataaaaaatatggtgctcattctcatccatccaggatgtactaaaacagtgtgtttaataaattgtaattattttgtgtacagttctatactgttatctgtgtccatttccaaaacttgcacgtgtccctgaattccatctgactctaattttatgagaattgcagaactctgatggcaataaatatatgtattatgaaaaaataaagttgtaatttctgatgactctaagtccctttctttggttaataataaaatgcctttgtatatattgatgttgaagagttcaattatttgatgtcgccaacaaaattctcagagggcaaaaatctggaagacttttggaagcacactctgatcaactcttctctgccgacagtcattttgctgaatttcagccaaaaatattatgcattttgatgctttattcaaggctatacctcaaactttttcttctcagaatccaggatttcacaggatacttgtatatatggaaaacaagcaagtttatatttttggacagggaaatgtgtgtaagaaagtatattaacaaatcaatgcctccgtcaagcaaacaatcatatgtatactttttttctacgttatctcatctccttgttttcagtgtgcttcaataatgcaggttaatattaaagatggaaattaagcaattatttatgaatttgtgcaatgttagattttcttatcaatcaagttcttgaatttgattctaagttgcatattataacagtctcgaaaattattttacttgcccaacaaatattacttttttcctttcaagataattttataaatcatttgacctacctaattgctaaatgaataacatatggtggactgttattaagagtatttgttttaagtcattcaggaaaatctaaacttttttttccactaaggtatttactttaaggtagcttgaaatagcaatacaatttaaaaattaaaaactgaattttgtatctattttaagtaatatatgtaagacttgaaaataaatgttttatttcttatataaagtgttaaattaattgataccagatttcactggaacagtttcaactgataatttatgacaaaagaacatacctgtaatattgaaattaaaaagtgaaatttgtcataaagaatttcttttatttttgaaatcgagtttgtaaatgtccttttaagaagggagatatgaatccaataaataaactcaagtcttggctacctgga

SEQ ID NO: 1101 - DNA, 7327 bp, Homo sapiens
  source 1..7327: mol_type = genomic DNA
acacagtactctcagcttgttggtggaagcccctcatctgccttcattctgaaggcagggcccggcagaggaaggatcagagggtcgcggccggagggtcccggccggtggggccaactcagagggagaggaaagggctagagacacgaagaacgcaaaccatcaaatttagaagaaaaagccctttgactttttccccctctccctccccaatggctgtgtagcaaacatccctggcgataccttggaaaggacgaagttggtctgcagtcgcaatttcgtgggttgagttcacagttgtgagtgcggggctcggagatggagccgtggtcctctaggtggaaaacgaaacggtggctctgggatttcaccgtaacaaccctcgcattgaccttcctcttccaagctagagaggtcagaggagctgctccagttgatgtactaaaagcactagattttcacaattctccagagggaatatcaaaaacaacgggattttgcacaaacagaaagaattctaaaggctcagatactgcttacagagtttcaaagcaagcacaactcagtgccccaacaaaacagttatttccaggtggaactttcccagaagacttttcaatactatttacagtaaaaccaaaaaaaggaattcagtctttccttttatctatatataatgagcatggtattcagcaaattggtgttgaggttgggagatcacctgtttttctgtttgaagaccacactggaaaacctgccccagaagactatcccctcttcagaactgttaacatcgctgacgggaagtggcatcgggtagcaatcagcgtggagaagaaaactgtgacaatgattgttgattgtaagaagaaaaccacgaaaccacttgatagaagtgagagagcaattgttgataccaatggaatcacggtttttggaacaaggattttggatgaagaagtttttgagggggacattcagcagtttttgatcacaggtgatcccaaggcagcatatgactactgtgagcattatagtccagactgtgactcttcagcacccaaggctgctcaagctcaggaacctcagatagatgagaaaaagaaatccaatttcaaaaagaagatgaggacagtggctactaaatcaaaggaaaaatccaaaaagtttacaccccccaaatctgaaaaattttcatccaagaagaagaaaagttatcaagcatcagcaaaagccaaactaggggtaaaggcaaacatcgttgatgattttcaagaatacaactatggaacaatggaaagttaccagacagaagctcctaggcatgtttctgggacaaatgagccaaatccagttgaagaaatatttactgaagaatatctaacgggagaggattatgattcccagaggaaaaattctgaggatacactatatgaaaacaaagaaatagacggcagggattctgatcttctggtagatggagatttaggcgaatatgatttttatgaatataaagaatatgaagataaaccaacaagcccccctaatgaagaatttggtccaggtgtaccagcagaaactgatattacagaaacaagcataaatggccatggtgcatatggagagaaaggacagaaaggagaaccagcagtggttgagcctggtatgcttgtcgaaggaccaccaggaccagcaggacctgcaggtattatgggtcctccaggtctacaaggccccactggaccccctggtgaccctggcgataggggccccccaggacgtcctggcttaccaggggctgatggtctacctggtcctcctggtactatgttgatgttaccgttccgttatggtggtgatggttccaaaggaccaaccatctctgctcaggaagctcaggctcaagctattcttcagcaggctcggattgctctgagaggcccacctggcccaatgggtctaactggaagaccaggtcctgtgggggggcctggttcatctggggccaaaggtgagagtggtgatccaggtcctcagggccctcgaggcgtccagggtccccctggtccaacgggaaaacctggaaaaaggggtcgtccaggtgcagatggaggaagaggaatgccaggagaacctggggcaaagggagatcgagggtttgatggacttccgggtctgccaggtgacaaaggtcacaggggtgaacgaggtcctcaaggtcctccaggtcctcctggtgatgatggaatgaggggagaagatggagaaattggaccaagaggtcttccaggtgaagctggcccacgaggtttgctgggtccaaggggaactccaggagctccagggcagcctggtatggcaggtgtagatggccccccaggaccaaaagggaacatgggtccccaaggggagcctgggcctccaggtcaacaagggaatccaggacctcagggtcttcctggtccacaaggtccaattggtcctcctggtgaaaaaggaccacaaggaaaaccaggacttgctggacttcctggtgctgatgggcctcctggtcatcctgggaaagaaggccagtctggagaaaagggggctctgggtccccctggtccacaaggtcctattggatacccgggcccccggggagtaaagggagcagatggtgtcagaggtctcaagggatctaaaggtgaaaagggtgaagatggttttccaggattcaaaggtgacatgggtctaaaaggtgacagaggagaagttggtcaaattggcccaagaggggaagatggccctgaaggacccaaaggtcgagcaggcccaactggagacccaggtccttcaggtcaagcaggagaaaagggaaaacttggagttccaggattaccaggatatccaggaagacaaggtccaaagggttccactggattccctgggtttccaggtgccaatggagagaaaggtgcacggggagtagctggcaaaccaggccctcggggtcagcgtggtccaacgggtcctcgaggttcaagaggtgcaagaggtcccactgggaaacctgggccaaagggcacttcaggtggcgatggccctcctggccctccaggtgaaagaggtcctcaaggacctcagggtccagttggattccctggaccaaaaggccctcctggaccacctgggaaggatgggctgccaggacaccctgggcaacgtggggagactggatttcaaggcaagaccggccctcctgggccagggggagtggttggaccacagggaccaaccggtgagactggtccaataggggaacgtgggcatcctggccctcctggccctcctggtgagcaaggtcttcctggtgctgcaggaaaagaaggtgcaaagggtgatccaggtcctcaaggtatctcagggaaagatggaccagcaggattacgtggtttcccaggggaaagaggtcttcctggagctcagggtgcacctggactgaaaggaggggaaggtccccagggcccaccaggtccagttggctcaccaggagaacgtgggtcagcaggtacagctggcccaattggtttaccagggcgcccgggacctcagggtcctcctggtccagctggagagaaaggtgctcctggagaaaaaggtccccaagggcctgcagggagagatggagttcaaggtcctgttggtctcccagggccagctggtcctgccggctcccctggggaagacggagacaagggtgaaattggtgagccgggacaaaaaggcagcaagggtgacaagggagaaaatggccctcccggtcccccaggtcttcaaggaccagttggtgcccctggaattgctggaggtgatggtgaaccaggtcctagaggacagcaggggatgtttgggcaaaaaggtgatgagggtgccagaggcttccctggacctcctggtccaataggtcttcagggtctgccaggcccacctggtgaaaaaggtgaaaatggggatgttggtcccatggggccacctggtcctccaggcccaagaggccctcaaggtcccaatggagctgatggaccacaaggacccccagggtctgttggttcagttggtggtgttggagaaaagggtgaacctggagaagcagggaacccagggcctcctggggaagcaggtgtaggcggtcccaaaggagaaagaggagagaaaggggaagctggtccacctggagctgctggacctccaggtgccaaggggccaccaggtgatgatggccctaagggtaacccgggtcctgttggttttcctggagatcctggtcctcctggggaacctggccctgcaggtcaagatggtgttggtggtgacaagggtgaagatggagatcctggtcaaccgggtcctcctggcccatctggtgaggctggcccaccaggtcctcctggaaaacgaggtcctcctggagctgcaggtgcagagggaagacaaggtgaaaaaggtgctaagggggaagcaggtgcagaaggtcctcctggaaaaaccggcccagtcggtcctcagggacctgcaggaaagcctggtccagaaggtcttcggggcatccctggtcctgtgggagaacaaggtctccctggagctgcaggccaagatggaccacctggtcctatgggacctcctggcttacctggtctcaaaggtgaccctggctccaagggtgaaaagggacatcctggtttaattggcctgattggtcctccaggagaacaaggggaaaaaggtgaccgagggctccctggaactcaaggatctccaggagcaaaaggggatgggggaattcctggtcctgctggtcccttaggtccacctggtcctccaggtttaccaggtcctcaaggcccaaagggtaacaaaggctctactggacccgctggccagaaaggtgacagtggtcttccagggcctcctgggtctccaggtccacctggtgaagtcattcagcctttaccaatcttgtcctccaaaaaaacgagaagacatactgaaggcatgcaagcagatgcagatgataatattcttgattactcggatggaatggaagaaatatttggttccctcaattccctgaaacaagacattgagcatatgaaatttccaatgggtactcagaccaatccagcccgaacttgtaaagacctgcaactcagccatcctgacttcccagatggtgaatattggattgatcctaaccaaggttgctcaggagattccttcaaagtttactgtaatttcacatctggtggtgagacttgcatttatccagacaaaaaatctgagggagtaagaatttcatcatggccaaaggagaaaccaggaagttggtttagtgaatttaagaggggaaaactgctttcatacttagatgttgaaggaaattccatcaatatggtgcaaatgacattcctgaaacttctgactgcctctgctcggcaaaatttcacctaccactgtcatcagtcagcagcctggtatgatgtgtcatcaggaagttatgacaaagcacttcgcttcctgggatcaaatgatgaggagatgtcctatgacaataatccttttatcaaaacactgtatgatggttgtgcgtccagaaaaggctatgaaaagactgtcattgaaatcaatacaccaaaaattgatcaagtacctattgttgatgtcatgatcaatgactttggtgatcagaatcagaagttcggatttgaagttggtcctgtttgttttcttggctaagattaagacaaagaacatatcaaatcaacagaaaatataccttggtgccaccaacccattttgtgccacatgcaagttttgaataaggatggtatagaaaacaacgctgcatatacaggtaccatttaggaaataccgatgcctttgtgggggcagaatcacatggcaaaagctttgaaaatcataaagatataagttggtgtggctaagatggaaacagggctgattcttgattcccaattctcaactctccttttcctatttgaatttctttggtgctgtagaaaacaaaaaaagaaaaatatatattcataaaaaatatggtgctcattctcatccatccaggatgtactaaaacagtgtgtttaataaattgtaattattttgtgtacagttctatactgttatctgtgtccatttccaaaacttgcacgtgtccctgaattccatctgactctaattttatgagaattgcagaactctgatggcaataaatatatgtattatgaaaaaataaagttgtaatttctgatgactctaagtccctttctttggttaataataaaatgcctttgtatatattgatgttgaagagttcaattatttgatgtcgccaacaaaattctcagagggcaaaaatctggaagacttttggaagcacactctgatcaactcttctctgccgacagtcattttgctgaatttcagccaaaaatattatgcattttgatgctttattcaaggctatacctcaaactttttcttctcagaatccaggatttcacaggatacttgtatatatggaaaacaagcaagtttatatttttggacagggaaatgtgtgtaagaaagtatattaacaaatcaatgcctccgtcaagcaaacaatcatatgtatactttttttctacgttatctcatctccttgttttcagtgtgcttcaataatgcaggttaatattaaagatggaaattaagcaattatttatgaatttgtgcaatgttagattttcttatcaatcaagttcttgaatttgattctaagttgcatattataacagtctcgaaaattattttacttgcccaacaaatattacttttttcctttcaagataattttataaatcatttgacctacctaattgctaaatgaataacatatggtggactgttattaagagtatttgttttaagtcattcaggaaaatctaaacttttttttccactaaggtatttactttaaggtagcttgaaatagcaatacaatttaaaaattaaaaactgaattttgtatctattttaagtaatatatgtaagacttgaaaataaatgttttatttcttatataaagtgttaaattaattgataccagatttcactggaacagtttcaactgataatttatgacaaaagaacatacctgtaatattgaaattaaaaagtgaaatttgtcataaagaatttcttttatttttgaaatcgagtttgtaaatgtccttttaagaagggagatatgaatccaataaataaactcaagtcttggctacctgga

SEQ ID NO: 1102 - DNA, 7253 bp, Homo sapiens
  source 1..7253: mol_type = genomic DNA
acacagtactctcagcttgttggtggaagcccctcatctgccttcattctgaaggcagggcccggcagaggaaggatcagagggtcgcggccggagggtcccggccggtggggccaactcagagggagaggaaagggctagagacacgaagaacgcaaaccatcaaatttagaagaaaaagccctttgactttttccccctctccctccccaatggctgtgtagcaaacatccctggcgataccttggaaaggacgaagttggtctgcagtcgcaatttcgtgggttgagttcacagttgtgagtgcggggctcggagatggagccgtggtcctctaggtggaaaacgaaacggtggctctgggatttcaccgtaacaaccctcgcattgaccttcctcttccaagctagagaggtcagaggagctgctccagttgatgtactaaaagcactagattttcacaattctccagagggaatatcaaaaacaacgggattttgcacaaacagaaagaattctaaaggctcagatactgcttacagagtttcaaagcaagcacaactcagtgccccaacaaaacagttatttccaggtggaactttcccagaagacttttcaatactatttacagtaaaaccaaaaaaaggaattcagtctttccttttatctatatataatgagcatggtattcagcaaattggtgttgaggttgggagatcacctgtttttctgtttgaagaccacactggaaaacctgccccagaagactatcccctcttcagaactgttaacatcgctgacgggaagtggcatcgggtagcaatcagcgtggagaagaaaactgtgacaatgattgttgattgtaagaagaaaaccacgaaaccacttgatagaagtgagagagcaattgttgataccaatggaatcacggtttttggaacaaggattttggatgaagaagtttttgagggggacattcagcagtttttgatcacaggtgatcccaaggcagcatatgactactgtgagcattatagtccagactgtgactcttcagcacccaaggctgctcaagctcaggaacctcagatagatgagtatgcaccagaggatataatcgaatatgactatgagtatggggaagcagagtataaagaggctgaaagtgtaacagagggacccactgtaactgaggagacaatagcacagacggaggcaaacatcgttgatgattttcaagaatacaactatggaacaatggaaagttaccagacagaagctcctaggcatgtttctgggacaaatgagccaaatccagttgaagaaatatttactgaagaatatctaacgggagaggattatgattcccagaggaaaaattctgaggatacactatatgaaaacaaagaaatagacggcagggattctgatcttctggtagatggagatttaggcgaatatgatttttatgaatataaagaatatgaagataaaccaacaagcccccctaatgaagaatttggtccaggtgtaccagcagaaactgatattacagaaacaagcataaatggccatggtgcatatggagagaaaggacagaaaggagaaccagcagtggttgagcctggtatgcttgtcgaaggaccaccaggaccagcaggacctgcaggtattatgggtcctccaggtctacaaggccccactggaccccctggtgaccctggcgataggggccccccaggacgtcctggcttaccaggggctgatggtctacctggtcctcctggtactatgttgatgttaccgttccgttatggtggtgatggttccaaaggaccaaccatctctgctcaggaagctcaggctcaagctattcttcagcaggctcggattgctctgagaggcccacctggcccaatgggtctaactggaagaccaggtcctgtgggggggcctggttcatctggggccaaaggtgagagtggtgatccaggtcctcagggccctcgaggcgtccagggtccccctggtccaacgggaaaacctggaaaaaggggtcgtccaggtgcagatggaggaagaggaatgccaggagaacctggggcaaagggagatcgagggtttgatggacttccgggtctgccaggtgacaaaggtcacaggggtgaacgaggtcctcaaggtcctccaggtcctcctggtgatgatggaatgaggggagaagatggagaaattggaccaagaggtcttccaggtgaagctggcccacgaggtttgctgggtccaaggggaactccaggagctccagggcagcctggtatggcaggtgtagatggccccccaggaccaaaagggaacatgggtccccaaggggagcctgggcctccaggtcaacaagggaatccaggacctcagggtcttcctggtccacaaggtccaattggtcctcctggtgaaaaaggaccacaaggaaaaccaggacttgctggacttcctggtgctgatgggcctcctggtcatcctgggaaagaaggccagtctggagaaaagggggctctgggtccccctggtccacaaggtcctattggatacccgggcccccggggagtaaagggagcagatggtgtcagaggtctcaagggatctaaaggtgaaaagggagaagttggtcaaattggcccaagaggggaagatggccctgaaggacccaaaggtcgagcaggcccaactggagacccaggtccttcaggtcaagcaggagaaaagggaaaacttggagttccaggattaccaggatatccaggaagacaaggtccaaaggatttcagatgtcattggttccactggattccctgggtttccaggtgccaatggagagaaaggtgcacggggagtagctggcaaaccaggccctcggggtcagcgtggtccaacgggtcctcgaggttcaagaggtgcaagaggtcccactgggaaacctgggccaaagggcacttcaggtggcgatggccctcctggccctccaggtgaaagaggtcctcaaggacctcagggtccagttggattccctggaccaaaaggccctcctggaccacctgggaaggatgggctgccaggacaccctgggcaacgtggggagactggatttcaaggcaagaccggccctcctgggccagggggagtggttggaccacagggaccaaccggtgagactggtccaataggggaacgtgggcatcctggccctcctggccctcctggtgagcaaggtcttcctggtgctgcaggaaaagaaggtgcaaagggtgatccaggtcctcaaggtatctcagggaaagatggaccagcaggattacgtggtttcccaggggaaagaggtcttcctggagctcagggtgcacctggactgaaaggaggggaaggtccccagggcccaccaggtccagttggctcaccaggagaacgtgggtcagcaggtacagctggcccaattggtttaccagggcgcccgggacctcagggtcctcctggtccagctggagagaaaggtgctcctggagaaaaaggtccccaagggcctgcagggagagatggagttcaaggtcctgttggtctcccagggccagctggtcctgccggctcccctggggaagacggagacaagggtgaaattggtgagccgggacaaaaaggcagcaagggtgacaagggagaaaatggccctcccggtcccccaggtcttcaaggaccagttggtgcccctggaattgctggaggtgatggtgaaccaggtcctagaggacagcaggggatgtttgggcaaaaaggtgatgagggtgccagaggcttccctggacctcctggtccaataggtcttcagggtctgccaggcccacctggtgaaaaaggtgaaaatggggatgttggtcccatggggccacctggtcctccaggcccaagaggccctcaaggtcccaatggagctgatggaccacaaggacccccagggtctgttggttcagttggtggtgttggagaaaagggtgaacctggagaagcagggaacccagggcctcctggggaagcaggtgtaggcggtcccaaaggagaaagaggagagaaaggggaagctggtccacctggagctgctggacctccaggtgccaaggggccaccaggtgatgatggccctaagggtaacccgggtcctgttggttttcctggagatcctggtcctcctggggaacctggccctgcaggtcaagatggtgttggtggtgacaagggtgaagatggagatcctggtcaaccgggtcctcctggcccatctggtgaggctggcccaccaggtcctcctggaaaacgaggtcctcctggagctgcaggtgcagagggaagacaaggtgaaaaaggtgctaagggggaagcaggtgcagaaggtcctcctggaaaaaccggcccagtcggtcctcagggacctgcaggaaagcctggtccagaaggtcttcggggcatccctggtcctgtgggagaacaaggtctccctggagctgcaggccaagatggaccacctggtcctatgggacctcctggcttacctggtctcaaaggtgaccctggctccaagggtgaaaagggacatcctggtttaattggcctgattggtcctccaggagaacaaggggaaaaaggtgaccgagggctccctggaactcaaggatctccaggagcaaaaggggatgggggaattcctggtcctgctggtcccttaggtccacctggtcctccaggtttaccaggtcctcaaggcccaaagggtaacaaaggctctactggacccgctggccagaaaggtgacagtggtcttccagggcctcctgggtctccaggtccacctggtgaagtcattcagcctttaccaatcttgtcctccaaaaaaacgagaagacatactgaaggcatgcaagcagatgcagatgataatattcttgattactcggatggaatggaagaaatatttggttccctcaattccctgaaacaagacattgagcatatgaaatttccaatgggtactcagaccaatccagcccgaacttgtaaagacctgcaactcagccatcctgacttcccagatggtgaatattggattgatcctaaccaaggttgctcaggagattccttcaaagtttactgtaatttcacatctggtggtgagacttgcatttatccagacaaaaaatctgagggagtaagaatttcatcatggccaaaggagaaaccaggaagttggtttagtgaatttaagaggggaaaactgctttcatacttagatgttgaaggaaattccatcaatatggtgcaaatgacattcctgaaacttctgactgcctctgctcggcaaaatttcacctaccactgtcatcagtcagcagcctggtatgatgtgtcatcaggaagttatgacaaagcacttcgcttcctgggatcaaatgatgaggagatgtcctatgacaataatccttttatcaaaacactgtatgatggttgtgcgtccagaaaaggctatgaaaagactgtcattgaaatcaatacaccaaaaattgatcaagtacctattgttgatgtcatgatcaatgactttggtgatcagaatcagaagttcggatttgaagttggtcctgtttgttttcttggctaagattaagacaaagaacatatcaaatcaacagaaaatataccttggtgccaccaacccattttgtgccacatgcaagttttgaataaggatggtatagaaaacaacgctgcatatacaggtaccatttaggaaataccgatgcctttgtgggggcagaatcacatggcaaaagctttgaaaatcataaagatataagttggtgtggctaagatggaaacagggctgattcttgattcccaattctcaactctccttttcctatttgaatttctttggtgctgtagaaaacaaaaaaagaaaaatatatattcataaaaaatatggtgctcattctcatccatccaggatgtactaaaacagtgtgtttaataaattgtaattattttgtgtacagttctatactgttatctgtgtccatttccaaaacttgcacgtgtccctgaattccatctgactctaattttatgagaattgcagaactctgatggcaataaatatatgtattatgaaaaaataaagttgtaatttctgatgactctaagtccctttctttggttaataataaaatgcctttgtatatattgatgttgaagagttcaattatttgatgtcgccaacaaaattctcagagggcaaaaatctggaagacttttggaagcacactctgatcaactcttctctgccgacagtcattttgctgaatttcagccaaaaatattatgcattttgatgctttattcaaggctatacctcaaactttttcttctcagaatccaggatttcacaggatacttgtatatatggaaaacaagcaagtttatatttttggacagggaaatgtgtgtaagaaagtatattaacaaatcaatgcctccgtcaagcaaacaatcatatgtatactttttttctacgttatctcatctccttgttttcagtgtgcttcaataatgcaggttaatattaaagatggaaattaagcaattatttatgaatttgtgcaatgttagattttcttatcaatcaagttcttgaatttgattctaagttgcatattataacagtctcgaaaattattttacttgcccaacaaatattacttttttcctttcaagataattttataaatcatttgacctacctaattgctaaatgaataacatatggtggactgttattaagagtatttgttttaagtcattcaggaaaatctaaacttttttttccactaaggtatttactttaaggtagcttgaaatagcaatacaatttaaaaattaaaaactgaattttgtatctattttaagtaatatatgtaagacttgaaaataaatgttttatttcttatataaagtgttaaattaattgataccagatttcactggaacagtttcaactgataatttatgacaaaagaacatacctgtaatattgaaattaaaaagtgaaatttgtcataaagaatttcttttatttttgaaatcgagtttgtaaatgtccttttaagaagggagatatgaatccaataaataaactcaagtcttggctacctgga

SEQ ID NO: 1103 - DNA, 7286 bp, Homo sapiens
  source 1..7286: mol_type = genomic DNA
gtactctcagcttgttggtggaagcccctcatctgccttcattctgaaggcagggcccggcagaggaaggatcagagggtcgcggccggagggtcccggccggtggggccaactcagagggagaggaaagggctagagacacgaagaacgcaaaccatcaaatttagaagaaaaagccctttgactttttccccctctccctccccaatggctgtgtagcaaacatccctggcgataccttggaaaggacgaagttggtctgcagtcgcaatttcgtgggttgagttcacagttgtgagtgcggggctcggagatggagccgtggtcctctaggtggaaaacgaaacggtggctctgggatttcaccgtaacaaccctcgcattgaccttcctcttccaagctagagaggtcagaggagctgctccagttgatgtactaaaagcactagattttcacaattctccagagggaatatcaaaaacaacgggattttgcacaaacagaaagaattctaaaggctcagatactgcttacagagtttcaaagcaagcacaactcagtgccccaacaaaacagttatttccaggtggaactttcccagaagacttttcaatactatttacagtaaaaccaaaaaaaggaattcagtctttccttttatctatatataatgagcatggtattcagcaaattggtgttgaggttgggagatcacctgtttttctgtttgaagaccacactggaaaacctgccccagaagactatcccctcttcagaactgttaacatcgctgacgggaagtggcatcgggtagcaatcagcgtggagaagaaaactgtgacaatgattgttgattgtaagaagaaaaccacgaaaccacttgatagaagtgagagagcaattgttgataccaatggaatcacggtttttggaacaaggattttggatgaagaagtttttgagggggacattcagcagtttttgatcacaggtgatcccaaggcagcatatgactactgtgagcattatagtccagactgtgactcttcagcacccaaggctgctcaagctcaggaacctcagatagatgagtatgcaccagaggatataatcgaatatgactatgagtatggggaagcagagtataaagaggctgaaagtgtaacagagggacccactgtaactgaggagacaatagcacagacggaggcaaacatcgttgatgattttcaagaatacaactatggaacaatggaaagttaccagacagaagctcctaggcatgtttctgggacaaatgagccaaatccagttgaagaaatatttactgaagaatatctaacgggagaggattatgattcccagaggaaaaattctgaggatacactatatgaaaacaaagaaatagacggcagggattctgatcttctggtagatggagatttaggcgaatatgatttttatgaatataaagaatatgaagataaaccaacaagcccccctaatgaagaatttggtccaggtgtaccagcagaaactgatattacagaaacaagcataaatggccatggtgcatatggagagaaaggacagaaaggagaaccagcagtggttgagcctggtatgcttgtcgaaggaccaccaggaccagcaggacctgcaggtattatgggtcctccaggtctacaaggccccactggaccccctggtgaccctggcgataggggccccccaggacgtcctggcttaccaggggctgatggtctacctggtcctcctggtactatgttgatgttaccgttccgttatggtggtgatggttccaaaggaccaaccatctctgctcaggaagctcaggctcaagctattcttcagcaggctcggattgctctgagaggcccacctggcccaatgggtctaactggaagaccaggtcctgtgggggggcctggttcatctggggccaaaggtgagagtggtgatccaggtcctcagggccctcgaggcgtccagggtccccctggtccaacgggaaaacctggaaaaaggggtcgtccaggtgcagatggaggaagaggaatgccaggagaacctggggcaaagggagatcgagggtttgatggacttccgggtctgccaggtgacaaaggtcacaggggtgaacgaggtcctcaaggtcctccaggtcctcctggtgatgatggaatgaggggagaagatggagaaattggaccaagaggtcttccaggtgaagctggcccacgaggtttgctgggtccaaggggaactccaggagctccagggcagcctggtatggcaggtgtagatggccccccaggaccaaaagggaacatgggtccccaaggggagcctgggcctccaggtcaacaagggaatccaggacctcagggtcttcctggtccacaaggtccaattggtcctcctggtgaaaaaggaccacaaggaaaaccaggacttgctggacttcctggtgctgatgggcctcctggtcatcctgggaaagaaggccagtctggagaaaagggggctctgggtccccctggtccacaaggtcctattggatacccgggcccccggggagtaaagggagcagatggtgtcagaggtctcaagggatctaaaggtgaaaagggtgaagatggttttccaggattcaaaggtgacatgggtctaaaaggtgacagaggagaagttggtcaaattggcccaagaggggaagatggccctgaaggacccaaaggtcgagcaggcccaactggagacccaggtccttcaggtcaagcaggagaaaagggaaaacttggagttccaggattaccaggatatccaggaagacaaggtccaaagggttccactggattccctgggtttccaggtgccaatggagagaaaggtgcacggggagtagctggcaaaccaggccctcggggtcagcgtggtccaacgggtcctcgaggttcaagaggtgcaagaggtcccactgggaaacctgggccaaagggcacttcaggtggcgatggccctcctggccctccaggtgaaagaggtcctcaaggacctcagggtccagttggattccctggaccaaaaggccctcctggaccacctgggaaggatgggctgccaggacaccctgggcaacgtggggagactggatttcaaggcaagaccggccctcctgggccagggggagtggttggaccacagggaccaaccggtgagactggtccaataggggaacgtgggcatcctggccctcctggccctcctggtgagcaaggtcttcctggtgctgcaggaaaagaaggtgcaaagggtgatccaggtcctcaaggtatctcagggaaagatggaccagcaggattacgtggtttcccaggggaaagaggtcttcctggagctcagggtgcacctggactgaaaggaggggaaggtccccagggcccaccaggtccagttggctcaccaggagaacgtgggtcagcaggtacagctggcccaattggtttaccagggcgcccgggacctcagggtcctcctggtccagctggagagaaaggtgctcctggagaaaaaggtccccaagggcctgcagggagagatggagttcaaggtcctgttggtctcccagggccagctggtcctgccggctcccctggggaagacggagacaagggtgaaattggtgagccgggacaaaaaggcagcaagggtgacaagggagaaaatggccctcccggtcccccaggtcttcaaggaccagttggtgcccctggaattgctggaggtgatggtgaaccaggtcctagaggacagcaggggatgtttgggcaaaaaggtgatgagggtgccagaggcttccctggacctcctggtccaataggtcttcagggtctgccaggcccacctggtgaaaaaggtgaaaatggggatgttggtcccatggggccacctggtcctccaggcccaagaggccctcaaggtcccaatggagctgatggaccacaaggacccccagggtctgttggttcagttggtggtgttggagaaaagggtgaacctggagaagcagggaacccagggcctcctggggaagcaggtgtaggcggtcccaaaggagaaagaggagagaaaggggaagctggtccacctggagctgctggacctccaggtgccaaggggccaccaggtgatgatggccctaagggtaacccgggtcctgttggttttcctggagatcctggtcctcctggggaacctggccctgcaggtcaagatggtgttggtggtgacaagggtgaagatggagatcctggtcaaccgggtcctcctggcccatctggtgaggctggcccaccaggtcctcctggaaaacgaggtcctcctggagctgcaggtgcagagggaagacaaggtgaaaaaggtgctaagggggaagcaggtgcagaaggtcctcctggaaaaaccggcccagtcggtcctcagggacctgcaggaaagcctggtccagaaggtcttcggggcatccctggtcctgtgggagaacaaggtctccctggagctgcaggccaagatggaccacctggtcctatgggacctcctggcttacctggtctcaaaggtgaccctggctccaagggtgaaaagggacatcctggtttaattggcctgattggtcctccaggagaacaaggggaaaaaggtgaccgagggctccctggaactcaaggatctccaggagcaaaaggggatgggggaattcctggtcctgctggtcccttaggtccacctggtcctccaggtttaccaggtcctcaaggcccaaagggtaacaaaggctctactggacccgctggccagaaaggtgacagtggtcttccagggcctcctgggtctccaggtccacctggtgaagtcattcagcctttaccaatcttgtcctccaaaaaaacgagaagacatactgaaggcatgcaagcagatgcagatgataatattcttgattactcggatggaatggaagaaatatttggttccctcaattccctgaaacaagacattgagcatatgaaatttccaatgggtactcagaccaatccagcccgaacttgtaaagacctgcaactcagccatcctgacttcccagatggtgaatattggattgatcctaaccaaggttgctcaggagattccttcaaagtttactgtaatttcacatctggtggtgagacttgcatttatccagacaaaaaatctgagggagtaagaatttcatcatggccaaaggagaaaccaggaagttggtttagtgaatttaagaggggaaaactgctttcatacttagatgttgaaggaaattccatcaatatggtgcaaatgacattcctgaaacttctgactgcctctgctcggcaaaatttcacctaccactgtcatcagtcagcagcctggtatgatgtgtcatcaggaagttatgacaaagcacttcgcttcctgggatcaaatgatgaggagatgtcctatgacaataatccttttatcaaaacactgtatgatggttgtgcgtccagaaaaggctatgaaaagactgtcattgaaatcaatacaccaaaaattgatcaagtacctattgttgatgtcatgatcaatgactttggtgatcagaatcagaagttcggatttgaagttggtcctgtttgttttcttggctaagattaagacaaagaacatatcaaatcaacagaaaatataccttggtgccaccaacccattttgtgccacatgcaagttttgaataaggatggtatagaaaacaacgctgcatatacaggtaccatttaggaaataccgatgcctttgtgggggcagaatcacatggcaaaagctttgaaaatcataaagatataagttggtgtggctaagatggaaacagggctgattcttgattcccaattctcaactctccttttcctatttgaatttctttggtgctgtagaaaacaaaaaaagaaaaatatatattcataaaaaatatggtgctcattctcatccatccaggatgtactaaaacagtgtgtttaataaattgtaattattttgtgtacagttctatactgttatctgtgtccatttccaaaacttgcacgtgtccctgaattccatctgactctaattttatgagaattgcagaactctgatggcaataaatatatgtattatgaaaaaataaagttgtaatttctgatgactctaagtccctttctttggttaataataaaatgcctttgtatatattgatgttgaagagttcaattatttgatgtcgccaacaaaattctcagagggcaaaaatctggaagacttttggaagcacactctgatcaactcttctctgccgacagtcattttgctgaatttcagccaaaaatattatgcattttgatgctttattcaaggctatacctcaaactttttcttctcagaatccaggatttcacaggatacttgtatatatggaaaacaagcaagtttatatttttggacagggaaatgtgtgtaagaaagtatattaacaaatcaatgcctccgtcaagcaaacaatcatatgtatactttttttctacgttatctcatctccttgttttcagtgtgcttcaataatgcaggttaatattaaagatggaaattaagcaattatttatgaatttgtgcaatgttagattttcttatcaatcaagttcttgaatttgattctaagttgcatattataacagtctcgaaaattattttacttgcccaacaaatattacttttttcctttcaagataattttataaatcatttgacctacctaattgctaaatgaataacatatggtggactgttattaagagtatttgttttaagtcattcaggaaaatctaaacttttttttccactaaggtatttactttaaggtagcttgaaatagcaatacaatttaaaaattaaaaactgaattttgtatctattttaagtaatatatgtaagacttgaaaataaatgttttatttcttatataaagtgttaaattaattgataccagatttcactggaacagtttcaactgataatttatgacaaaagaacatacctgtaatattgaaattaaaaagtgaaatttgtcataaagaatttcttttatttttgaaatcgagtttgtaaatgtccttttaagaagggagatatgaatccaataaataaactcaagtcttggctacctgga

SEQ ID NO: 1104 - DNA, 5442 bp, Homo sapiens
  source 1..5442: mol_type = genomic DNA
tgttggtggaagcccctcatctgccttcattctgaaggcagggcccggcagaggaaggatcagagggtcgcggccggagggtcccggccggtggggccaactcagagggagaggaaagggctagagacacgaagaacgcaaaccatcaaatttagaagaaaaagccctttgactttttccccctctccctccccaatggctgtgtagcaaacatccctggcgataccttggaaaggacgaagttggtctgcagtcgcaatttcgtgggttgagttcacagttgtgagtgcggggctcggagatggagccgtggtcctctaggtggaaaacgaaacggtggctctgggatttcaccgtaacaaccctcgcattgaccttcctcttccaagctagagaggtcagaggagctgctccagttgatgtactaaaagcactagattttcacaattctccagagggaatatcaaaaacaacgggattttgcacaaacagaaagaattctaaaggctcagatactgcttacagagtttcaaagcaagcacaactcagtgccccaacaaaacagttatttccaggtggaactttcccagaagacttttcaatactatttacagtaaaaccaaaaaaaggaattcagtctttccttttatctatatataatgagcatggtattcagcaaattggtgttgaggttgggagatcacctgtttttctgtttgaagaccacactggaaaacctgccccagaagactatcccctcttcagaactgttaacatcgctgacgggaagtggcatcgggtagcaatcagcgtggagaagaaaactgtgacaatgattgttgattgtaagaagaaaaccacgaaaccacttgatagaagtgagagagcaattgttgataccaatggaatcacggtttttggaacaaggattttggatgaagaagtttttgagggggacattcagcagtttttgatcacaggtgatcccaaggcagcatatgactactgtgagcattatagtccagactgtgactcttcagcacccaaggctgctcaagctcaggaacctcagatagatgagtatgcaccagaggatataatcgaatatgactatgagtatggggaagcagagtataaagaggctgaaagtgtaacagagggacccactgtaactgaggagacaatagcacagacggagataaatggccatggtgcatatggagagaaaggacagaaaggagaaccagcagtggttgagcctggtatgcttgtcgaaggaccaccaggaccagcaggacctgcaggtattatgggtcctccaggtctacaaggccccactggaccccctggtgaccctggcgataggggccccccaggacgtcctggcttaccaggggctgatggtctacctggtcctcctggtactatgttgatgttaccgttccgttatggtggtgatggttccaaaggaccaaccatctctgctcaggaagctcaggctcaagctattcttcagcaggctcggattgctctgagaggcccacctggcccaatgggtctaactggaagaccaggtcctgtgggggggcctggttcatctggggccaaaggtgagagtggtgatccaggtcctcagggccctcgaggcgtccagggtccccctggtccaacgggaaaacctggaaaaaggggtcgtccaggtgcagatggaggaagaggaatgccaggagaacctggggcaaagggagatcgagggtttgatggacttccgggtctgccaggtgacaaaggtcacaggggtgaacgaggtcctcaaggtcctccaggtcctcctggtgatgatggaatgaggggagaagatggagaaattggaccaagaggtcttccaggtgaagctggcccacgaggtttgctgggtccaaggggaactccaggagctccagggcagcctggtatggcaggtgtagatggccccccaggaccaaaagggaacatgggtccccaaggggagcctgggcctccaggtcaacaagggaatccaggacctcagggtcttcctggtccacaaggtccaattggtcctcctggtgaaaaaggaccacaaggaaaaccaggacttgctggacttcctggtgctgatgggcctcctggtcatcctgggaaagaaggccagtctggagaaaagggggctctgggtccccctggtccacaaggtcctattggatacccgggcccccggggagtaaagggagcagatggtgtcagaggtctcaagggatctaaaggtgaaaagggtgaagatggttttccaggattcaaaggtgacatgggtctaaaaggtgacagaggagaagttggtcaaattggcccaagaggggaagatggccctgaaggacccaaaggtcgagcaggcccaactggagacccaggtccttcaggtcaagcaggagaaaagggaaaacttggagttccaggattaccaggatatccaggaagacaaggtccaaagggttccactggattccctgggtttccaggtgccaatggagagaaaggtgcacggggagtagctggcaaaccaggccctcggggtcagcgtggtccaacgggtcctcgaggttcaagaggtgcaagaggtcccactgggaaacctgggccaaagggcacttcaggtggcgatggccctcctggccctccaggtgaaagaggtcctcaaggacctcagggtccagttggattccctggaccaaaaggccctcctggaccacctgggaaggatgggctgccaggacaccctgggcaacgtggggagactggatttcaaggcaagaccggccctcctgggccagggggagtggttggaccacagggaccaaccggtgagactggtccaataggggaacgtgggcatcctggccctcctggccctcctggtgagcaaggtcttcctggtgctgcaggaaaagaaggtgcaaagggtgatccaggtcctcaaggtatctcagggaaagatggaccagcaggattacgtggtttcccaggggaaagaggtcttcctggagctcagggtgcacctggactgaaaggaggggaaggtccccagggcccaccaggtccagttggctcaccaggagaacgtgggtcagcaggtacagctggcccaattggtttaccagggcgcccgggacctcagggtcctcctggtccagctggagagaaaggtgctcctggagaaaaaggtccccaagggcctgcagggagagatggagttcaaggtcctgttggtctcccagggccagctggtcctgccggctcccctggggaagacggagacaagggtgaaattggtgagccgggacaaaaaggcagcaagggtgacaagggagaaaatggccctcccggtcccccaggtcttcaaggaccagttggtgcccctggaattgctggaggtgatggtgaaccaggtcctagaggacagcaggggatgtttgggcaaaaaggtgatgagggtgccagaggcttccctggacctcctggtccaataggtcttcagggtctgccaggcccacctggtgaaaaaggtgaaaatggggatgttggtcccatggggccacctggtcctccaggcccaagaggccctcaaggtcccaatggagctgatggaccacaaggacccccagggtctgttggttcagttggtggtgttggagaaaagggtgaacctggagaagcagggaacccagggcctcctggggaagcaggtgtaggcggtcccaaaggagaaagaggagagaaaggggaagctggtccacctggagctgctggacctccaggtgccaaggggccaccaggtgatgatggccctaagggtaacccgggtcctgttggttttcctggagatcctggtcctcctggggaacctggccctgcaggtcaagatggtgttggtggtgacaagggtgaagatggagatcctggtcaaccgggtcctcctggcccatctggtgaggctggcccaccaggtcctcctggaaaacgaggtcctcctggagctgcaggtgcagagggaagacaaggtgaaaaaggtgctaagggggaagcaggtgcagaaggtcctcctggaaaaaccggcccagtcggtcctcagggacctgcaggaaagcctggtccagaaggtcttcggggcatccctggtcctgtgggagaacaaggtctccctggagctgcaggccaagatggaccacctggtcctatgggacctcctggcttacctggtctcaaaggtgaccctggctccaagggtgaaaagggacatcctggtttaattggcctgattggtcctccaggagaacaaggggaaaaaggtgaccgagggctccctggaactcaaggatctccaggagcaaaaggggatgggggaattcctggtcctgctggtcccttaggtccacctggtcctccaggtttaccaggtcctcaaggcccaaagggtaacaaaggctctactggacccgctggccagaaaggtgacagtggtcttccagggcctcctgggtctccaggtccacctggtgaagtcattcagcctttaccaatcttgtcctccaaaaaaacgagaagacatactgaaggcatgcaagcagatgcagatgataatattcttgattactcggatggaatggaagaaatatttggttccctcaattccctgaaacaagacattgagcatatgaaatttccaatgggtactcagaccaatccagcccgaacttgtaaagacctgcaactcagccatcctgacttcccagatggtgaatattggattgatcctaaccaaggttgctcaggagattccttcaaagtttactgtaatttcacatctggtggtgagacttgcatttatccagacaaaaaatctgagggagtaagaatttcatcatggccaaaggagaaaccaggaagttggtttagtgaatttaagaggggaaaactgctttcatacttagatgttgaaggaaattccatcaatatggtgcaaatgacattcctgaaacttctgactgcctctgctcggcaaaatttcacctaccactgtcatcagtcagcagcctggtatgatgtgtcatcaggaagttatgacaaagcacttcgcttcctgggatcaaatgatgaggagatgtcctatgacaataatccttttatcaaaacactgtatgatggttgtgcgtccagaaaaggctatgaaaagactgtcattgaaatcaatacaccaaaaattgatcaagtacctattgttgatgtcatgatcaatgactttggtgatcagaatcagaagttcggatttgaagttggtcctgtttgttttcttggctaagattaagacaaagaacatatcaaatcaacagaaaatataccttggtgccaccaacccattttgtgcca

SEQ ID NO: 1105 - DNA, 5924 bp, Homo sapiens
  source 1..5924: mol_type = genomic DNA
agaggccctcccgccgcccgcagctccagccgcactgccccgatggctccctacccctgtggctgccacatcctgctgctgctcttctgctgcctggcggctgcccgggccaacctgctgaacctgaactggctttggttcaataatgaggacaccagccatgcagctaccacgatccctgagccccaggggcccctgcctgtgcagcccacagcagataccaccacacacgtgaccccccggaatggttccacagagccagcgacagcccctggcagccctgagccaccctcagagctgctggaagatggccaggacacccccacttctgccgagagcccggacgcgccagaggagaacattgccggtgtcggagccgagatcctgaacgtggccaaaggcatccggagcttcgtccagctgtggaatgacactgtccccactgagagcttggccagggcggaaaccctggtcctggagactcctgtgggcccccttgccctcgctgggccttccagcaccccccaggagaatgggaccactctctggcccagccgtggcattcctagctctccgggcgcccacacaaccgaggctggcaccttgcctgcacccaccccatcgcctccctccctgggcaggccctgggcaccactcacggggccctcagtgccaccaccatcttcagagcgcatcagcgaggaggtggggctgctgcagctccttggggaccccccgccccagcaggtcacccagacggatgaccccgacgtcgggctggcctacgtctttgggccagatgccaacagtggccaagtggcccggtaccacttccccagcctcttcttccgtgacttctcactgctgttccacatccggccagccacagagggcccaggggtgctgttcgccatcacggactcggcgcaggccatggtcttgctgggcgtgaagctctctggggtgcaggacgggcaccaggacatctccctgctctacacagaaccaggtgcaggccagacccacacagccgccagcttccggctccccgccttcgtcggccagtggacacacttagccctcagtgtggcaggtggctttgtggccctctacgtggactgtgaggagttccagagaatgccgcttgctcggtcctcacggggcctggagctggagcctggcgccgggctcttcgtggctcaggcggggggagcggaccctgacaagttccagggggtgatcgctgagctgaaggtgcgcagggacccccaggtgagccccatgcactgcctggacgaggaaggcgatgactcagatggggcatccggagactctggcagcgggctcggggacgcccgggagcttctcagggaggagacgggcgcggccctaaaacccaggctccccgcgccaccccccgtcaccacgccacccttggctggaggcagcagcacggaagattccagaagtgaagaagtcgaggagcagaccacggtggcttcgttaggagctcagacacttcctggctcagattctgtctccacgtgggacgggagtgtccggacccctgggggccgcgtgaaagagggcggcctgaaggggcagaaaggggagccaggtgttccgggcccacctggccgggcaggccccccaggatccccatgcctacctggtcccccgggtctcccgtgcccagtgagtcccctgggtcctgcaggcccagcgttgcaaactgtccccggaccacaaggacccccagggcctccggggagggacggcacccctggaagggacggcgagccgggcgaccccggtgaagacggaaagccgggcgacaccgggccacaaggcttccccgggactccaggggacgtaggtcccaagggcgacaagggagaccctggggttggagagagagggcccccaggaccccaagggcctccagggcccccaggaccctccttcagacacgacaagctgaccttcattgacatggagggatctggcttcgggggcgatctggaggccctgcggggtcctcgaggcttccctggacctcccggaccccccggtgtcccaggcctgcccggcgagccaggccgctttggggtgaacagctccgacgtcccaggacccgccggccttcctggtgtgcctgggcgcgagggtccccccgggtttcctggcctcccgggacccccaggccctccgggaagagaggggcccccaggaaggactgggcagaaaggcagcctgggtgaagcaggcgccccaggacataaggggagcaagggagcccccggtcctgctggtgctcgtggggagagcggcctggcaggagcccccggacctgctggaccaccaggcccccctgggccccctgggcccccaggaccaggactccccgctggatttgatgacatggaaggctccggggggcccttctggtcaacagcccgaagcgctgatgggccacagggacctcccggcctgccgggacttaagggggatcctggcgtgcctgggctgccgggggcgaagggagaagttggagcagatggagtccccgggttccccggcctccctggcagagagggcattgctgggccccaggggccaaagggagacagaggcagccggggagaaaagggagatccagggaaggacggagtcgggcagccgggcctccctggcccccccggacccccgggacctgtggtctacgtgtcggagcaggacggatccgtcctgagcgtgccgggacctgagggccggccgggtttcgcaggctttcccggacctgcaggacccaagggcaacctgggctctaagggcgaacgaggctccccgggacccaagggtgagaagggtgaaccgggcagcatcttcagccccgacggcggtgccctgggccctgcccagaaaggagccaagggagagccgggcttccgaggacccccgggtccatacggacggccggggtacaagggagagattggctttcctggacggccgggtcgccccgggatgaacggattgaaaggagagaaaggggagccgggagatgccagccttggatttggcatgaggggaatgcccggccccccaggacctccagggcccccaggccctccagggactcctgtttacgacagcaatgtgtttgctgagtccagccgccccgggcctccaggattgccagggaatcagggccctccaggacccaagggcgccaaaggagaagtgggcccccccggaccaccagggcagtttccgtttgactttcttcagttggaggctgaaatgaagggggagaagggagaccgaggtgatgcaggacagaaaggcgaaaggggggagcccgggggcggcggtttcttcggctccagcctgcccggcccccccggccccccaggccccccaggcccacgtggctaccctgggattccaggtcccaagggagagagcatccggggccagcccggcccacctggacctcagggaccccccggcatcggctacgaggggcgccagggccctcccggccccccaggccccccagggcccccttcatttcctggccctcacaggcagactatcagcgttcccggccctccgggcccccctgggccccctgggccccctggaaccatgggcgcctcctcaggggtgaggctctgggctacacgccaggccatgctgggccaggtgcacgaggttcccgagggctggctcatcttcgtggccgagcaggaggagctctacgtccgcgtgcagaacgggttccggaaggtccagctggaggcccggacaccactcccacgagggacggacaatgaagtggccgccttgcagccccccgtggtgcagctgcacgacagcaacccctacccgcggcgggagcacccccaccccaccgcgcggccctggcgggcagatgacatcctggccagcccccctcgcctgcccgagccccagccctaccccggagccccgcaccacagctcctacgtgcacctgcggccggcgcgacccacaagcccacccgcccacagccaccgcgacttccagccggtgctccacctggttgcgctcaacagccccctgtcaggcggcatgcggggcatccgcggggccgacttccagtgcttccagcaggcgcgggccgtggggctggcgggcaccttccgcgccttcctgtcctcgcgcctgcaggacctgtacagcatcgtgcgccgtgccgaccgcgcagccgtgcccatcgtcaacctcaaggacgagctgctgtttcccagctgggaggctctgttctcaggctctgagggtccgctgaagcccggggcacgcatcttctcctttgacggcaaggacgtcctgaggcaccccacctggccccagaagagcgtgtggcatggctcggaccccaacgggcgcaggctgaccgagagctactgtgagacgtggcggacggaggctccctcggccacgggccaggcctcctcgctgctggggggcaggctcctggggcagagtgccgcgagctgccatcacgcctacatcgtgctctgcattgagaacagcttcatgactgcctccaagtagccaccgcctggatgcggatggccggagaggaccggcggctcggaggaagcccccaccgtgggcagggagcggccggccagcccctggccccaggacctggctgccatactttcctgtatagttcacgtttcatgtaatcctcaagaaataaaaggaagccaaagagtgtatttttttaaaagtttaaaacagaagcctgatgctgacattcacctgccccaactctcccctgacctgtgagcccagctgggtcaggcagggtgcagtatcatgccctgtgcaacctcttggcctgatcagaccacggctcgatttctccaggatttcctgctttgggaagccgtgctcgccccagcaggtgctgacttcatctcccacctagcagcaccgttctgtgcacaaaacccagacctgttagcagacaggccccgtgaggcaatgggagctgaggccacactcagcacaaggccatctgggctcctccagggtgtgtgctcgccctgcggtagatgggagggaggctcaggtccctggggctagggggagccccttctgctcagctctgggccattctccacagcaaccccaggctgaagcaggttcccaagctcagaggcgcactgtgacccccagctccggcctgtcctccaacaccaagcacagcagcctggggctggcctcccaaatgagccatgagatgatacatccaaagcagacagctccaccctggccgagtccaagctgggagattcaagggacccatgagttggggtctggcagcctcccatccagggcccccatctcatgcccctggctgggacgtggctcagccagcacttgtccagctgagcgccaggatggaacacggccacatcaaagaggctgaggctggcacaggacatgcggtagccagcacacagggcagtgagggagggctgtcatctgtgcactgcccatggacaggctggctccagatgcagggcagtcattggctgtctcctaggaaacccatatccttaccctccttgggactgaaggggaaccccggggtgcccacaggccgccctgcgggtgaacaaagcagccacgaggtgcaacaaggtcctctgtcagtcacagccacccctgagatccggcaacatcaacccgagtcattcgttctgtggagggacaagtggactcagggcagcgccaggctgaccacagcacagccaacacgcacctgcctcaggactgcgacgaaaccggtggggctggttctgtaattgtgtgtgatgtgaagccaattcagacaggcaaataaaagtgaccttttacactga

SEQ ID NO: 1106 - DNA, 6607 bp, Homo sapiens
  source 1..6607: mol_type = genomic DNA
agctccagccgcactgccccgatggctccctacccctgtggctgccacatcctgctgctgctcttctgctgcctggcggctgcccgggccaacctgctgaacctgaactggctttggttcaataatgaggacaccagccatgcagctaccacgatccctgagccccaggggcccctgcctgtgcagcccacagcagataccaccacacacgtgaccccccggaatggttccacagagccagcgacagcccctggcagccctgagccaccctcagagctgctggaagatggccaggacacccccacttctgccgagagcccggacgcgccagaggagaacattgccggtgtcggagccgagatcctgaacgtggccaaaggcatccggagcttcgtccagctgtggaatgacactgtccccactgagagcttggccagggcggaaaccctggtcctggagactcctgtgggcccccttgccctcgctgggccttccagcaccccccaggagaatgggaccactctctggcccagccgtggcattcctagctctccgggcgcccacacaaccgaggctggcaccttgcctgcacccaccccatcgcctccctccctgggcaggccctgggcaccactcacggggccctcagtgccaccaccatcttcaggtagagcttctctctcctccttgctgggcggggcccctccctggggaagcctgcaggacccagacagccaaggactctcgcccgccgcagccgctcccagccagcagctccaacgccctgacgtccgcctgcgcacgccacttctgcaccccctggtgatgggctccctgggcaagcacgcggccccctccgccttctcctctgggctcccgggcgcactgtctcaggtcgcagtcaccactttaaccagggacagcggtgcttgggtctcccacgtggctaactctgtggggccgggtcttgctaataactctgccctgctcggggctgaccccgaggcccccgccggtcgctgcctgcccctgccaccctccctgccagtctgcggccacctgggcatctcacgcttctggctgcccaaccacctccaccacgagagcggcgagcaggtgcgggccggggcacgggcgtgggggggcctgctgcagacgcactgccaccccttcctcgcctggttcttctgcctgctgctggtccccccatgcggcagcgtcccgccgcccgccccgccaccctgctgccagttctgcgaggccctgcaggatgcgtgttggagccgcctgggcgggggccggctgcccgtcgcctgtgcctcgctcccgacccaggaggatgggtactgtgtgctcattgggccggctgcagagcgcatcagcgaggaggtggggctgctgcagctccttggggaccccccgccccagcaggtcacccagacggatgaccccgacgtcgggctggcctacgtctttgggccagatgccaacagtggccaagtggcccggtaccacttccccagcctcttcttccgtgacttctcactgctgttccacatccggccagccacagagggcccaggggtgctgttcgccatcacggactcggcgcaggccatggtcttgctgggcgtgaagctctctggggtgcaggacgggcaccaggacatctccctgctctacacagaaccaggtgcaggccagacccacacagccgccagcttccggctccccgccttcgtcggccagtggacacacttagccctcagtgtggcaggtggctttgtggccctctacgtggactgtgaggagttccagagaatgccgcttgctcggtcctcacggggcctggagctggagcctggcgccgggctcttcgtggctcaggcggggggagcggaccctgacaagttccagggggtgatcgctgagctgaaggtgcgcagggacccccaggtgagccccatgcactgcctggacgaggaaggcgatgactcagatggggcatccggagactctggcagcgggctcggggacgcccgggagcttctcagggaggagacgggcgcggccctaaaacccaggctccccgcgccaccccccgtcaccacgccacccttggctggaggcagcagcacggaagattccagaagtgaagaagtcgaggagcagaccacggtggcttcgttaggagctcagacacttcctggctcagattctgtctccacgtgggacgggagtgtccggacccctgggggccgcgtgaaagagggcggcctgaaggggcagaaaggggagccaggtgttccgggcccacctggccgggcaggccccccaggatccccatgcctacctggtcccccgggtctcccgtgcccagtgagtcccctgggtcctgcaggcccagcgttgcaaactgtccccggaccacaaggacccccagggcctccggggagggacggcacccctggaagggacggcgagccgggcgaccccggtgaagacggaaagccgggcgacaccgggccacaaggcttccccgggactccaggggacgtaggtcccaagggcgacaagggagaccctggggttggagagagagggcccccaggaccccaagggcctccagggcccccaggaccctccttcagacacgacaagctgaccttcattgacatggagggatctggcttcgggggcgatctggaggccctgcggggtcctcgaggcttccctggacctcccggaccccccggtgtcccaggcctgcccggcgagccaggccgctttggggtgaacagctccgacgtcccaggacccgccggccttcctggtgtgcctgggcgcgagggtccccccgggtttcctggcctcccgggacccccaggccctccgggaagagaggggcccccaggaaggactgggcagaaaggcagcctgggtgaagcaggcgccccaggacataaggggagcaagggagcccccggtcctgctggtgctcgtggggagagcggcctggcaggagcccccggacctgctggaccaccaggcccccctgggccccctgggcccccaggaccaggactccccgctggatttgatgacatggaaggctccggggggcccttctggtcaacagcccgaagcgctgatgggccacagggacctcccggcctgccgggacttaagggggatcctggcgtgcctgggctgccgggggcgaagggagaagttggagcagatggagtccccgggttccccggcctccctggcagagagggcattgctgggccccaggggccaaagggagacagaggcagccggggagaaaagggagatccagggaaggacggagtcgggcagccgggcctccctggcccccccggacccccgggacctgtggtctacgtgtcggagcaggacggatccgtcctgagcgtgccgggacctgagggccggccgggtttcgcaggctttcccggacctgcaggacccaagggcaacctgggctctaagggcgaacgaggctccccgggacccaagggtgagaagggtgaaccgggcagcatcttcagccccgacggcggtgccctgggccctgcccagaaaggagccaagggagagccgggcttccgaggacccccgggtccatacggacggccggggtacaagggagagattggctttcctggacggccgggtcgccccgggatgaacggattgaaaggagagaaaggggagccgggagatgccagccttggatttggcatgaggggaatgcccggccccccaggacctccagggcccccaggccctccagggactcctgtttacgacagcaatgtgtttgctgagtccagccgccccgggcctccaggattgccagggaatcagggccctccaggacccaagggcgccaaaggagaagtgggcccccccggaccaccagggcagtttccgtttgactttcttcagttggaggctgaaatgaagggggagaagggagaccgaggtgatgcaggacagaaaggcgaaaggggggagcccgggggcggcggtttcttcggctccagcctgcccggcccccccggccccccaggccccccaggcccacgtggctaccctgggattccaggtcccaagggagagagcatccggggccagcccggcccacctggacctcagggaccccccggcatcggctacgaggggcgccagggccctcccggccccccaggccccccagggcccccttcatttcctggccctcacaggcagactatcagcgttcccggccctccgggcccccctgggccccctgggccccctggaaccatgggcgcctcctcaggggtgaggctctgggctacacgccaggccatgctgggccaggtgcacgaggttcccgagggctggctcatcttcgtggccgagcaggaggagctctacgtccgcgtgcagaacgggttccggaaggtccagctggaggcccggacaccactcccacgagggacggacaatgaagtggccgccttgcagccccccgtggtgcagctgcacgacagcaacccctacccgcggcgggagcacccccaccccaccgcgcggccctggcgggcagatgacatcctggccagcccccctcgcctgcccgagccccagccctaccccggagccccgcaccacagctcctacgtgcacctgcggccggcgcgacccacaagcccacccgcccacagccaccgcgacttccagccggtgctccacctggttgcgctcaacagccccctgtcaggcggcatgcggggcatccgcggggccgacttccagtgcttccagcaggcgcgggccgtggggctggcgggcaccttccgcgccttcctgtcctcgcgcctgcaggacctgtacagcatcgtgcgccgtgccgaccgcgcagccgtgcccatcgtcaacctcaaggacgagctgctgtttcccagctgggaggctctgttctcaggctctgagggtccgctgaagcccggggcacgcatcttctcctttgacggcaaggacgtcctgaggcaccccacctggccccagaagagcgtgtggcatggctcggaccccaacgggcgcaggctgaccgagagctactgtgagacgtggcggacggaggctccctcggccacgggccaggcctcctcgctgctggggggcaggctcctggggcagagtgccgcgagctgccatcacgcctacatcgtgctctgcattgagaacagcttcatgactgcctccaagtagccaccgcctggatgcggatggccggagaggaccggcggctcggaggaagcccccaccgtgggcagggagcggccggccagcccctggccccaggacctggctgccatactttcctgtatagttcacgtttcatgtaatcctcaagaaataaaaggaagccaaagagtgtatttttttaaaagtttaaaacagaagcctgatgctgacattcacctgccccaactctcccctgacctgtgagcccagctgggtcaggcagggtgcagtatcatgccctgtgcaacctcttggcctgatcagaccacggctcgatttctccaggatttcctgctttgggaagccgtgctcgccccagcaggtgctgacttcatctcccacctagcagcaccgttctgtgcacaaaacccagacctgttagcagacaggccccgtgaggcaatgggagctgaggccacactcagcacaaggccatctgggctcctccagggtgtgtgctcgccctgcggtagatgggagggaggctcaggtccctggggctagggggagccccttctgctcagctctgggccattctccacagcaaccccaggctgaagcaggttcccaagctcagaggcgcactgtgacccccagctccggcctgtcctccaacaccaagcacagcagcctggggctggcctcccaaatgagccatgagatgatacatccaaagcagacagctccaccctggccgagtccaagctgggagattcaagggacccatgagttggggtctggcagcctcccatccagggcccccatctcatgcccctggctgggacgtggctcagccagcacttgtccagctgagcgccaggatggaacacggccacatcaaagaggctgaggctggcacaggacatgcggtagccagcacacagggcagtgagggagggctgtcatctgtgcactgcccatggacaggctggctccagatgcagggcagtcattggctgtctcctaggaaacccatatccttaccctccttgggactgaaggggaaccccggggtgcccacaggccgccctgcgggtgaacaaagcagccacgaggtgcaacaaggtcctctgtcagtcacagccacccctgagatccggcaacatcaacccgagtcattcgttctgtggagggacaagtggactcagggcagcgccaggctgaccacagcacagccaacacgcacctgcctcaggactgcgacgaaaccggtggggctggttctgtaattgtgtgtgatgtgaagccaattcagacaggcaaataaaagtgaccttttacactg

SEQ ID NO: 1107 - DNA, 5436 bp, Homo sapiens
  source 1..5436: mol_type = genomic DNA
ctcccagcggcggcggctgcagcgcggcggtccgagcgggtgcaccgcggcggaggaggcagcatcccgcggcgctgacggtcctggggagagcatggcgccgaggtgcccctggccatggccgcggcggcggcgcctcctggacgtgctcgcgcccctggtcctgctgctcggggtccgcgcggcctccgcggagccagagcgcatcagcgaggaggtggggctgctgcagctccttggggaccccccgccccagcaggtcacccagacggatgaccccgacgtcgggctggcctacgtctttgggccagatgccaacagtggccaagtggcccggtaccacttccccagcctcttcttccgtgacttctcactgctgttccacatccggccagccacagagggcccaggggtgctgttcgccatcacggactcggcgcaggccatggtcttgctgggcgtgaagctctctggggtgcaggacgggcaccaggacatctccctgctctacacagaaccaggtgcaggccagacccacacagccgccagcttccggctccccgccttcgtcggccagtggacacacttagccctcagtgtggcaggtggctttgtggccctctacgtggactgtgaggagttccagagaatgccgcttgctcggtcctcacggggcctggagctggagcctggcgccgggctcttcgtggctcaggcggggggagcggaccctgacaagttccagggggtgatcgctgagctgaaggtgcgcagggacccccaggtgagccccatgcactgcctggacgaggaaggcgatgactcagatggggcatccggagactctggcagcgggctcggggacgcccgggagcttctcagggaggagacgggcgcggccctaaaacccaggctccccgcgccaccccccgtcaccacgccacccttggctggaggcagcagcacggaagattccagaagtgaagaagtcgaggagcagaccacggtggcttcgttaggagctcagacacttcctggctcagattctgtctccacgtgggacgggagtgtccggacccctgggggccgcgtgaaagagggcggcctgaaggggcagaaaggggagccaggtgttccgggcccacctggccgggcaggccccccaggatccccatgcctacctggtcccccgggtctcccgtgcccagtgagtcccctgggtcctgcaggcccagcgttgcaaactgtccccggaccacaaggacccccagggcctccggggagggacggcacccctggaagggacggcgagccgggcgaccccggtgaagacggaaagccgggcgacaccgggccacaaggcttccccgggactccaggggacgtaggtcccaagggcgacaagggagaccctggggttggagagagagggcccccaggaccccaagggcctccagggcccccaggaccctccttcagacacgacaagctgaccttcattgacatggagggatctggcttcgggggcgatctggaggccctgcggggtcctcgaggcttccctggacctcccggaccccccggtgtcccaggcctgcccggcgagccaggccgctttggggtgaacagctccgacgtcccaggacccgccggccttcctggtgtgcctgggcgcgagggtccccccgggtttcctggcctcccgggacccccaggccctccgggaagagaggggcccccaggaaggactgggcagaaaggcagcctgggtgaagcaggcgccccaggacataaggggagcaagggagcccccggtcctgctggtgctcgtggggagagcggcctggcaggagcccccggacctgctggaccaccaggcccccctgggccccctgggcccccaggaccaggactccccgctggatttgatgacatggaaggctccggggggcccttctggtcaacagcccgaagcgctgatgggccacagggacctcccggcctgccgggacttaagggggatcctggcgtgcctgggctgccgggggcgaagggagaagttggagcagatggagtccccgggttccccggcctccctggcagagagggcattgctgggccccaggggccaaagggagacagaggcagccggggagaaaagggagatccagggaaggacggagtcgggcagccgggcctccctggcccccccggacccccgggacctgtggtctacgtgtcggagcaggacggatccgtcctgagcgtgccgggacctgagggccggccgggtttcgcaggctttcccggacctgcaggacccaagggcaacctgggctctaagggcgaacgaggctccccgggacccaagggtgagaagggtgaaccgggcagcatcttcagccccgacggcggtgccctgggccctgcccagaaaggagccaagggagagccgggcttccgaggacccccgggtccatacggacggccggggtacaagggagagattggctttcctggacggccgggtcgccccgggatgaacggattgaaaggagagaaaggggagccgggagatgccagccttggatttggcatgaggggaatgcccggccccccaggacctccagggcccccaggccctccagggactcctgtttacgacagcaatgtgtttgctgagtccagccgccccgggcctccaggattgccagggaatcagggccctccaggacccaagggcgccaaaggagaagtgggcccccccggaccaccagggcagtttccgtttgactttcttcagttggaggctgaaatgaagggggagaagggagaccgaggtgatgcaggacagaaaggcgaaaggggggagcccgggggcggcggtttcttcggctccagcctgcccggcccccccggccccccaggccccccaggcccacgtggctaccctgggattccaggtcccaagggagagagcatccggggccagcccggcccacctggacctcagggaccccccggcatcggctacgaggggcgccagggccctcccggccccccaggccccccagggcccccttcatttcctggccctcacaggcagactatcagcgttcccggccctccgggcccccctgggccccctgggccccctggaaccatgggcgcctcctcaggggtgaggctctgggctacacgccaggccatgctgggccaggtgcacgaggttcccgagggctggctcatcttcgtggccgagcaggaggagctctacgtccgcgtgcagaacgggttccggaaggtccagctggaggcccggacaccactcccacgagggacggacaatgaagtggccgccttgcagccccccgtggtgcagctgcacgacagcaacccctacccgcggcgggagcacccccaccccaccgcgcggccctggcgggcagatgacatcctggccagcccccctcgcctgcccgagccccagccctaccccggagccccgcaccacagctcctacgtgcacctgcggccggcgcgacccacaagcccacccgcccacagccaccgcgacttccagccggtgctccacctggttgcgctcaacagccccctgtcaggcggcatgcggggcatccgcggggccgacttccagtgcttccagcaggcgcgggccgtggggctggcgggcaccttccgcgccttcctgtcctcgcgcctgcaggacctgtacagcatcgtgcgccgtgccgaccgcgcagccgtgcccatcgtcaacctcaaggacgagctgctgtttcccagctgggaggctctgttctcaggctctgagggtccgctgaagcccggggcacgcatcttctcctttgacggcaaggacgtcctgaggcaccccacctggccccagaagagcgtgtggcatggctcggaccccaacgggcgcaggctgaccgagagctactgtgagacgtggcggacggaggctccctcggccacgggccaggcctcctcgctgctggggggcaggctcctggggcagagtgccgcgagctgccatcacgcctacatcgtgctctgcattgagaacagcttcatgactgcctccaagtagccaccgcctggatgcggatggccggagaggaccggcggctcggaggaagcccccaccgtgggcagggagcggccggccagcccctggccccaggacctggctgccatactttcctgtatagttcacgtttcatgtaatcctcaagaaataaaaggaagccaaagagtgtatttttttaaaagtttaaaacagaagcctgatgctgacattcacctgccccaactctcccctgacctgtgagcccagctgggtcaggcagggtgcagtatcatgccctgtgcaacctcttggcctgatcagaccacggctcgatttctccaggatttcctgctttgggaagccgtgctcgccccagcaggtgctgacttcatctcccacctagcagcaccgttctgtgcacaaaacccagacctgttagcagacaggccccgtgaggcaatgggagctgaggccacactcagcacaaggccatctgggctcctccagggtgtgtgctcgccctgcggtagatgggagggaggctcaggtccctggggctagggggagccccttctgctcagctctgggccattctccacagcaaccccaggctgaagcaggttcccaagctcagaggcgcactgtgacccccagctccggcctgtcctccaacaccaagcacagcagcctggggctggcctcccaaatgagccatgagatgatacatccaaagcagacagctccaccctggccgagtccaagctgggagattcaagggacccatgagttggggtctggcagcctcccatccagggcccccatctcatgcccctggctgggacgtggctcagccagcacttgtccagctgagcgccaggatggaacacggccacatcaaagaggctgaggctggcacaggacatgcggtagccagcacacagggcagtgagggagggctgtcatctgtgcactgcccatggacaggctggctccagatgcagggcagtcattggctgtctcctaggaaacccatatccttaccctccttgggactgaaggggaaccccggggtgcccacaggccgccctgcgggtgaacaaagcagccacgaggtgcaacaaggtcctctgtcagtcacagccacccctgagatccggcaacatcaacccgagtcattcgttctgtggagggacaagtggactcagggcagcgccaggctgaccacagcacagccaacacgcacctgcctcaggactgcgacgaaaccggtggggctggttctgtaattgtgtgtgatgtgaagccaattcagacaggcaaataaaagtgaccttttacactga

SEQ ID NO: 1108 - DNA, 5399 bp, Homo sapiens
  source 1..5399: mol_type = genomic DNA
cgggtgcaccgcggcggaggaggcagcatcccgcggcgctgacggtcctggggagagcatggcgccgaggtgcccctggccatggccgcggcggcggcgcctcctggacgtgctcgcgcccctggtcctgctgctcggggtccgcgcggcctccgcggagccagagcgcatcagcgaggaggtggggctgctgcagctccttggggaccccccgccccagcaggtcacccagacggatgaccccgacgtcgggctggcctacgtctttgggccagatgccaacagtggccaagtggcccggtaccacttccccagcctcttcttccgtgacttctcactgctgttccacatccggccagccacagagggcccaggggtgctgttcgccatcacggactcggcgcaggccatggtcttgctgggcgtgaagctctctggggtgcaggacgggcaccaggacatctccctgctctacacagaaccaggtgcaggccagacccacacagccgccagcttccggctccccgccttcgtcggccagtggacacacttagccctcagtgtggcaggtggctttgtggccctctacgtggactgtgaggagttccagagaatgccgcttgctcggtcctcacggggcctggagctggagcctggcgccgggctcttcgtggctcaggcggggggagcggaccctgacaagttccagggggtgatcgctgagctgaaggtgcgcagggacccccaggtgagccccatgcactgcctggacgaggaaggcgatgactcagatggggcatccggagactctggcagcgggctcggggacgcccgggagcttctcagggaggagacgggcgcggccctaaaacccaggctccccgcgccaccccccgtcaccacgccacccttggctggaggcagcagcacggaagattccagaagtgaagaagtcgaggagcagaccacggtggcttcgttaggagctcagacacttcctggctcagattctgtctccacgtgggacgggagtgtccggacccctgggggccgcgtgaaagagggcggcctgaaggggcagaaaggggagccaggtgttccgggcccacctggccgggcaggccccccaggatccccatgcctacctggtcccccgggtctcccgtgcccagtgagtcccctgggtcctgcaggcccagcgttgcaaactgtccccggaccacaaggacccccagggcctccggggagggacggcacccctggaagggacggcgagccggtgagtcctcacgtccccccgagtccgggcgacaccgggccacaaggcttccccgggactccaggggacgtaggtcccaagggcgacaagggagaccctggggttggagagagagggcccccaggaccccaagggcctccagggcccccaggaccctccttcagacacgacaagctgaccttcattgacatggagggatctggcttcgggggcgatctggaggccctgcggggtcctcgaggcttccctggacctcccggaccccccggtgtcccaggcctgcccggcgagccaggccgctttggggtgaacagctccgacgtcccaggacccgccggccttcctggtgtgcctgggcgcgagggtccccccgggtttcctggcctcccgggacccccaggccctccgggaagagaggggcccccaggaaggactgggcagaaaggcagcctgcaaggagccggggccccaggcgtgcaggggagcaagggagcccccggtcctgctggtgctcgtggggagagcggcctggcaggagcccccggacctgctggaccaccaggcccccctgggccccctgggcccccaggaccaggactccccgctggatttgatgacatggaaggctccggggggcccttctggtcaacagcccgaagcgctgatgggccacaggagccaccggccttgcatgggatcggaggggatcctggcgtgcctgggctgccgggggcgaagggagaagttggagcagatggagtccccgggttccccggcctccctggcagagagggcattgctgggccccaggggccaaagggagacagaggcagccggggagaaaagggagatccagggaaggacggagtcgggcagccgggcctccctggcccccccggacccccgggacctgtggtctacgtgtcggagcaggacggatccgtcctgagcgtgccgggacctgagggccggccgggtttcgcaggctttcccggacctgcaggacccaagggcaacctgggctctaagggcgaacgaggctccccgggacccaagggtgagaagggtgaaccgggcagcatcttcagccccgacggcggtgccctgggccctgcccagaaaggagccaagggagagccgggcttccgaggacccccgggtccatacggacggccggggtacaagggagagattggctttcctggacggccgggtcgccccgggatgaacggattgaaaggagagaaaggggagccgggagatgccagccttggatttggcatgaggggaatgcccggccccccaggacctccagggcccccaggccctccagggactcctgtttacgacagcaatgtgtttgctgagtccagccgccccgggcctccaggattgccagggaatcagggccctccaggacccaagggcgccaaaggagaagtgggcccccccggaccaccagggcagtttccgtttgactttcttcagttggaggctgaaatgaagggggagaagggagaccgaggtgatgcaggacagaaaggcgaaaggggggagcccgggggcggcggtttcttcggctccagcctgcccggcccccccggccccccaggccccccaggcccacgtggctaccctgggattccaggtcccaagggagagagcatccggggccagcccggcccacctggacctcagggaccccccggcatcggctacgaggggcgccagggccctcccggccccccaggccccccagggcccccttcatttcctggccctcacaggcagactatcagcgttcccggccctccgggcccccctgggccccctgggccccctggaaccatgggcgcctcctcaggggtgaggctctgggctacacgccaggccatgctgggccaggtgcacgaggttcccgagggctggctcatcttcgtggccgagcaggaggagctctacgtccgcgtgcagaacgggttccggaaggtccagctggaggcccggacaccactcccacgagggacggacaatgaagtggccgccttgcagccccccgtggtgcagctgcacgacagcaacccctacccgcggcgggagcacccccaccccaccgcgcggccctggcgggcagatgacatcctggccagcccccctcgcctgcccgagccccagccctaccccggagccccgcaccacagctcctacgtgcacctgcggccggcgcgacccacaagcccacccgcccacagccaccgcgacttccagccggtgctccacctggttgcgctcaacagccccctgtcaggcggcatgcggggcatccgcggggccgacttccagtgcttccagcaggcgcgggccgtggggctggcgggcaccttccgcgccttcctgtcctcgcgcctgcaggacctgtacagcatcgtgcgccgtgccgaccgcgcagccgtgcccatcgtcaacctcaaggacgagctgctgtttcccagctgggaggctctgttctcaggctctgagggtccgctgaagcccggggcacgcatcttctcctttgacggcaaggacgtcctgaggcaccccacctggccccagaagagcgtgtggcatggctcggaccccaacgggcgcaggctgaccgagagctactgtgagacgtggcggacggaggctccctcggccacgggccaggcctcctcgctgctggggggcaggctcctggggcagagtgccgcgagctgccatcacgcctacatcgtgctctgcattgagaacagcttcatgactgcctccaagtagccaccgcctggatgcggatggccggagaggaccggcggctcggaggaagcccccaccgtgggcagggagcggccggccagcccctggccccaggacctggctgccatactttcctgtatagttcacgtttcatgtaatcctcaagaaataaaaggaagccaaagagtgtatttttttaaaagtttaaaacagaagcctgatgctgacattcacctgccccaactctcccctgacctgtgagcccagctgggtcaggcagggtgcagtatcatgccctgtgcaacctcttggcctgatcagaccacggctcgatttctccaggatttcctgctttgggaagccgtgctcgccccagcaggtgctgacttcatctcccacctagcagcaccgttctgtgcacaaaacccagacctgttagcagacaggccccgtgaggcaatgggagctgaggccacactcagcacaaggccatctgggctcctccagggtgtgtgctcgccctgcggtagatgggagggaggctcaggtccctggggctagggggagccccttctgctcagctctgggccattctccacagcaaccccaggctgaagcaggttcccaagctcagaggcgcactgtgacccccagctccggcctgtcctccaacaccaagcacagcagcctggggctggcctcccaaatgagccatgagatgatacatccaaagcagacagctccaccctggccgagtccaagctgggagattcaagggacccatgagttggggtctggcagcctcccatccagggcccccatctcatgcccctggctgggacgtggctcagccagcacttgtccagctgagcgccaggatggaacacggccacatcaaagaggctgaggctggcacaggacatgcggtagccagcacacagggcagtgagggagggctgtcatctgtgcactgcccatggacaggctggctccagatgcagggcagtcattggctgtctcctaggaaacccatatccttaccctccttgggactgaaggggaaccccggggtgcccacaggccgccctgcgggtgaacaaagcagccacgaggtgcaacaaggtcctctgtcagtcacagccacccctgagatccggcaacatcaacccgagtcattcgttctgtggagggacaagtggactcagggcagcgccaggctgaccacagcacagccaacacgcacctgcctcaggactgcgacgaaaccggtggggctggttctgtaattgtgtgtgatgtgaagccaattcagacaggcaaataaaagtgaccttttacactg

SEQ ID NO: 1109 - DNA, 6586 bp, Homo sapiens
  source 1..6586: mol_type = genomic DNA
atggctccctacccctgtggctgccacatcctgctgctgctcttctgctgcctggcggctgcccgggccaacctgctgaacctgaactggctttggttcaataatgaggacaccagccatgcagctaccacgatccctgagccccaggggcccctgcctgtgcagcccacagcagataccaccacacacgtgaccccccggaatggttccacagagccagcgacagcccctggcagccctgagccaccctcagagctgctggaagatggccaggacacccccacttctgccgagagcccggacgcgccagaggagaacattgccggtgtcggagccgagatcctgaacgtggccaaaggcatccggagcttcgtccagctgtggaatgacactgtccccactgagagcttggccagggcggaaaccctggtcctggagactcctgtgggcccccttgccctcgctgggccttccagcaccccccaggagaatgggaccactctctggcccagccgtggcattcctagctctccgggcgcccacacaaccgaggctggcaccttgcctgcacccaccccatcgcctccctccctgggcaggccctgggcaccactcacggggccctcagtgccaccaccatcttcaggtagagcttctctctcctccttgctgggcggggcccctccctggggaagcctgcaggacccagacagccaaggactctcgcccgccgcagccgctcccagccagcagctccaacgccctgacgtccgcctgcgcacgccacttctgcaccccctggtgatgggctccctgggcaagcacgcggccccctccgccttctcctctgggctcccgggcgcactgtctcaggtcgcagtcaccactttaaccagggacagcggtgcttgggtctcccacgtggctaactctgtggggccgggtcttgctaataactctgccctgctcggggctgaccccgaggcccccgccggtcgctgcctgcccctgccaccctccctgccagtctgcggccacctgggcatctcacgcttctggctgcccaaccacctccaccacgagagcggcgagcaggtgcgggccggggcacgggcgtgggggggcctgctgcagacgcactgccaccccttcctcgcctggttcttctgcctgctgctggtccccccatgcggcagcgtcccgccgcccgccccgccaccctgctgccagttctgcgaggccctgcaggatgcgtgttggagccgcctgggcgggggccggctgcccgtcgcctgtgcctcgctcccgacccaggaggatgggtactgtgtgctcattgggccggctgcagagcgcatcagcgaggaggtggggctgctgcagctccttggggaccccccgccccagcaggtcacccagacggatgaccccgacgtcgggctggcctacgtctttgggccagatgccaacagtggccaagtggcccggtaccacttccccagcctcttcttccgtgacttctcactgctgttccacatccggccagccacagagggcccaggggtgctgttcgccatcacggactcggcgcaggccatggtcttgctgggcgtgaagctctctggggtgcaggacgggcaccaggacatctccctgctctacacagaaccaggtgcaggccagacccacacagccgccagcttccggctccccgccttcgtcggccagtggacacacttagccctcagtgtggcaggtggctttgtggccctctacgtggactgtgaggagttccagagaatgccgcttgctcggtcctcacggggcctggagctggagcctggcgccgggctcttcgtggctcaggcggggggagcggaccctgacaagttccagggggtgatcgctgagctgaaggtgcgcagggacccccaggtgagccccatgcactgcctggacgaggaaggcgatgactcagatggggcatccggagactctggcagcgggctcggggacgcccgggagcttctcagggaggagacgggcgcggccctaaaacccaggctccccgcgccaccccccgtcaccacgccacccttggctggaggcagcagcacggaagattccagaagtgaagaagtcgaggagcagaccacggtggcttcgttaggagctcagacacttcctggctcagattctgtctccacgtgggacgggagtgtccggacccctgggggccgcgtgaaagagggcggcctgaaggggcagaaaggggagccaggtgttccgggcccacctggccgggcaggccccccaggatccccatgcctacctggtcccccgggtctcccgtgcccagtgagtcccctgggtcctgcaggcccagcgttgcaaactgtccccggaccacaaggacccccagggcctccggggagggacggcacccctggaagggacggcgagccggtgagtcctcacgtccccccgagtccgggcgacaccgggccacaaggcttccccgggactccaggggacgtaggtcccaagggcgacaagggagaccctggggttggagagagagggcccccaggaccccaagggcctccagggcccccaggaccctccttcagacacgacaagctgaccttcattgacatggagggatctggcttcgggggcgatctggaggccctgcggggtcctcgaggcttccctggacctcccggaccccccggtgtcccaggcctgcccggcgagccaggccgctttggggtgaacagctccgacgtcccaggacccgccggccttcctggtgtgcctgggcgcgagggtccccccgggtttcctggcctcccgggacccccaggccctccgggaagagaggggcccccaggaaggactgggcagaaaggcagcctgcaaggagccggggccccaggcgtgcaggggagcaagggagcccccggtcctgctggtgctcgtggggagagcggcctggcaggagcccccggacctgctggaccaccaggcccccctgggccccctgggcccccaggaccaggactccccgctggatttgatgacatggaaggctccggggggcccttctggtcaacagcccgaagcgctgatgggccacagggacctcccggcctgccgggacttaagggggatcctggcgtgcctgggctgccgggggcgaagggagaagttggagcagatggagtccccgggttccccggcctccctggcagagagggcattgctgggccccaggggccaaagggagacagaggcagccggggagaaaagggagatccagggaaggacggagtcgggcagccgggcctccctggcccccccggacccccgggacctgtggtctacgtgtcggagcaggacggatccgtcctgagcgtgccgggacctgagggccggccgggtttcgcaggctttcccggacctgcaggacccaagggcaacctgggctctaagggcgaacgaggctccccgggacccaagggtgagaagggtgaaccgggcagcatcttcagccccgacggcggtgccctgggccctgcccagaaaggagccaagggagagccgggcttccgaggacccccgggtccatacggacggccggggtacaagggagagattggctttcctggacggccgggtcgccccgggatgaacggattgaaaggagagaaaggggagccgggagatgccagccttggatttggcatgaggggaatgcccggccccccaggacctccagggcccccaggccctccagggactcctgtttacgacagcaatgtgtttgctgagtccagccgccccgggcctccaggattgccagggaatcagggccctccaggacccaagggcgccaaaggagaagtgggcccccccggaccaccagggcagtttccgtttgactttcttcagttggaggctgaaatgaagggggagaagggagaccgaggtgatgcaggacagaaaggcgaaaggggggagcccgggggcggcggtttcttcggctccagcctgcccggcccccccggccccccaggccccccaggcccacgtggctaccctgggattccaggtcccaagggagagagcatccggggccagcccggcccacctggacctcagggaccccccggcatcggctacgaggggcgccagggccctcccggccccccaggccccccagggcccccttcatttcctggccctcacaggcagactatcagcgttcccggccctccgggcccccctgggccccctgggccccctggaaccatgggcgcctcctcaggggtgaggctctgggctacacgccaggccatgctgggccaggtgcacgaggttcccgagggctggctcatcttcgtggccgagcaggaggagctctacgtccgcgtgcagaacgggttccggaaggtccagctggaggcccggacaccactcccacgagggacggacaatgaagtggccgccttgcagccccccgtggtgcagctgcacgacagcaacccctacccgcggcgggagcacccccaccccaccgcgcggccctggcgggcagatgacatcctggccagcccccctcgcctgcccgagccccagccctaccccggagccccgcaccacagctcctacgtgcacctgcggccggcgcgacccacaagcccacccgcccacagccaccgcgacttccagccggtgctccacctggttgcgctcaacagccccctgtcaggcggcatgcggggcatccgcggggccgacttccagtgcttccagcaggcgcgggccgtggggctggcgggcaccttccgcgccttcctgtcctcgcgcctgcaggacctgtacagcatcgtgcgccgtgccgaccgcgcagccgtgcccatcgtcaacctcaaggacgagctgctgtttcccagctgggaggctctgttctcaggctctgagggtccgctgaagcccggggcacgcatcttctcctttgacggcaaggacgtcctgaggcaccccacctggccccagaagagcgtgtggcatggctcggaccccaacgggcgcaggctgaccgagagctactgtgagacgtggcggacggaggctccctcggccacgggccaggcctcctcgctgctggggggcaggctcctggggcagagtgccgcgagctgccatcacgcctacatcgtgctctgcattgagaacagcttcatgactgcctccaagtagccaccgcctggatgcggatggccggagaggaccggcggctcggaggaagcccccaccgtgggcagggagcggccggccagcccctggccccaggacctggctgccatactttcctgtatagttcacgtttcatgtaatcctcaagaaataaaaggaagccaaagagtgtatttttttaaaagtttaaaacagaagcctgatgctgacattcacctgccccaactctcccctgacctgtgagcccagctgggtcaggcagggtgcagtatcatgccctgtgcaacctcttggcctgatcagaccacggctcgatttctccaggatttcctgctttgggaagccgtgctcgccccagcaggtgctgacttcatctcccacctagcagcaccgttctgtgcacaaaacccagacctgttagcagacaggccccgtgaggcaatgggagctgaggccacactcagcacaaggccatctgggctcctccagggtgtgtgctcgccctgcggtagatgggagggaggctcaggtccctggggctagggggagccccttctgctcagctctgggccattctccacagcaaccccaggctgaagcaggttcccaagctcagaggcgcactgtgacccccagctccggcctgtcctccaacaccaagcacagcagcctggggctggcctcccaaatgagccatgagatgatacatccaaagcagacagctccaccctggccgagtccaagctgggagattcaagggacccatgagttggggtctggcagcctcccatccagggcccccatctcatgcccctggctgggacgtggctcagccagcacttgtccagctgagcgccaggatggaacacggccacatcaaagaggctgaggctggcacaggacatgcggtagccagcacacagggcagtgagggagggctgtcatctgtgcactgcccatggacaggctggctccagatgcagggcagtcattggctgtctcctaggaaacccatatccttaccctccttgggactgaaggggaaccccggggtgcccacaggccgccctgcgggtgaacaaagcagccacgaggtgcaacaaggtcctctgtcagtcacagccacccctgagatccggcaacatcaacccgagtcattcgttctgtggagggacaagtggactcagggcagcgccaggctgaccacagcacagccaacacgcacctgcctcaggactgcgacgaaaccggtggggctggttctgtaattgtgtgtgatgtgaagccaattcagacaggcaaataaaagtgaccttttacactg

SEQ ID NO: 1110 - DNA, 3061 bp, Homo sapiens
  source 1..3061: mol_type = genomic DNA
agaggtgcgcgctgcgcgtgggatcagcccggcgccgacgggtggctccgaggagctcgctccttcctcgcccccgccccctcgccgcgcggggccagcccggccgctcctcccctgggtgggtccctgctccttttctggcagggtctatttgcatagaggaaactgcccaaagtggccgctgtggaggagctggctgcggcgaagggggcgtgcgcggcgatccgctgctacccggaggctaacccccgcgcccggcggacctcgtgcctcgggctgtcccgcctgctcctctcgcacccagcctctgccccagcagcaccgccccctcggagagtccacgcgcgacgaacgcgccatgggcccaggcgagcgcgccggtggcggcggcgacgcggggaagggcaatgcggcgggcggcggcggcggagggcgctcggcgacgacggccgggtcccgggcggtgagcgcgctgtgcctgctgctctccgtgggctcggcggctgcctgcctgctgctgggtgtccaggcggccgcgctgcagggccgggtggcggcgctcgaggaggagcgggagctgctgcggcgcgcggggccgccaggcgccctggacgcctgggccgagccgcacctggagcgcctgctgcgggagaagttggacggactagcgaagatccggactgctcgggaagctccatccgaatgtgtctgccccccagggccccctggacggcgcggcaagcctgggagaagaggcgaccctggtcctccagggcaatcaggacgagatggctacccgggacccctgggtttggatggcaagcccggacttccaggcccgaaaggggaaaagggtgcaccaggagactttggcccccggggagaccaaggacaagatggagctgctgggcctccggggccccctggacctcctggggcccggggccctcctggcgacactgggaaagatggccccaggggagcacaaggcccagcgggccccaaaggagagcccggacaagacggcgagatgggcccaaagggacccccagggcccaagggtgagcctggagtacctggaaagaagggcgacgatgggacaccaagccagcctggaccaccagggcccaagggcgagccagggagcatggggcctcggggagagaacggtgtggacggtgccccaggaccgaagggggagcctggccaccgaggcacggatggagctgcagggccccggggtgccccaggcctcaagggcgagcagggagacacagtggtgatcgactatgatggcaggatcttggatgccctcaaggggcctcccggaccacaggggcccccagggccaccagggatccctggagccaagggcgagcttggattgcccggtgccccaggaatcgatggagagaagggccccaaaggacagaaaggagacccaggagagcctgggccagcaggactcaaaggggaagcaggcgagatgggcttgtccggcctcccgggcgctgacggcctcaagggggagaagggggagtcggcgtctgacagcctacaggagagcctggctcagctcatagtggagccagggccccctggcccccctggccccccaggcccgatgggcctccagggaatccagggtcccaagggcttggatggagcaaagggagagaagggtgcgtcgggtgagagaggccccagcggcctgcctgggccagttggcccaccgggccttattgggctgccaggaaccaaaggagagaagggcagacccggggagccaggactagatggtttccctggaccccgaggagagaaaggtgatcggagcgagcgtggagagaagggagaacgaggggtccccggccggaaaggagtgaagggccagaagggcgagccgggaccaccaggcctggaccagccgtgtcccgtgggccccgacgggctgcctgtgcctggctgctggcataagtgacccacaggcccagctcacacctgtacagatccgtgtggacatttttaatttttgtaaaaacaaaacagtaatatattgatcttttttcatggaatgcgctacctgtggccttttaacattcaagagtatgcccacccagccccaaagccaccggcatgtgaagctgccggaaagtggacaggccagaccagggagatgtgtacctgaggggcacccttgggcctgggctttcccaggaaggagatgaaggtagaagcacctggctcgggcaaggctagaaagatgctacgttgggccttcagtcacctgatcagcagagagactctcagctgtggtactgccctgtaagaacctgcccccgcaaaactctggagtccctgggacacaccctatccaagaagacccaggggtggaacagcggctgctgttgctcctggcctcatcagcctccaaactcaaccacaaccagctgcctctgcagttggacaagacttggcccccggacaagactcgcccagcacttgcggctgggcccggggagcagtgagtggaaatcccccacgagggtctagctctaccacattcaggaggcctcaggaggccagcctgccatgagagcacatgtcctctggccaggagtagtggctgagctctgtgatcgctgtgatgtggacccagctccagggagcagagtgtcgaggatggaggggcccagcctggactgactgctacttcctgtctctgtttccattatcacccagagagggacaagataggacatggcctggaccagggaggcaggcctcccactcagagtctgggtctcactggccccaagtctcccacccagaactctggccaaaaatggctctctaggtgggctgtgcaggcaaagcaaagctcagggctggttcccagctggcctgagcagggggcctgccaccagacccacccacgctctgacgagaggcttttccacctccagcaagtgttcccagcaaccagctccatcctggctgcttgccttccatttccgtgtagatggagatcactgtgtgtaataaaccacaagtgcgtgtc

SEQ ID NO: 1111 - DNA, 930 bp, Homo sapiens
  source 1..930: mol_type = genomic DNA
atggagtctcgctctggcatccaggctggagtgcggtgtcgcgatctcggctcactgcaacctccgcctctcgcgttaaagcagttctccagcctcagtctcccaagcagctgggattataggcgcctgccaccacgctgtggcttcctttttgaagtcagcgagaccacgaacccaccggcaggaaccaactccagacacactttgaccgtgaagttggacggactagcgaagatccggactgctcgggaagctccatccgaatgtgtctgccccccagggccccctggacggcgcggcaagcctgggagaagaggcgaccctggtcctccaggacccctgggtttggatggcaagcccggacttccaggcccgaaaggggaaaagggtgcaccaggagactttggcccccggggagaccaaggacaagatggagctgctgggcctccggggccccctggacctcctggggcccggggccctcctggcgacactgggaaagatggccccaggggagcacaaggcccagcgggccccaaaggagagcccggacaagacggcgagatgggcccaaagggacccccagggcccaagggtgagcctggagtacctggaaagaagggcgacgatgggacaccaagccagcctggaccaccagggcccaagggcgagccagggagcatggggcctcggggagagaacggtgtggacggtgccccaggaccgaagggggagcctggccaccgaggcacggatggagctgcagggccccggggtgacgtccgggatcctggcctcggctctgtctcctcatgctcccagaggctggcttcttcctccaaaaaaaatggatctgagcccccgcctggctgtgcagggtgccccaggcctcaagggcgagcagggagacacagtggtgatcgactatga

SEQ ID NO: 1112 - DNA, 4210 bp, Homo sapiens
  source 1..4210: mol_type = genomic DNA
gtgactaggaagacgcgcgagcggggctggccggccggcgggtgggggaggggaggcgggggaaggcggctgagtgggcctctggagtgtgtgtgtctgtgtcagtgtgtgtgtgtgtgtgtgtatgtgtgtgtctggcgcctggccagggtgatttcccataaaccacatgccccccagtcctctcttaaaaggctgtgccgagggctggccagtgaggctcggcccggggaaagtgaaagtttgcctgggtcctctcggcgccagagccgctctccgcatcccaggacagcggtgcggccctcggccggggcgcccactccgcagcagccagcgagcgagcgagcgagcgagggcggccgacgcgcccggccgggacccagctgcccgtatgaccgcgccgggcgccgccgggcgctgccctcccacgacatggctgggctccctgctgttgttggtctgtctcctggcgagcaggagtatcaccgaggaggtgtcggagtactgtagccacatgattgggagtggacacctgcagtctctgcagcggctgattgacagtcagatggagacctcgtgccaaattacatttgagtttgtagaccaggaacagttgaaagatccagtgtgctaccttaagaaggcatttctcctggtacaagacataatggaggacaccatgcgcttcagagataacacccccaatgccatcgccattgtgcagctgcaggaactctctttgaggctgaagagctgcttcaccaaggattatgaagagcatgacaaggcctgcgtccgaactttctatgagacacctctccagttgctggagaaggtcaagaatgtctttaatgaaacaaagaatctccttgacaaggactggaatattttcagcaagaactgcaacaacagctttgctgaatgctccagccaagatgtggtgaccaagcctgattgcaactgcctgtaccccaaagccatccctagcagtgacccggcctctgtctcccctcatcagcccctcgccccctccatggcccctgtggctggcttgacctgggaggactctgagggaactgagggcagctccctcttgcctggtgagcagcccctgcacacagtggatccaggcagtgccaagcagcggccacccaggagcacctgccagagctttgagccgccagagaccccagttgtcaaggacagcaccatcggtggctcaccacagcctcgcccctctgtcggggccttcaaccccgggatggaggatattcttgactctgcaatgggcactaattgggtcccagaagaagcctctggagaggccagtgagattcccgtaccccaagggacagagctttccccctccaggccaggagggggcagcatgcagacagagcccgccagacccagcaacttcctctcagcatcttctccactccctgcatcagcaaagggccaacagccggcagatgtaactggtaccgccttgcccagggtgggccccgtgaggcccactggccaggactggaatcacaccccccagaagacagaccatccatctgccctgctcagagaccccccggagccaggctctcccaggatctcatcactgcgcccccagggcctcagcaacccctccaccctctctgctcagccacagctttccagaagccactcctcgggcagcgtgctgccccttggggagctggagggcaggaggagcaccagggatcggaggagccccgcagagccagaaggaggaccagcaagtgaaggggcagccaggcccctgccccgttttaactccgttcctttgactgacacaggccatgagaggcagtccgagggatccttcagcccgcagctccaggagtctgtcttccacctgctggtgcccagtgtcatcctggtcttgctggccgtcggaggcctcttgttctacaggtggaggcggcggagccatcaagagcctcagagagcggattctcccttggagcaaccagagggcagccccctgactcaggatgacagacaggtggaactgccagtgtagagggaattctaagctggacgcacagaacagtctctccgtgggaggagacattatggggcgtccaccaccacccctccctggccatcctcctggaatgtggtctgccctccaccagagctcctgcctgccaggactggaccagagcagccaggctggggcccctctgtctcaacccgcagacccttgactgaatgagagaggccagaggatgctccccatgctgccactatttattgtgagccctggaggctcccatgtgcttgaggaaggctggtgagcccggctcaggaccctcttccctcaggggctgcaccctcctctcactcccttccatgccggaacccaggccagggacccaccggcctgtggtttgtgggaaagcagggtggacgctgaggagtgaaagaaccctgcacccagagggcctgcctggtgccaaggtatcccagcctggacaggcatggacctgtctccagagagaggagcctgaagttcgtggggcgggacagcgtcggcctgatttcccgtaaaggtgtgcagcctgagagacgggaagaggaggcctctggacctgctggtctgcactgacagcctgaagggtctacaccctcggctcacctaagtgccctgtgctggttgccaggcgcagaggggaggccagccctgccctcaggacctgcctgacctgccagtgatgccaagagggggatcaagcactggcctctgcccctcctccttccagcacctgccagagcttctccaggaggccaagcagaggctcccctcatgaaggaagccattgcactgtgaacactgtacctgcctgctgaacagcctgcccccgtccatccatgagccagcatccgtccgtcctccactctccagcctctccccagcctcctgcactgagctggcctcaccagtcgactgagggagcccctcagccctgaccttctcctgacctggcctttgactccccggagtggagtggggtgggagaacctcctgggccgccagccagagccggtctttaggctgtgttgttcgcccaggtttctgcatcttgcactttgacattcccaagagggaagggactagtgggagagagcaagggaggggagggcacagacagagaggctacagggcgagctctgactgaagatgggcctttgaaatataggtatgcacctgaggttgggggagggtctgcactcccaaaccccagcgcagtgtcctttccctgctgccgacaggaacctggggctgaacaggttatccctgtcaggagccctggactgggctgcatctcagccccacctgcatggtatccagctcccatccacttctcacccttctttcctcctgaccttggtcagcagtgatgacctccaactctcacccaccccctctaccatcacctctaaccaggcaagccagggtgggagagcaatcaggagagccaggcctcagcttccaatgcctggagggcctccactttgtggccagcctgtggtggtggctctgaggcctaggcaacgagcgacagggctgccagttgcccctgggttcctttgtgctgctgtgtgcctcctctcctgccgccctttgtcctccgctaagagaccctgccctacctggccgctgggccccgtgactttcccttcctgcccaggaaagtgagggtcggctggccccaccttccctgtcctgatgccgacagcttagggaagggcagtgaacttgcatatggggcttagccttctagtcacagcctctatatttgatgctagaaaacacatatttttaaatggaagaaaaataaaaaggcattcccccttcatccccctaccttaaacatataatattttaaaggtcaaaaaagcaatccaacccactgcagaagctctttttgagcacttggtggcatcagagcaggaggagccccagagccacctctggtgtccccccaggctacctgctcaggaaccccttctgttctctgagaagtcaagagaggacattggctcacgcactgtgagattttgtttttatacttggaagtggtgaattattttatataaagtcatttaaatatctatttaaaagataggaagctgcttatatatttaataataaaagaagtgcacaagctgc

SEQ ID NO: 1113 - DNA, 2625 bp, Homo sapiens
  source 1..2625: mol_type = genomic DNA
agtgcagcgcagaagacagagggtgactaggaagacgcgcgagcggggctggccggccggcgggtgggggaggggaggcgggggaaggcggctgagtgggcctctggagtgtgtgtgtctgtgtcagtgtgtgtgtgtgtgtgtgtatgtgtgtgtctggcgcctggccagggtgatttcccataaaccacatgccccccagtcctctcttaaaaggctgtgccgagggctggccagtgaggctcggcccggggaaagtgaaagtttgcctgggtcctctcggcgccagagccgctctccgcatcccaggacagcggtgcggccctcggccggggcgcccactccgcagcagccagcgagcgagcgagcgagcgagggcggccgacgcgcccggccgggacccagctgcccgtatgaccgcgccgggcgccgccgggcgctgccctcccacgacatggctgggctccctgctgttgttggtctgtctcctggcgagcaggagtatcaccgaggaggtgtcggagtactgtagccacatgattgggagtggacacctgcagtctctgcagcggctgattgacagtcagatggagacctcgtgccaaattacatttgagtttgtagaccaggaacagttgaaagatccagtgtgctaccttaagaaggcatttctcctggtacaagacataatggaggacaccatgcgcttcagagataacacccccaatgccatcgccattgtgcagctgcaggaactctctttgaggctgaagagctgcttcaccaaggattatgaagagcatgacaaggcctgcgtccgaactttctatgagacacctctccagttgctggagaaggtcaagaatgtctttaatgaaacaaagaatctccttgacaaggactggaatattttcagcaagaactgcaacaacagctttgctgaatgctccagccaagatgtggtgaccaagcctgattgcaactgcctgtaccccaaagccatccctagcagtgacccggcctctgtctcccctcatcagcccctcgccccctccatggcccctgtggctggcttgacctgggaggactctgagggaactgagggcagctccctcttgcctggtgagcagcccctgcacacagtggatccaggcagtgccaagcagcggccacccaggagcacctgccagagctttgagccgccagagaccccagttgtcaaggacagcaccatcggtggctcaccacagcctcgcccctctgtcggggccttcaaccccgggatggaggatattcttgactctgcaatgggcactaattgggtcccagaagaagcctctggagaggccagtgagattcccgtaccccaagggacagagctttccccctccaggccaggagggggcagcatgcagacagagcccgccagacccagcaacttcctctcagcatcttctccactccctgcatcagcaaagggccaacagccggcagatgtaactggccatgagaggcagtccgagggatccttcagcccgcagctccaggagtctgtcttccacctgctggtgcccagtgtcatcctggtcttgctggccgtcggaggcctcttgttctacaggtggaggcggcggagccatcaagagcctcagagagcggattctcccttggagcaaccagagggcagccccctgactcaggatgacagacaggtggaactgccagtgtagagggaattctaagctggacgcacagaacagtctctccgtgggaggagacattatggggcgtccaccaccacccctccctggccatcctcctggaatgtggtctgccctccaccagagctcctgcctgccaggactggaccagagcagccaggctggggcccctctgtctcaacccgcagacccttgactgaatgagagaggccagaggatgctccccatgctgccactatttattgtgagccctggaggctcccatgtgcttgaggaaggctggtgagcccggctcaggaccctcttccctcaggggctgcaccctcctctcactcccttccatgccggaacccaggccagggacccaccggcctgtggtttgtgggaaagcagggtggacgctgaggagtgaaagaaccctgcacccagagggcctgcctggtgccaaggtatcccagcctggacaggcatggacctgtctccagagagaggagcctgaagttcgtggggcgggacagcgtcggcctgatttcccgtaaaggtgtgcagcctgagagacgggaagaggaggcctctggacctgctggtctgcactgacagcctgaagggtctacaccctcggctcacctaagtgccctgtgctggttgccaggcgcagaggggaggccagccctgccctcaggacctgcctgacctgccagtgatgccaagagggggatcaagcactggcctctgcccctcctccttccagcacctgccagagcttctccaggaggccaagcagaggctcccctcatgaaggaagccattgcactgtgaacactgtacctgcctgctgaacagcctgcccccgtccatccatgagccagcatccgtccgtcctccactctccagcctctcccca

SEQ ID NO: 1114 - DNA, 597 bp, Homo sapiens
  source 1..597: mol_type = genomic DNA
cttggaagtgcagcgcagaagacagaggtcctctcttaaaaggctgtgccgagggctggccagtgaggctcggcccggggaaagtgaaagtttgcctgggtcctctcggcgccagagccgctctccgcatcccaggacagcggtgcggccctcggccggggcgcccactccgcagcagccagcgagcgagcgagcgagcgagggcggccgacgcgcccggccgggacccagctgcccgtatgaccgcgccgggcgccgccgggcgctgccctcccacgacatggctgggctccctgctgttgttggtctgtctcctggcgagcaggagtatcaccgaggaggtgtcggagtactgtagccacatgattgggagtggacacctgcagtctctgcagcggctgattgacagtcagatggagacctcgtgccaaattacatttgagtttgtagaccaggaacagttgaaagatccagtgtgctaccttaagaaggcatttctcctggtacaagacataatggaggacaccatgcgcttcagagataacacccccaatgccatcgccattgtgcagctgcaggaactctctttgaggctga

SEQ ID NO: 1115 - DNA, 1364 bp, Homo sapiens
  source 1..1364: mol_type = genomic DNA
gggcggccgacgcgcccggccgggacccagctgcccgtatgaccgcgccgggcgccgccgggcgctgccctcccacgacatggctgggctccctgctgttgttggtctgtctcctggcgagcaggagtatcaccgaggaggtgtcggagtactgtagccacatgattgggagtggacacctgcagtctctgcagcggctgattgacagtcagatggagacctcgtgccaaattacatttgagtttgtagaccaggaacagttgaaagatccagtgtgctaccttaagaaggcatttctcctggtacaagacataatggaggacaccatgcgcttcagagataacacccccaatgccatcgccattgtgcagctgcaggaactctctttgaggctgaagagctgcttcaccaaggattatgaagagcatgacaaggcctgcgtccgaactttctatgagacacctctccagttgctggagaaggtcaagaatgtctttaatgaaacaaagaatctccttgacaaggactggaatattttcagcaagaactgcaacaacagctttgctgaatgctccagccaagatgtggtgaccaagcctgattgcaactgcctgtaccccaaagccatccctagcagtgacccggcctctgtctcccctcatcagcccctcgccccctccatggcccctgtggctggcttgacctgggaggactctgagggaactgagggcagctccctcttgcctggtgagcagcccctgcacacagtggatccaggcagtgccaagcagcggccacccaggagcacctgccagagctttgagccgccagagaccccagttgtcaaggacagcaccatcggtggctcaccacagcctcgcccctctgtcggggccttcaaccccgggatggaggatattcttgactctgcaatgggcactaattgggtcccagaagaagcctctggagaggccagtgagattcccgtaccccaagggacagagctttccccctccaggccaggagggggcagcatgcagacagagcccgccagacccagcaacttcctctcagcatcttctccactccctgcatcagcaaagggccaacagccggcagatgtaactggccatgagaggcagtccgagggatccttcagcccgcagctccaggagtctgtcttccacctgctggtgcccagtgtcatcctggtcttgctggccgtcggaggcctcttgttctacaggtggaggcggcggagccatcaagagcctcagagagcggattctcccttggagcaaccagagggcagccccctgactcaggatgacagacaggtggaactgccagtgtagagggaattc

SEQ ID NO: 1116 - DNA, 2484 bp, Homo sapiens
  source 1..2484: mol_type = genomic DNA
gagccgctctccgcatcccaggacagcggtgcggccctcggccggggcgcccactccgcagcagccagcgagcgagcgagcgagcgagggcggccgacgcgcccggccgggacccagctgcccgtatgaccgcgccgggcgccgccgggcgctgccctcccacgacatggctgggctccctgctgttgttggtctgtctcctggcgagcaggagtatcaccgaggaggtgtcggagtactgtagccacatgattgggagtggacacctgcagtctctgcagcggctgattgacagtcagatggagacctcgtgccaaattacatttgagtttgtagaccaggaacagttgaaagatccagtgtgctaccttaagaaggcatttctcctggtacaagacataatggaggacaccatgcgcttcagagataacacccccaatgccatcgccattgtgcagctgcaggaactctctttgaggctgaagagctgcttcaccaaggattatgaagagcatgacaaggcctgcgtccgaactttctatgagacacctctccagttgctggagaaggtcaagaatgtctttaatgaaacaaagaatctccttgacaaggactggaatattttcagcaagaactgcaacaacagctttgctgaatgctccagccaagatgtggtgaccaagcctgattgcaactgcctgtaccccaaagccatccctagcagtgacccggcctctgtctcccctcatcagcccctcgccccctccatggcccctgtggctggcttgacctgggaggactctgagggaactgagggcagctccctcttgcctggtgagcagcccctgcacacagtggatccaggcagtgccaagcagcggccacccaggagcacctgccagagctttgagccgccagagaccccagttgtcaaggacagcaccatcggtggctcaccacagcctcgcccctctgtcggggccttcaaccccgggatggaggatattcttgactctgcaatgggcactaattgggtcccagaagaagcctctggagaggccagtgagattcccgtaccccaagggacagagctttccccctccaggccaggagggggcagcatgcagacagagcccgccagacccagcaacttcctctcagcatcttctccactccctgcatcagcaaagggccaacagccggcagatgtaactggtaccgccttgcccagggtgggccccgtgaggcccactggccaggactggaatcacaccccccagaagacagaccatccatctgccctgctcagagaccccccggagccaggctctcccaggatctcatcactgcgcccccagggcctcagcaacccctccaccctctctgctcagccacagctttccagaagccactcctcgggcagcgtgctgccccttggggagctggagggcaggaggagcaccagggatcggaggagccccgcagagccagaaggaggaccagcaagtgaaggggcagccaggcccctgccccgttttaactccgttcctttgactgacacaggccatgagaggcagtccgagggatccttcagcccgcagctccaggagtctgtcttccacctgctggtgcccagtgtcatcctggtcttgctggccgtcggaggcctcttgttctacaggtggaggcggcggagccatcaagagcctcagagagcggattctcccttggagcaaccagagggcagccccctgactcaggatgacagacaggtggaactgccagtgtagagggaattctaagacccctcaccatcctggacacactcgtttgtcaatgtccctctgaaaatgtgacgcccagccccggacacagtactccagatgttgtctgaccagctcagagagagtacagtgggactgttaccttccttgatatggacagtattcttctatttgtgcagattaagattgcattagtttttttcttaacaactgcatcatactgttgtcatatgttgagcctgtggtctattaaaacccctagttccatttcccataaacttctgtcaagccagaccatctctaccctgtacttggacaacttaacttttttaaccaaagtgcagtttatgttcacctttgttaaagccaccttgttggtttctgcccatcacctgaacctactgaagttgtgtgaaatcctaattctgtcatctccgtagccctcccagttgtgcctcctgcacattgatgagtgcctgctgttgtctttgcccatgttgttgatgtagctgtgaccctattgttcctcacccctgccccccgccaaccccagctggcccacctcttccccctcccacccaagcccacagccagcccatcaggaagccttcctggcttctccacaaccttctgactgctcttttcagtcatgctcctcctgctcttttgtatttggctaatagtatatcaatttgcactt

SEQ ID NO: 1117 - DNA, 1083 bp, Homo sapiens
  source 1..1083: mol_type = genomic DNA
tccgcatcccaggacagcggtgcggccctcggccggggcgcccactccgcagcagccagcgagcgagcgagcgagcgagggcggccgacgcgcccggccgggacccagctgcccgtatgaccgcgccgggcgccgccgggcgctgccctcccacgacatggctgggctccctgctgttgttggtctgtctcctggcgagcaggagtatcaccgaggaggtgtcggagtactgtagccacatgattgggagtggacacctgcagtctctgcagcggctgattgacagtcagatggagacctcgtgccaaattacatttgagtttgtagaccaggaacagttgaaagatccagtgtgctaccttaagaaggcatttctcctggtacaagacataatggaggacaccatgcgcttcagagataacacccccaatgccatcgccattgtgcagctgcaggaactctctttgaggctgaagagctgcttcaccaaggattatgaagagcatgacaaggcctgcgtccgaactttctatgagacacctctccagttgctggagaaggtcaagaatgtctttaatgaaacaaagaatctccttgacaaggactggaatattttcagcaagaactgcaacaacagctttgctgaatgctccagccaaggccatgagaggcagtccgagggatccttcagcccgcagctccaggagtctgtcttccacctgctggtgcccagtgtcatcctggtcttgctggccgtcggaggcctcttgttctacaggtggaggcggcggagccatcaagagcctcagagagcggattctcccttggagcaaccagagggcagccccctgactcaggatgacagacaggtggaactgccagtgtagagggaattctaagctggacgcacagaacagtctctccgtgggaggagacattatggggcgtccaccaccacccctccctggccatcctcctggaatgtggtctgccctccaccagagctcctgcctgccaggactggaccagagcagccaggctggggcccctctgtctcaacccgcagacccttgactgaatgag

SEQ ID NO: 1118 - DNA, 1087 bp, Homo sapiens
  source 1..1087: mol_type = genomic DNA
gccactcctgctgggcagcccacagggtccctgggcggagggcaggagcatccagttggagttgacaacaggaggcagaggcatcatggagggtccccggggatggctggtgctctgtgtgctggccatatcgctggcctctatggtgaccgaggacttgtgccgagcaccagacgggaagaaaggggaggcaggaagacctggcagacgggggcggccaggcctcaagggggagcaaggggagccgggggcccctggcatccggacaggcatccaaggcctaaggagaccagggggaacctgggccctctggaaaccccggcaaggtgggctacccagggcccagcggccccctcggagcccatcccgggaattaaaggcaccaagggcagcccaggaaacatcaaggaccagccgaggccagccttctccgccattcggcggaaccccaatggggggcaacgtggtcattcgacacggtcatcaccaaccaggaagaaccgtaccagaaccactccggccgattcgtctgcactgtacccggctactactacttcaccttccaggtgctgtcccagtgggaaatctgcctgtccatcgtctcctcctcaaggggccaggtccgacgctccctgggcttctgtgacaccaccaacaaggggctcttccaggtggtgtcagggggcatggtgcttcagctgcagcagggtgaccaggtctgggttgaaaaagaccccaaaaagggtcacatttaccagggctctgaggccgacagcgtcttcagcggcttcctcatcttcccatctgcctgagccagggaaggaccccctcccccacccacctctctggcttccatgctccgcctgtaaaatgggggcgctattgcttcagctgctgaagggagggggctggctctgagagccccaggactggctgccccgtgacacatgctctaagaagctcgtttcttagacctcttcctggaataaacatctgtgtctgtgtctgctgaacatgagcttcagttgctactcggagcattgagagggaggcctaagaataataacaatccagtgcttaagagtca

SEQ ID NO: 1119 - DNA, 1143 bp, Homo sapiens
  source 1..1143: mol_type = genomic DNA
agtcttgctgaagtctgcttgaaatgtccctggtgagcttctggccactggggaagttcagggggcaggtctgaagaaggggaagtaggaagggatgtgaaacttggccacagcctggagccactcctgctgggcagcccacagggtccctgggcggagggcaggagcatccagttggagttgacaacaggaggcagaggcatcatggagggtccccggggatggctggtgctctgtgtgctggccatatcgctggcctctatggtgaccgaggacttgtgccgagcaccagacgggaagaaaggggaggcaggaagacctggcagacgggggcggccaggcctcaagggggagcaaggggagccgggggcccctggcatccggacaggcatccaaggccttaaaggagaccagggggaacctgggccctctggaaaccccggcaaggtgggctacccagggcccagcggccccctcggagcccgtggcatcccgggaattaaaggcaccaagggcagcccaggaaacatcaaggaccagccgaggccagccttctccgccattcggcggaaccccccaatggggggcaacgtggtcatcttcgacacggtcatcaccaaccaggaagaaccgtaccagaaccactccggccgattcgtctgcactgtacccggctactactacttcaccttccaggtgctgtcccagtgggaaatctgcctgtccatcgtctcctcctcaaggggccaggtccgacgctccctgggcttctgtgacaccaccaacaaggggctcttccaggtggtgtcagggggcatggtgcttcagctgcagcagggtgaccaggtctgggttgaaaaagaccccaaaaagggtcacatttaccagggctctgaggccgacagcgtcttcagcggcttcctcatcttcccatctgcctgagccagggaaggaccccctcccccacccacctctctggcttccatgctccgcctgtaaaatgggggcgctattgcttcagctgctgaagggagggggctggctctgagagccccaggactggctgccccgtgacacatgctctaagaagctcgtttcttagacctcttcctggaataaacatctgtgtctgtgtctgctgaa

SEQ ID NO: 1120 - DNA, 976 bp, Homo sapiens
  source 1..976: mol_type = genomic DNA
acctgcccaggccctcccgtgtctccacagaggcatcatggagggtccccggggatggctggtgctctgtgtgctggccatatcgctggcctctatggtgaccgaggacttgtgccgagcaccagacgggaagaaaggggaggcaggaagacctggcagacgggggcggccaggcctcaagggggagcaaggggagccgggggcccctggcatccggacaggcatccaaggccttaaaggagaccagggggaacctgggccctctggaaaccccggcaaggtgggctacccagggcccagcggccccctcggagcccgtggcatcccgggaattaaaggcaccaagggcagcccaggaaacatcaaggaccagccgaggccagccttctccgccattcggcggaaccccccaatggggggcaacgtggtcatcttcgacacggtcatcaccaaccaggaagaaccgtaccagaaccactccggccgattcgtctgcactgtacccggctactactacttcaccttccaggtgctgtcccagtgggaaatctgcctgtccatcgtctcctcctcaaggggccaggtccgacgctccctgggcttctgtgacaccaccaacaaggggctcttccaggtggtgtcagggggcatggtgcttcagctgcagcagggtgaccaggtctgggttgaaaaagaccccaaaaagggtcacatttaccagggctctgaggccgacagcgtcttcagcggcttcctcatcttcccatctgcctgagccagggaaggaccccctcccccacccacctctctggcttccatgctccgcctgtaaaatgggggcgctattgcttcagctgctgaagggagggggctggctctgagagccccaggactggctgccccgtgacacatgctctaagaagctcgtttcttagacctcttcctggaataaacatctgtgtctgtgtctgctgaa

SEQ ID NO: 1121 - DNA, 768 bp, Homo sapiens
  source 1..768: mol_type = genomic DNA
ccaggaggctgggcagctgaggcagggagggagggaaataactgtgcctgattctaggacagggatgggggtgcagcactgatccaggacccagaatggaggcatcatggagggtccccggggatggctggtgctctgtgtgctggccatatcgctggcctctatggtgaccgaggacttgtgccgagcaccagacgggaagaaaggggaggcaggaagacctggcagacgggggcggccaggcctcaagggggagcaaggggagccgggggcccctggcatccggacaggcatccaaggccttaaaggagaccagggggaacctgggccctctggaaaccccggcaaggtgggctacccagggcccagcggccccctcggagcccgtggcatcccgggaattaaaggcaccaagggcagcccaggaaacatcaaggaccagccgaggccagccttctccgccattcggcggaaccccccaatggggggcaacgtggtcatcttcgacacggtcatcaccaaccaggaagaaccgtaccagaaccactccggccgattcgtctgcactgtacccggctactactacttcaccttccaggtgctgtcccagtgggaaatctgcctgtccatcgtctcctcctcaaggggccaggtccgacgctccctgggcttctgtgacaccaccaacaaggggctcttccaggtggtgtcagggggcatggtgcttcagctgcagcagggtgaccaggtctgggttgaaaaagaccc

SEQ ID NO: 1122 - DNA, 2339 bp, Homo sapiens
  source 1..2339: mol_type = genomic DNA
cacacaacaactcttccccgctgagaggagacagccagtgcgactccaccctccagctcgacggcagccgccccggccgacagccccgagacgacagcccggcgcgtcccggtccccacctccgaccaccgccagcgctccaggccccgccgctccccgctcgccgccaccgcgccctccgctccgcccgcagtgccaaccatgaccgccgccagtatgggccccgtccgcgtcgccttcgtggtcctcctcgccctctgcagccggccggccgtcggccagaactgcagcgggccgtgccggtgcccggacgagccggcgccgcgctgcccggcgggcgtgagcctcgtgctggacggctgcggctgctgccgcgtctgcgccaagcagctgggcgagctgtgcaccgagcgcgacccatgcgacccgcacaagggcctattctgtcacttcggctccccggccaaccgcaagatcggcgtgtgcaccgccaaagatggtgctccctgcatcttcggtggtacggtgtaccgcagcggagagtccttccagagcagctgcaagtaccagtgcacgtgcctggacggggcggtgggctgcatgcccctgtgcagcatggacgttcgtctgcccagccctgactgccccttcccgaggagggtcaagctgcccgggaaatgctgcgaggagtgggtgtgtgacgagcccaaggaccaaaccgtggttgggcctgccctcgcggcttaccgactggaagacacgtttggcccagacccaactatgattagagccaactgcctggtccagaccacagagtggagcgcctgttccaagacctgtgggatgggcatctccacccgggttaccaatgacaacgcctcctgcaggctagagaagcagagccgcctgtgcatggtcaggccttgcgaagctgacctggaagagaacattaagaagggcaaaaagtgcatccgtactcccaaaatctccaagcctatcaagtttgagctttctggctgcaccagcatgaagacataccgagctaaattctgtggagtatgtaccgacggccgatgctgcaccccccacagaaccaccaccctgccggtggagttcaagtgccctgacggcgaggtcatgaagaagaacatgatgttcatcaagacctgtgcctgccattacaactgtcccggagacaatgacatctttgaatcgctgtactacaggaagatgtacggagacatggcatgaagccagagagtgagagacattaactcattagactggaacttgaactgattcacatctcatttttccgtaaaaatgatttcagtagcacaagttatttaaatctgtttttctaactgggggaaaagattcccacccaattcaaaacattgtgccatgtcaaacaaatagtctatcaaccccagacactggtttgaagaatgttaagacttgacagtggaactacattagtacacagcaccagaatgtatattaaggtgtggctttaggagcagtgggagggtaccagcagaaaggttagtatcatcagatagcatcttatacgagtaatatgcctgctatttgaagtgtaattgagaaggaaaattttagcgtgctcactgacctgcctgtagccccagtgacagctaggatgtgcattctccagccatcaagagactgagtcaagttgttccttaagtcagaacagcagactcagctctgacattctgattcgaatgacactgttcaggaatcggaatcctgtcgattagactggacagcttgtggcaagtgaatttgcctgtaacaagccagattttttaaaatttatattgtaaatattgtgtgtgtgtgtgtgtgtgtatatatatatatatgtacagttatctaagttaatttaaagttgtttgtgcctttttatttttgtttttaatgctttgatatttcaatgttagcctcaatttctgaacaccataggtagaatgtaaagcttgtctgatcgttcaaagcatgaaatggatacttatatggaaattctgctcagatagaatgacagtccgtcaaaacagattgtttgcaaaggggaggcatcagtgtccttggcaggctgatttctaggtaggaaatgtggtagcctcacttttaatgaacaaatggcctttattaaaaactgagtgactctatatagctgatcagttttttcacctggaagcatttgtttctactttgatatgactgtttttcggacagtttatttgttgagagtgtgaccaaaagttacatgtttgcacctttctagttgaaaataaagtgtatattttttctataaa

SEQ ID NO: 1123 - DNA, 3625 bp, Homo sapiens
  source 1..3625: mol_type = genomic DNA
cgcgagaacaaagacgcgcgagcatcggcggcccggaaccggccttggaacaactgtggaacctgaggccgcttgccctcccgccccatggagcggcccccggggctgcggccgggcgcgggcgggccctgggagatgcgggagcggctgggcaccggcggcttcgggaacgtctgtctgtaccagcatcgggaacttgatctcaaaatagcaattaagtcttgtcgcctagagctaagtaccaaaaacagagaacgatggtgccatgaaatccagattatgaagaagttgaaccatgccaatgttgtaaaggcctgtgatgttcctgaagaattgaatattttgattcatgatgtgcctcttctagcaatggaatactgttctggaggagatctccgaaagctgctcaacaaaccagaaaattgttgtggacttaaagaaagccagatactttctttactaagtgatatagggtctgggattcgatatttgcatgaaaacaaaattatacatcgagatctaaaacctgaaaacatagttcttcaggatgttggtggaaagataatacataaaataattgatctgggatatgccaaagatgttgatcaaggaagtctgtgtacatcttttgtgggaacactgcagtatctggccccagagctctttgagaataagccttacacagccactgttgattattggagctttgggaccatggtatttgaatgtattgctggatataggccttttttgcatcatctgcagccatttacctggcatgagaagattaagaagaaggatccaaagtgtatatttgcatgtgaagagatgtcaggagaagttcggtttagtagccatttacctcaaccaaatagcctttgtagtttagtagtagaacccatggaaaactggctacagttgatgttgaattgggaccctcagcagagaggaggacctgttgaccttactttgaagcagccaagatgttttgtattaatggatcacattttgaatttgaagatagtacacatcctaaatatgacttctgcaaagataatttcttttctgttaccacctgatgaaagtcttcattcactacagtctcgtattgagcgtgaaactggaataaatactggttctcaagaacttctttcagagacaggaatttctctggatcctcggaaaccagcctctcaatgtgttctagatggagttagaggctgtgatagctatatggtttatttgtttgataaaagtaaaactgtatatgaagggccatttgcttccagaagtttatctgattgtgtaaattatattgtacaggacagcaaaatacagcttccaattatacagctgcgtaaagtgtgggctgaagcagtgcactatgtgtctggactaaaagaagactatagcaggctctttcagggacaaagggcagcaatgttaagtcttcttagatataatgctaacttaacaaaaatgaagaacactttgatctcagcatcacaacaactgaaagctaaattggagttttttcacaaaagcattcagcttgacttggagagatacagcgagcagatgacgtatgggatatcttcagaaaaaatgctaaaagcatggaaagaaatggaagaaaaggccatccactatgctgaggttggtgtcattggatacctggaggatcagattatgtctttgcatgctgaaatcatggagctacagaagagcccctatggaagacgtcagggagacttgatggaatctctggaacagcgtgccattgatctatataagcagttaaaacacagaccttcagatcactcctacagtgacagcacagagatggtgaaaatcattgtgcacactgtgcagagtcaggaccgtgtgctcaaggagctgtttggtcatttgagcaagttgttgggctgtaagcagaagattattgatctactccctaaggtggaagtggccctcagtaatatcaaagaagctgacaatactgtcatgttcatgcagggaaaaaggcagaaagaaatatggcatctccttaaaattgcctgtacacagagttctgcccggtcccttgtaggatccagtctagaaggtgcagtaacccctcagacatcagcatggctgcccccgacttcagcagaacatgatcattctctgtcatgtgtggtaactcctcaagatggggagacttcagcacaaatgatagaagaaaatttgaactgccttggccatttaagcactattattcatgaggcaaatgaggaacagggcaatagtatgatgaatcttgattggagttggttaacagaatgagttgtcacttgttcactgtccccaaacctatggaagttgttgctatacatgttggaaatgtgtttttcccccatgaaaccattcttcagacatcagtcaatggaagaaatggctatgaacagaaactacatttctactatgatcagaagaacatgattttacaagtataacagttttgagtaattcaagcctctaaacagacaggaatttagaaaaagtcaatgtacttgtttgaatatttgttttaataccacagctatttagaagcatcatcacgacacatttgccttcagtcttggtaaaacattacttatttaactgattaaaaataccttctatgtattagtgtcaacttttaacttttgggcgtaagaccaaatgtagttttgtatacagagaagaaaacctcaagtaataggcattttaagtaaaagtctacctgtgtttttttctaaaaaggctgctcacaagttctatttcttgaagaataaattctacctccttgtgttgcactgaacaggttctcttcctggcatcataaggagttggtgtaatcattttaaattccactgaaaatttaacagtatccccttctcatcgaagggattgtgtatctgtgcttctaatattagttggctttcataaatcatgttgttgtgtgtatatgtatttaagatgtacatttaataatatcaaagagaagatgcctgttaatttataatgtatttgaaaattacatgttttttcatttgtaaaaatgagtcatttgtttaaacaatctttcatgtcttgtcatacaaatttataaaggtctgcactcctttatctgtaattgtaattccaaaatccaaaaagctctgaaaacaaggtttccataagcttggtgacaaaattcatttgcttgcaatctaatctgaactgaccttgaatctttttatcccatttagtgtgaatattcctttattttgctgcttgatgatgagagggagggctgctgccacagactgtggtgagggctggttaatgtagtatggtatatgcacaaaactacttttctaaaatctaaaatttcataattctgaaacaacttgccccaagggtttcagagaaaggactgtggacctctatcatctgctaagtaatttagaagatattatttgtcttaaaaaatgtgaaatgcttttatattctaatagtttttcactttgtgtattaaatggtttttaaattactttcttgatctctattcattataaaaatcagattataataaaacagttgaatatggcttaggaaaata

SEQ ID NO: 1124 - DNA, 3272 bp, Homo sapiens
  source 1..3272: mol_type = genomic DNA
gatgcggccccgcccccgccctcggaaccggaagtagagcctggtgcctgggagcggctggcgcggcggaatccagggccgacccgggccggaccgaccccaggcggcgacggaatcagtccccaatgcctggaaattcctcattggattactgtgttttaaacagaatttcgtgaacagccttttatctccaagcggaaagaaagatgtggaaagcttcagcaggccacgctgtgtccatcgcccaggatgacgcgggggccgatgactgggagaccgaccctgattttgtgaatgatgtgagtgagaaggagcaaagatggggtgccaagacggtgcagggctccgggcaccaggagcatatcaacatacacaagctgagggagaatgtctttcaagagcatcagacccttaaggagaaggaacttgaaacaggaccaaaagcttcccatggctatggagggaaatttggtgtggaacaagaccgaatggataagtcagctgtcggccacgaatatcagtcgaaactttccaagcactgctcgcaggtggactcggtccgtggcttcggaggcaagtttggtgtccagatggacagagttgatcagtctgctgtaggctttgaataccaggggaagactgagaagcatgcctcccagaaagactactccagtggttttggcggcaagtatggcgtgcaggccgaccgagtagacaagagcgcggtgggcttcgactaccagggcaagacggagaagcacgagtcacagagagattactccaaaggtttcggcggcaaatacggtatcgacaaggacaaagtggataagagcgccgttggctttgagtatcaaggcaaaacggagaagcacgagtcccagaaagactatgtgaaagggtttggaggaaaatttggtgtgcagacagacagacaagacaaatgtgcccttggctgggatcaccaggagaaattgcagctgcatgaatcccaaaaagattataagactggttttggaggcaaattcggtgttcagtcggagaggcaggactccgctgctgtggggtttgattacaaggagaagctggccaagcacgagtcccagcaagactactccaaaggattcggcgggaagtatggggtgcagaaggatcggatggataagaatgcgtcaacctttgaggatgtcacccaggtgtcctctgcctaccagaagacagtacctgtcgaagctgtgaccagcaaaacaagtaacatcagagctaactttgaaaacctcgctaaggagaaagagcaggaggacaggcggaaggcggaggcggagagagcccagcggatggccaaggagcggcaggagcaggaagaggccaggaggaagctggaggagcaagccagagccaaaacgcaaacgccccctgtgtcgcccgcacctcagccaaccgaggagaggctgccctcgagccccgtctatgaggatgcggcttccttcaaggcagagctgagctacagaggccctgtgagtgggacggagccggagcccgtgtacagcatggaggccgctgactaccgagaggccagcagccagcagggcctggcctatgccacagaggctgtctatgaaagcgcagaggccccgggccactatcccgcagaggacagcacctacgatgagtacgagaacgatctggggatcacagccgtcgccctgtacgactaccaggctgcgggcgatgatgagatctcatttgaccctgatgacatcatcaccaacatcgagatgattgacgacggctggtggcgcggggtgtgcaagggccggtacgggctcttcccagccaactatgtggagctgcggcagtagggcccccagcccccccccggagctgcgccctggatcctcacactacagatcaggccttctttggttcttgggtggttttgggttttttctgtttttttttttttttttttttttttgaaggtggggaggggaatatacacattgcttttatatttaatacttttgctgatgcttttgaaaatgtttatgccacagaatttgctaatatattgtaatcacattccttaggaggactttggtaattggttttatgcattgatggttttttttttcttttttgccaaattgactgtcacgcggcagcttcagggagctcgcattctcttgtgttcgtgttgccctcgtgcccatcaagtgcagtcgggacctcccaggacaagcacgaggcctcaggtcggccctgtggcgggtaggcaggaaggactgtcccagacgaggggcttcctctagagtctcactgctggggaggagaggactgggcctgatggaagttaacccggagctaagtcacccagagcacaggagctgccatgtcagatgggaaatctgcctatgtcataccgtgacagcccgcaggatcaggtgacttctagcagagaccctggtttttttcctgtgcccactccggcttgtcctcatctctacccatcccctgatgcccaggtcaccgggagggctgctgggagcctctcctgtccccgccgggcagtgtcactgagtccttgaaatcctcccctgccccgcgggtctctggattgggacgcacagtgcagttgaggtctgcgtcgggcttggcttttcacaaaggctgatgtcttaactgtcacccatatggtccctgggccaccgggcagcctggggcggtgtgtgtgccatgtcacagcatggcctctcggccttgggaaggaaggcagtgcctgctctgctgtgagccgccaggaaccctcctcctgtcaatgggggtgtagtatttttgccaaaatatcatgttcaatttcagtagtttgatcagttgaaggctagaagtgtgaagtgcagatgagtgtgtgttcttccccaaggtccccccacagctccaggacaccgctgtcctggcatttgtggccactcactttgtaggaaactcatctccttcctgaggagccgggaggctggaccagtcccgtcgtgcagtcaggtgggcggtgtgtctttccagaaggtcacgtggaaatgtctcgggacttgggtcccggagtgcccgtgaagcgtgtttttgctcctgaggtgcattttctcatcatccttgctttaccacaatgagcaatgaggtcgggttttatatgcaacttattgtatctgaattcctgtagcacacctcataggtatgatttttttaaattaaagaattcagaataaacattttttgatcca

SEQ ID NO: 1125 - DNA, 3272 bp, Homo sapiens
  source 1..3272: mol_type = genomic DNA
ggccgggctagcgcttagccagctgcgggcggacccccgggactcttgcgggccaagacgcgggaggaggcggggcagggggcggggtcgcgcggggacccggatgcggccccgcccccgccctcggaaccggaagtagagcctggtgcctgggagcggctggcgcggcggaatccagggccgacccgggccggaccgaccccaggcggcgacggaatcagtccccaatgcctggaaattcctcattggattactgtgttttaaacagaatttcgtgaacagccttttatctccaagcggaaagaaagatgtggaaagcttcagcaggccacgctgtgtccatcgcccaggatgacgcgggggccgatgactgggagaccgaccctgattttgtgaatgatgtgagtgagaaggagcaaagatggggtgccaagacggtgcagggctccgggcaccaggagcatatcaacatacacaagctgagggagaatgtctttcaagagcatcagacccttaaggagaaggaacttgaaacaggaccaaaagcttcccatggctatggagggaaatttggtgtggaacaagaccgaatggataagtcagctgtcggccacgaatatcagtcgaaactttccaagcactgctcgcaggtggactcggtccgtggcttcggaggcaagtttggtgtccagatggacagagttgatcagtctgctgtaggctttgaataccaggggaagactgagaagcatgcctcccagaaagactactccagtggttttggcggcaagtatggcgtgcaggccgaccgagtagacaagagcgcggtgggcttcgactaccagggcaagacggagaagcacgagtcacagagagattactccaaaggtttcggcggcaaatacggtatcgacaaggacaaagtggataagagcgccgttggctttgagtatcaaggcaaaacggagaagcacgagtcccagaaagactatgtgaaagggtttggaggaaaatttggtgtgcagacagacagacaagacaaatgtgcccttggctgggatcaccaggagaaattgcagctgcatgaatcccaaaaagactactccaaaggattcggcgggaagtatggggtgcagaaggatcggatggataagaatgcgtcaacctttgaggatgtcacccaggtgtcctctgcctaccagaagacagtacctgtcgaagctgtgaccagcaaaacaagtaacatcagagctaactttgaaaacctcgctaaggagaaagagcaggaggacaggcggaaggcggaggcggagagagcccagcggatggccaaggagcggcaggagcaggaagaggccaggaggaagctggaggagcaagccagagccaaaacgcaaacgccccctgtgtcgcccgcacctcagccaaccgaggagaggctgccctcgagccccgtctatgaggatgcggcttccttcaaggcagagctgagctacagaggccctgtgagtgggacggagccggagcccgtgtacagcatggaggccgctgactaccgagaggccagcagccagcagggcctggcctatgccacagaggctgtctatgaaagcgcagaggccccgggccactatcccgcagaggacagcacctacgatgagtacgagaacgatctggggatcacagccgtcgccctgtacgactaccaggctgcgggcgatgatgagatctcatttgaccctgatgacatcatcaccaacatcgagatgattgacgacggctggtggcgcggggtgtgcaagggccggtacgggctcttcccagccaactatgtggagctgcggcagtagggcccccagcccccccccggagctgcgccctggatcctcacactacagatcaggccttctttggttcttgggtggttttgggttttttctgtttttttttttttttttttttttttgaaggtggggaggggaatatacacattgcttttatatttaatacttttgctgatgcttttgaaaatgtttatgccacagaatttgctaatatattgtaatcacattccttaggaggactttggtaattggttttatgcattgatggttttttttttcttttttgccaaattgactgtcacgcggcagcttcagggagctcgcattctcttgtgttcgtgttgccctcgtgcccatcaagtgcagtcgggacctcccaggacaagcacgaggcctcaggtcggccctgtggcgggtaggcaggaaggactgtcccagacgaggggcttcctctagagtctcactgctggggaggagaggactgggcctgatggaagttaacccggagctaagtcacccagagcacaggagctgccatgtcagatgggaaatctgcctatgtcataccgtgacagcccgcaggatcaggtgacttctagcagagaccctggtttttttcctgtgcccactccggcttgtcctcatctctacccatcccctgatgcccaggtcaccgggagggctgctgggagcctctcctgtccccgccgggcagtgtcactgagtccttgaaatcctcccctgccccgcgggtctctggattgggacgcacagtgcagttgaggtctgcgtcgggcttggcttttcacaaaggctgatgtcttaactgtcacccatatggtccctgggccaccgggcagcctggggcggtgtgtgtgccatgtcacagcatggcctctcggccttgggaaggaaggcagtgcctgctctgctgtgagccgccaggaaccctcctcctgtcaatgggggtgtagtatttttgccaaaatatcatgttcaatttcagtagtttgatcagttgaaggctagaagtgtgaagtgcagatgagtgtgtgttcttccccaaggtccccccacagctccaggacaccgctgtcctggcatttgtggccactcactttgtaggaaactcatctccttcctgaggagccgggaggctggaccagtcccgtcgtgcagtcaggtgggcggtgtgtctttccagaaggtcacgtggaaatgtctcgggacttgggtcccggagtgcccgtgaagcgtgtttttgctcctgaggtgcattttctcatcatccttgctttaccacaatgagcaatgaggtcgggttttatatgcaacttattgtatctgaattcctgtagcacacctcataggtatgatttttttaaattaaagaattcagaataaacattttttgatccacttgcgtga

SEQ ID NO: 1126 - DNA, 2247 bp, Homo sapiens
  source 1..2247: mol_type = genomic DNA
agagcctggtgcctgggagcggctggcgcggcggaatccagggccgacccgggccggaccgaccccaggcggcgacggaatcagtccccaatgcctggaaattcctcattggattactgtgttttaaacagaatttcgtgaacagccttttatctccaagcggaaagaaagatgtggaaagcttcagcaggccacgctgtgtccatcgcccaggatgacgcgggggccgatgactgggagaccgaccctgattttgtgaatgatgtgagtgagaaggagcaaagatggggtgccaagacggtgcagggctccgggcaccaggagcatatcaacatacacaagctgagggagaatgtctttcaagagcatcagacccttaaggagaaggaacttgaaacaggaccaaaagcttcccatggctatggagggaaatttggtgtggaacaagaccgaatggataagtcagctgtcggccacgaatatcagtcgaaactttccaagcactgctcgcaggtggactcggtccgtggcttcggaggcaagtttggtgtccagatggacagagttgatcagtctgctgtaggctttgaataccaggggaagactgagaagcatgcctcccagaaagactactccagtggttttggcggcaagtatggcgtgcaggccgaccgagtagacaagagcgcggtgggcttcgactaccagggcaagacggagaagcacgagtcacagagagattactccaaaggtttcggcggcaaatacggtatcgacaaggacaaagtggataagagcgccgttggctttgagtatcaaggcaaaacggagaagcacgagtcccagaaagactatgtgaaagggtttggaggaaaatttggtgtgcagacagacagacaagacaaatgtgcccttggctgggatcaccaggagaaattgcagctgcatgaatcccaaaaagactactccaaaggattcggcgggaagtatggggtgcagaaggatcggatggataagaatgcgtcaacctttgaggatgtcacccaggtgtcctctgcctaccagaagacagtacctgtcgaagctgtgaccagcaaaacaagtaacatcagagctaactttgaaaacctcgctaaggagaaagagcaggaggacaggcggaaggcggaggcggagagagcccagcggatggccaaggagcggcaggagcaggaagaggccaggaggaagctggaggagcaagccagagccaaaacgcaaacgccccctgtgtcgcccgcacctcagccaaccgaggagaggctgccctcgagccccgtctatgaggatgcggcttccttcaaggcagagctgagctacagaggccctgtgagtgggacggagccggagcccgtgtacagcatggaggccgctgactaccgagaggccagcagccagcagggcctggcctatgccacagaggctgtctatgaaagcgcagaggccccgggccactatcccgcagaggacagcacctacgatgagtacgagaacgatctggggatcacagccgtcgccctgtacgactaccaggctgcgggcgatgatgagatctcatttgaccctgatgacatcatcaccaacatcgagatgattgacgacggctggtggcgcggggtgtgcaagggccgcttcagggagctcgcattctcttgtgttcgtgttgccctcgtgcccatcaagtgcagtcgggacctcccaggacaagcacgaggcctcaggtcggccctgtggcgggtaggcaggaaggactgtcccagacgaggggcttcctctagagtctcactgctggggaggagaggactgggcctgatggaagttaacccggagctaagtcacccagagcacaggagctgccatgtcagatgggaaatctgcctatgtcataccgtgacagcccgcaggatcaggaaactcatctccttcctgaggagccgggaggctggaccagtcccgtcgtgcagtcaggtgggcggtgtgtctttccagaaggtcacgtggaaatgtctcgggacttgggtcccggagtgcccgtgaagcgtgtttttgctcctgaggtgcattttctcatcatccttgctttaccacaatgagcaatgaggtcgggttttatatgcaacttattgtatctgaattcctgtagcacacctcataggtatgatttttttaaattaaagaattcagaataaacattttttgatccacttg

SEQ ID NO: 1127 - DNA, 1326 bp, Homo sapiens
  source 1..1326: mol_type = genomic DNA
gcatgaatcccaaaaagcaagagaacaaactgcgattgagcctctttttagcgctcagtagagcaggcgcacaggaagcagatgagaataagcccgtgctgactactccaaaggattcggcgggaagtatggggtgcagaaggatcggatggataagaatgcgtcaacctttgaggatgtcacccaggtgtcctctgcctaccagaagacagtacctgtcgaagctgtgaccagcaaaacaagtaacatcagagctaactttgaaaacctcgctaaggagaaagagcaggaggacaggcggaaggcggaggcggagagagcccagcggatggccaaggagcggcaggagcaggaagaggccaggaggaagctggaggagcaagccagagccaaaacgcaaacgccccctgtgtcgcccgcacctcagccaaccgaggagaggctgccctcgagccccgtctatgaggatgcggcttccttcaaggcagagctgagctacagaggccctgtgagtgggacggagccggagcccgtgtacagcatggaggccgctgactaccgagaggccagcagccagcagggcctggcctatgccacagaggctgtctatgaaagcgcagaggccccgggccactatcccgcagaggacagcacctacgatgagtacgagaacgatctggggatcacagccgtcgccctgtacgactaccaggctgcgggcgatgatgagatctcatttgaccctgatgacatcatcaccaacatcgagatgattgacgacggctggtggcgcggggtgtgcaagggccgcttcagggagctcgcattctcttgtgttcgtgttgccctcgtgcccatcaagtgcagtcgggacctcccaggacaagcacgaggcctcaggtcggccctgtggcgggtaggcaggaaggactgtcccagacgaggggcttcctctagagtctcactgctggggaggagaggactgggcctgatggaagttaacccggagctaagtcacccagagcacaggagctgccatgtcagatgggaaatctgcctatgtcataccgtgacagcccgcaggatcaggtgacttctagcagagaccctggtttttttcctgtgcccactccggcttgtcctcatctctacccatcccctgatgcccaggtcaccgggagggctgctgggagcctctcctgtccccgccgggcagtgtcactgagtccttgaaatcctcccctgccccgcgggtctctggattgggacgcacagtgcagttgaggtctgcgtcgggcttggcttttcacaaaggctgatgtctta

SEQ ID NO: 1128 - DNA, 3267 bp, Homo sapiens
  source 1..3267: mol_type = genomic DNA
ggggcctgtggtcaacgcgatttgcttccaagggacggccaccagtcggcacaggaaaggggcagaggcagtgagttcagcgtgtggacgagggtcaacaagtttgggatcaagcggctgccgctcctccaaaagcgaccgaagcgcgagcagattacccctccgagccagtgtagtaaacacacttcagaaacgtgaggtgccggtggtcacgaggggagcgcgccctccaatgaggagccgggggcggggccgaggccgctgacgcggcggcggcggcagagtcacccgggcagcctcgggaccggtcaccggccggcaaccgtccagcggcctcgaccaccgcctctagcctccgttcccggtcctttctcccgggccgagagacagcgtcgccgacaggggctcattcccctccggttctcctcggtgactcacctcgggcgggccgttttgtctttaggggccgccttggtggggcgaggtttccgtgacgaatctcctggggccgtccgtgccggctcgggccgtcgtggcggctcgagctcctggaacttgctcaggctccggaggtccgaggccctcgaagttatgcgtcgcctccaggcggttgcggcgggcgcgggctcctaaagggcgtcacacccggactccgccgactaggcaacctccattcatctttccactgcgcctccggcgcccccgccttctccggtcccctcctcggagtcattttttcctgttccccctctgccgccctttcctcacgccccgggtgaggcaattctcttggaagcgaaggtgtcggctatgagccggagcctccttccttgaatttctccgtggaggacccgccgcgccccccggcatgggggtgaacgccgtgcactggttccgaaaggggctccggctccacgacaaccccgccctgaaggagtgcattcagggcgccgacaccatccgctgcgtctacatcctggacccctggttcgccggctcctccaatgtgggcatcaacaggtggcgatttttgcttcagtgtcttgaggatcttgatgccaatctacgaaaattaaactcccgtctgtttgtgattcgtggacaaccagcagatgtgtttcccaggcttttcaaggaatggaacattactaaactttcaattgagtatgattctgagccctttggaaaggaacgagacgcagctattaagaaactggcaactgaagctggagtagaagtcattgtaagaatttcacatacattatatgacctagacaagatcatagaactcaatggtggacaaccgcctctaacttataaaagattccagactctcatcagcaaaatggaaccactagagataccagtagagacaattacttcagaagtgatagaaaagtgcacaactcctctgtctgatgaccatgatgagaaatatggagtcccttcactggaagagctaggttttgatacagatggcttatcctctgcagtgtggccaggtggagaaactgaagcacttactcgtttggaaaggcatttggaaagaaaagcttgggtggcaaattttgaaagacctcgaatgaatgcgaattctctgcttgcaagccctactggacttagtccttatctccgatttggttgtttgtcatgtcgactgttttacttcaaactaacagatctctacaaaaaggtaaagaagaacagttcccctcccctttccctttatgggcaactgttatggcgtgaatttttctatacagcagcaacaaataatccacgctttgataaaatggaaggaaaccctatctgtgttcagattccttgggataaaaatcctgaggctttagccaaatgggcggaaggccggacaggctttccatggattgatgccatcatgacacagcttcgtcaggagggttggattcatcatctagccaggcatgcagttgcttgcttcctgacacgaggggacctgtggattagttgggaagaaggaatgaaggtatttgaagaattattgcttgatgcagattggagcataaatgctggaagttggatgtggctgtcttgtagttccttttttcaacagttttttcactgctattgccctgttggttttggtaggagaacagatcccaatggagactatatcaggcgttatttgcctgtcctaagaggcttccctgcaaaatatatctatgatccctggaatgcaccagaaggtatccaaaaggtagccaaatgtttgataggagttaattatcctaaaccaatggtgaaccatgctgaggcaagccgtttgaatatcgaaaggatgaaacagatctatcagcagctttcacgatatagaggactaggtcttctggcatcagtaccttctaatcctaatgggaatggaggcttcatgggatattctgcagaaaatatcccaggttgtagcagcagtggaagttgctctcaagggagtggtattttacactatgctcatggcgacagtcagcaaactcacctgttgaagcaaggaagaagctccatgggcactggtctcagtggtgggaaacgtcctagtcaggaagaggacacacagagtattggtcctaaagtccagagacagagcactaattagaaaacattcaggaggaatactgttgcagctgaaattggtggggagttcaatacttttcaattaagttatttaaaaatattcttcattgatggaaagcagttacatattgaaatatgttgtttctaatgacatttctgtggtttttaactttttaatgaatttcacagaggacaattggtaatttgtatataaagaacttggcaagagaatttgcttaatgtaaatataaacagtcacaattagtatagacccatcgatatatttttgataatttttcatgtatggtaaagttaaaatgacaaattgatattctgatataaaactcaaagttttgaagtcagtgggaaaaaaggaggtttttagactttcttaaaagacgttaaaattttaggacagaattttcttgatgttgtttgatctaactttgcactctttgataataatgttttagataatgtgcgtaatccaaattggtattgtagcctctgttaacacagacagtatatgttttaaactttgatgtaaacctttttagacccaaacttgtggaagtatcatgtgttaagttctctgtctctgtttctttgttcatttattactaaaatgaacttgttattaaagtatatgcaaatatgaaa

SEQ ID NO: 1129 - DNA, 1217 bp, Homo sapiens
  source 1..1217: mol_type = genomic DNA
atgctggaagttggatgtggctgtcttgtagttccttttttcaacttttttcactgctattgccctgttggttttggtaggagaacagatcccaatggagactatatcaggcgttatttgcctgtcctaagaggcttccctgcaaaatatatctatgatccctggaatgcaccagaaggtatccaaaaggtagccaaatgtttgataggagttaattatcctaaaccaatggtgaaccatgctgaggcaagccgtttgaatatcgaaaggatgaaacagatctatcagcagctttcacgatatagaggactaggtcttctggcatcagtaccttctaatcctaatgggaatggaggcttcatgggatattctgcagaaaatatcccaggttgtagcagcagtggaagttgctctcaagggagtggtattttacactatgctcatggcgacagtcagcaaactcacctgttgaagcaaggaagaagctccatgggcactggtctcagtggtgggaaacgtcctagtcaggaagaggacacacagagtattggtcctaaagtccagagacagagcactaattagaaaacattcaggaggaatactgttgcagctgaaattggtggggagttcaatacttttcaattaagttatttaaaaatattcttcattgatggaaagcagttacatattgaaatatgttgtttctaatgacatttctgtggtttttaactttttaatgaatttcacagaggacaattggtaatttgtatataaagaacttggcaagagaatttgcttaatgtaaatataaacagtcacaattagtatagacccatcgatatatttttgataatttttcatgtatggtaaagttaaaatgacaaattgatattctgatataaaactcaaagttttgaagtcagtgggaaaaaaggaggtttttagactttcttaaaagacgttaaaattttaggacagaattttcttgatgttgtttgatctaactttgcactctttgataataatgttttagataatgtgcgtaatccaaattggtattgtagcctctgttaacacagacagtatatgttttaaactttgatgtaaacctttttagacccaaacttgtggaagtatcatgtgttaagttctctgtctctgtttctttgttcatttattactaaaatgaacttgttattaaagtatatgcaaatatg

SEQ ID NO: 1130 - DNA, 2297 bp, Homo sapiens
  source 1..2297: mol_type = genomic DNA
tgtccccgcccgcgcggtcgtcggagcgcggctcagcggcgcggcggagactcggcacggcggcggccaggcgcaggcgggcgggcggagcagcggacggcgccgaggccgccccacgcgccgggctcgcggcggcgcagcgcgccggagtggtcggggcccgcggccgctcgcgcctctcgatgggcagctcgcacttgctcaacaagggcctgccgcttggcgtccgacctccgatcatgaacgggcccctgcacccgcggcccctggtggcattgctggatggccgggactgcacagtggagatgcccatcctgaaggacgtggccactgtggccttctgcgacgcgcagtccacgcaggagatccatgagaaggtcctgaacgaggctgtgggggccctgatgtaccacaccatcactctcaccagggaggacctggagaagttcaaagccctccgcatcatcgtccggattggcagtggttttgacaacatcgacatcaagtcggccggggatttaggcattgccgtctgcaacgtgcccgcggcgtctgtggaggagacggccgactcgacgctgtgccacatcctgaacctgtaccggcgggccacctggctgcaccaggcgctgcgggagggcacacgagtccagagcgtcgagcagatccgcgaggtggcgtccggcgctgccaggatccgcggggagaccttgggcatcatcggacttggtcgcgtggggcaggcagtggcgctgcgggccaaggccttcggcttcaacgtgctcttctacgacccttacttgtcggatggcgtggagcgggcgctggggctgcagcgtgtcagcaccctgcaggacctgctcttccacagcgactgcgtgaccctgcactgcggcctcaacgagcacaaccaccacctcatcaacgacttcaccgtcaagcagatgagacaaggggccttcctggtgaacacagcccggggtggcctggtggatgagaaggcgctggcccaggccctgaaggagggccggatccgcggcgcggccctggatgtgcacgagtcggaacccttcagctttagccagggccctctgaaggatgcacccaacctcatctgcaccccccatgctgcatggtacagcgagcaggcatccatcgagatgcgagaggaggcggcacgggagatccgcagagccatcacaggccggatcccagacagcctgaagaactgtgtcaacaaggaccatctgacagccgccacccactgggccagcatggaccccgccgtcgtgcaccctgagctcaatggggctgcctataggtaccctccgggcgtggtgggcgtggcccccactggcatcccagctgctgtggaaggtatcgtccccagcgccatgtccctgtcccacggcctgccccctgtggcccacccgccccacgccccttctcctggccaaaccgtcaagcccgaggcggatagagaccacgccagtgaccagttgtagcccgggaggagctctccagcctcggcgcctgggcagagggcccggaaaccctcggaccagagtgtgtggaggaggcatctgtgtggtggccctggcactgcagagactggtccgggctgtcaggaggcgggagggggcagcgctgggcctcgtgtcgcttgtcgtcgtccgtcctgtgggcgctctgccctgtgtccttcgcgttcctcgttaagcagaagaagtcagtagttattctcccatgaacgttcttgtctgtgtacagtttttagaacattacaaaggatctgtttgcttagctgtcaacaaaaagaaaacctgaaggagcatttggaagtcaatttgaggtttttttttttgttttttttttttttgtatgttggaacgtgccccagaatgaggcagttggcaaacttctcaggacaatgaatccttcccgtttttctttttatgccacacagtgcattgttttttctacctgcttgtcttatttttagaataatttagaaaaacaaaacaaaggctgtttttcctaattttggcatgaacccccccttgttccaaatgaagacggcatcacgaagcagctccaaaaggaaaagcttgggcggtgcccagcgtgcccgctgcccatcgacgtctgtcctggggacgtggagggtggcagcgtccccgcctgcaccagtgccgtcctgctgatgtggtaggctagcaatattttggttaaaatcatgtttgtgactgtaaccatttgtatgaattattttaaagaaataaaaatcctggaaagag

SEQ ID NO: 1131 - DNA, 2467 bp, Homo sapiens
  source 1..2467: mol_type = genomic DNA
gcgcggctcagcggcgcggcggagactcggcacggcggcggccaggcgcaggcgggcgggcggagcagcggacggcgccgaggccgccccacgcgccgggctcgcggcggcgcagcgcgccggagtggtcggggcccgcggccgctcgcgcctctcgatgggcagctcgcacttgctcaacaagggcctgccgcttgtaagactttgaccccgacgcaggcttcagtgattgccgcggatcagaagcctgagcactttggctcgagacaattaaggacgtgggatgaggctccgagacaggacgcggttctgcctggggatcctgaagataaaaagctttgaaaagtcgaattcatggtcgtggaagctgagcccatattaagagatgtcaggcgtccgacctccgatcatgaacgggcccctgcacccgcggcccctggtggcattgctggatggccgggactgcacagtggagatgcccatcctgaaggacgtggccactgtggccttctgcgacgcgcagtccacgcaggagatccatgagaaggtcctgaacgaggctgtgggggccctgatgtaccacaccatcactctcaccagggaggacctggagaagttcaaagccctccgcatcatcgtccggattggcagtggttttgacaacatcgacatcaagtcggccggggatttaggcattgccgtctgcaacgtgcccgcggcgtctgtggaggagacggccgactcgacgctgtgccacatcctgaacctgtaccggcgggccacctggctgcaccaggcgctgcgggagggcacacgagtccagagcgtcgagcagatccgcgaggtggcgtccggcgctgccaggatccgcggggagaccttgggcatcatcggacttggtcgcgtggggcaggcagtggcgctgcgggccaaggccttcggcttcaacgtgctcttctacgacccttacttgtcggatggcgtggagcgggcgctggggctgcagcgtgtcagcaccctgcaggacctgctcttccacagcgactgcgtgaccctgcactgcggcctcaacgagcacaaccaccacctcatcaacgacttcaccgtcaagcagatgagacaaggggccttcctggtgaacacagcccggggtggcctggtggatgagaaggcgctggcccaggccctgaaggagggccggatccgcggcgcggccctggatgtgcacgagtcggaacccttcagctttagccagggccctctgaaggatgcacccaacctcatctgcaccccccatgctgcatggtacagcgagcaggcatccatcgagatgcgagaggaggcggcacgggagatccgcagagccatcacaggccggatcccagacagcctgaagaactgtgtcaacaaggaccatctgacagccgccacccactgggccagcatggaccccgccgtcgtgcaccctgagctcaatggggctgcctataggtaccctccgggcgtggtgggcgtggcccccactggcatcccagctgctgtggaaggtatcgtccccagcgccatgtccctgtcccacggcctgccccctgtggcccacccgccccacgccccttctcctggccaaaccgtcaagcccgaggcggatagagaccacgccagtgaccagttgtagcccgggaggagctctccagcctcggcgcctgggcagagggcccggaaaccctcggaccagagtgtgtggaggaggcatctgtgtggtggccctggcactgcagagactggtccgggctgtcaggaggcgggagggggcagcgctgggcctcgtgtcgcttgtcgtcgtccgtcctgtgggcgctctgccctgtgtccttcgcgttcctcgttaagcagaagaagtcagtagttattctcccatgaacgttcttgtctgtgtacagtttttagaacattacaaaggatctgtttgcttagctgtcaacaaaaagaaaacctgaaggagcatttggaagtcaatttgaggtttttttttttgttttttttttttttgtatgttggaacgtgccccagaatgaggcagttggcaaacttctcaggacaatgaatccttcccgtttttctttttatgccacacagtgcattgttttttctacctgcttgtcttatttttagaataatttagaaaaacaaaacaaaggctgtttttcctaattttggcatgaacccccccttgttccaaatgaagacggcatcacgaagcagctccaaaaggaaaagcttgggcggtgcccagcgtgcccgctgcccatcgacgtctgtcctggggacgtggagggtggcagcgtccccgcctgcaccagtgccgtcctgctgatgtggtaggctagcaatattttggttaaaatcatgtttgtgactgtaaccatttgtatgaattattttaaagaaataaaaatcctggaaagag

SEQ ID NO: 1132 - DNA, 704 bp, Homo sapiens
  source 1..704: mol_type = genomic DNA
gggaagggtcttgcgcatgcgcgggccgctgcgtgtgcgcgagcgccgcagtctgctctccccgcccgcggcccgtgcagtaagactttgaccccgacgcaggcttcagtgattgccgcggatcagaagcctgagcactttggctcgagacaattaaggacgtgggatgaggctccgagacaggacgcggttctgcctggggatcctgaagataaaaagctttgaaaagtcgaattcatggtcgtggaagctgagcccatattaagagatgtcaggcgtccgacctccgatcatgaacgggcccctgcacccgcggcccctggtggcattgctggatggccgggactgcacagtggagatgcccatcctgaaggacgtggccactgtggccttctgcgacgcgcagtccacgcaggagatccatgagaaggtcctgaacgaggctgtgggggccctgatgtaccacaccatcactctcaccagggaggacctggagaagttcaaagccctccgcatcatcgtccggattggcagtggttttgacaacatcgacatcaagtcggccggggatttaggcattgccgtctgcaacgtgcccgcggcgtctgtggaggagacggccgactcgacgctgtgccacatcctgaacctgtaccggcgggccacctggctgcaccaggcgctgcgggagggcacacgagtcc

SEQ ID NO: 1133 - DNA, 985 bp, Homo sapiens
  source 1..985: mol_type = genomic DNA
ggactttcgggccctcccgggtcggggcttcaccggtagcaggcagggctttgatattaatgcttaaagggaaagcagagctgagctgtcaggacgttggttagctacaaaccctactcttgttaaaagagaaatggggtcggggaaggggttctccagccctgaacttcccgggccgggcaggacgcggtccctccaggagtcggggctcccccgcctggggacgcactggggcaggcgcgcttctcctctcggggtcccatgtgccgccggctctcggacgtaagactttgaccccgacgcaggcttcagtgattgccgcggatcagaagcctgagcactttggctcgagacaattaaggacgtgggatgaggctccgagacaggacgcggttctgcctggggatcctgaagataaaaagctttgaaaagtcgaattcatggtcgtggaagctgagcccatattaagagatgtcaggcgtccgacctccgatcatgaacgggcccctgcacccgcggcccctggtggcattgctggatggccgggactgcacagtggagatgcccatcctgaaggacgtggccactgtggccttctgcgacgcgcagtccacgcaggagatccatgagaaggtcctgaacgaggctgtgggggccctgatgtaccacaccatcactctcaccagggaggacctggagaagttcaaagccctccgcatcatcgtccggattggcagtggttttgacaacatcgacatcaagtcggccggggatttaggcattgccgtctgcaacgtgcccgcggcgtctgtggaggagacggccgactcgacgctgtgccacatcctgaacctgtaccggcgggccacctggctgcaccaggcgctgcgggagggcacacgagtccagagcgtcgagcagatccgcgaggtggcgtccggcgctgccaggatccgcggggagaccttgggcatcatcggacttg

SEQ ID NO: 1134 - DNA, 3669 bp, Homo sapiens
  source 1..3669: mol_type = genomic DNA
aaacccccagttggttgtccctgccgtctcggaagggttagcacacagccaggtctgtttttgatgtatgtaattgaagatttataaagaaaagcttctcctctgcctcatccgcagtcattttttttccaatgccagttcccagcaggcatataaatattggtcgttctcagagctgggatgctgctgggtggtacgagggcccctgggagaacgccgagtccctgcggcctctggggaggagaagctccctgacgtatggcacagcagaggggacttggtttgagccaaaccaccgaccacaggacgctgccctgcccgtggccgccgagccctacctgtaccgggaggccgtttataactcagtggctgcaagaaaggggtctactcctgacttcaccttctacgacagcagacaggcagtgatgtctggtcgcagccccctgctgccacgggagtactacagtgatccgtctggagctgctagggtacccaaagagcctcccctctatcgggacccaggagtcagccggccggtccccagctacggagtgcttggcagcagaacgtcatgggatccaatgcaaggccggtcacctgccctgcaggacgccggtcacctgtaccgggatcctggaggtaaaatgatccctcaggggcggcagacacagagcagggctgcatctcccgggcggtatggacgggagcagcccgacaccaggtatggggcggaggtgcctgcctaccccctcagccaggtcttcagcgacatcagcgaaagacccattgaccctgcccctgccagacaggtggccccgacgtgcctggttgtggaccccagttcagctgctgcccccgaaggcagcacaggggtggccccaggggccctgaatcgtggctacgggcctgcccgggaaagcatcccatccaagatggcttacgagacttacgaagctgacctgtccaccttccagggtcctggtggcaagaggaccgtgctccctgagttcctggcctttctgcgggcggaggggctggcagaggccacgctgggagccctactgcagcagggctttgactccccggccgtcctggctaccctggaggacgcggatatcaagtctgtcgcacccaacctgggccaggcccgtgttctgagccgcctggccaatagctgcaggaccgaaatgcagctgcggaggcaggaccgggggggcccgctgccccgggcgcggtccagcagcttcagccaccgaagcgaactgctccatggtgacttggcttctctgggcgctgcggctcctctgcagacagcatccccccgagctggagacccggctcgccgtccctccagcgcaccatctcagcacctcctggagacggcagccacctattctgcccctggcgtgggcacccatgccccacacttcccctccaactccgggtacagctctcccaccccttgcgccctgacagcgcgtctgagccccacgtaccccctgcaggcaggggtggccttgactaacccgggcccctcaaacccccttcacccaggccccagaacagcctactccacggcatacacggtgcccatggagctgctaaagagggagcgcaacgtggccgcctctccgctgcccagccctcacggcagcccccaggtcttgcggaagccaggtgcacccctggggccatccaccctgccgccggccagccagagcctccacacgcctcactcaccgtaccagaaggtggcccggcgcacaggggcacccatcatcgtgtccaccatgcttgcaccagaaccaagtatccgcccccagatcatgaacggccccctgcacccccgccccctggtggcgctgctggacggccgcgactgcactgtggagatgcccatcctgaaggacctggccactgtggccttctgtgacgcgcagtcgacgcaggaaatccacgagaaggttctaaacgaagccgtgggcgccatgatgtaccacaccatcaccctcaccagggaggacctggagaagttcaaggccctgagagtgatcgtgcggataggcagtggctatgacaacgtggacatcaaggctgccggcgagctcggaattgccgtgtgcaacatcccgtctgcagccgtggaagagacagcggactctaccatctgccacatcctcaacctgtaccggaggaacacgtggctgtaccaggcactgcgggaaggcacgcgggttcagagcgtggagcagatccgcgaggtggcctcgggagcggcccgcatccgtggggagacgctgggcctcattggctttggtcgcacggggcaggcggttgcagttcgagccaaggcctttggattcagcgtcatattttatgacccctacttgcaggatgggatcgagcggtccctgggcgtgcagagggtctacaccctgcaggatttgctgtatcagagcgactgcgtctccttgcactgcaatctcaacgaacataaccaccacctcatcaatgactttaccataaagcagatgaggcagggagcattccttgtgaacgcagcccgtggcggcctggtggacgagaaagccttagcacaagccctcaaggagggcaggatacgaggggcagccctcgacgtgcatgagtcagagcccttcagctttgctcagggtccgttgaaagatgccccgaatctcatctgcactcctcacactgcctggtacagtgagcaggcgtcactggagatgagggaggcagctgccaccgagatccgccgagccatcacaggtcgcatcccagaaagcttaagaaattgtgtgaacaaggaattctttgtcacatcagcgccttggtcagtaatagaccagcaagcaattcatcctgagctcaatggtgccacatacagatatccgccaggcatcgtgggtgtggctccaggaggacttcctgcagccatggaagggatcatccctggaggcatcccagtgactcacaacctcccgacagtggcacatccttcccaagcgccctctcccaaccagcccacaaaacacggggacaatcgagagcaccccaacgagcaatagcagagaatgccagaaggtaatcactcagatacacttgggaccaagagacagtgaaaaatagatgaactaagagaaaaagaatcggatggtctttgtaactgattctggacatatgcatcattgatgttgcagtgttgaaactacaagagctagaaaactgaagatgtcgtctgcttacggaagcgctgaaagactaggatgtgatttattaacgaccaacttctgttattgtgtgttaagtttttcatctgtgcatcaaatcacaaaaagaataaatagagctttttcctttatcagtcccttgggcacagcaggtcctgaacaccctgctctacaatgttgcatcaagagttcaaacaacaaaataaaaaatattaagaggaaatccccatcctgtgacttgagtcccttaagtctacaggggctggtgacctctttttgctaataggaaaatcacattactacaaaatggggagaaaactgtttgcctgtggtagacacctgcacgcataggattgaagacagtacaggctgctgtacagagaagcgcctctcacatctgaactgcatactgagcggg

SEQ ID NO: 1135 - DNA, 3404 bp, Homo sapiens
  source 1..3404: mol_type = genomic DNA
gggagcggcccggaggagccggcggcggcccgaggagcgagggaccgaaccgggagccatgccgcgctgagggggggccgcacagccgccgccaccgccaccgccgccgggtggggtgggaggggcgggagacgccgccgccgccgcctccagggtgggcgcctttcgccgtggacgccgaccgtccgggacgagggtttcatcaccttaaatggttttgaaccaatgaaggtgtattcccttaaaaagacggacagcccatcgtgtgaactatagagtttgtggacagatttatattgggttcatagtggcgtcatgcacgcagactcctgcaagttcccctaagttcttagaggactgctttgccttttgatctgagagttgcaaagttccataaagaatggcccttgtggataagcacaaagtcaagagacagcgattggacagaatttgtgaaggtatccgcccccagatcatgaacggccccctgcacccccgccccctggtggcgctgctggacggccgcgactgcactgtggagatgcccatcctgaaggacctggccactgtggccttctgtgacgcgcagtcgacgcaggaaatccacgagaaggttctaaacgaagccgtgggcgccatgatgtaccacaccatcaccctcaccagggaggacctggagaagttcaaggccctgagagtgatcgtgcggataggcagtggctatgacaacgtggacatcaaggctgccggcgagctcggaattgccgtgtgcaacatcccgtctgcagccgtggaagagacagcggactctaccatctgccacatcctcaacctgtaccggaggaacacgtggctgtaccaggcactgcgggaaggcacgcgggttcagagcgtggagcagatccgcgaggtggcctcgggagcggcccgcatccgtggggagacgctgggcctcattggctttggtcgcacggggcaggcggttgcagttcgagccaaggcctttggattcagcgtcatattttatgacccctacttgcaggatgggatcgagcggtccctgggcgtgcagagggtctacaccctgcaggatttgctgtatcagagcgactgcgtctccttgcactgcaatctcaacgaacataaccaccacctcatcaatgactttaccataaagcagatgaggcagggagcattccttgtgaacgcagcccgtggcggcctggtggacgagaaagccttagcacaagccctcaaggagggcaggatacgaggggcagccctcgacgtgcatgagtcagagcccttcagctttgctcagggtccgttgaaagatgccccgaatctcatctgcactcctcacactgcctggtacagtgagcaggcgtcactggagatgagggaggcagctgccaccgagatccgccgagccatcacaggtcgcatcccagaaagcttaagaaattgtgtgaacaaggaattctttgtcacatcagcgccttggtcagtaatagaccagcaagcaattcatcctgagctcaatggtgccacatacagatatccgccaggcatcgtgggtgtggctccaggaggacttcctgcagccatggaagggatcatccctggaggcatcccagtgactcacaacctcccgacagtggcacatccttcccaagcgccctctcccaaccagcccacaaaacacggggacaatcgagagcaccccaacgagcaatagcagagaatgccagaaggtaatcactcagatacacttgggaccaagagacagtgaaaaatagatgaactaagagaaaaagaatcggatggtctttgtaactgattctggacatatgcatcattgatgttgcagtgttgaaactacaagagctagaaaactgaagatgtcgtctgcttacggaagcgctgaaagactaggatgtgatttattaacgaccaacttctgttattgtgtgttaagtttttcatctgtgcatcaaatcacaaaaagaataaatagagctttttcctttatcagtcccttgggcacagcaggtcctgaacaccctgctctacaatgttgcatcaagagttcaaacaacaaaataaaaaatattaagaggaaatccccatcctgtgacttgagtcccttaagtctacaggggctggtgacctctttttgctaataggaaaatcacattactacaaaatggggagaaaactgtttgcctgtggtagacacctgcacgcataggattgaagacagtacaggctgctgtacagagaagcgcctctcacatctgaactgcatactgagcgggcaagtcggttgtaagttcagtaaaaccctctgatgatgcaaaaaaaaaaaaaaaagtattaagtttcacaagctgtttgtactcaaatatattttctcagtttcagatcctctgctattttattgagtggaaagtcttgagctaaaagggttcaagaagaataatgttgcatttccttatgtctcaggaaacactttttatggtaacttgtcagattgtctatgaacaaacccacttttttagacattgataaagtcttcttttcttcacgtgatattttatacaagaacacttcagatgtattagatgtgactgattttaacaaatcctattagatttgtatcaactagttacatgttctattcatagtcttttgtgaatcattgcctttttgtttaaaaagatggcctattttgagcctttgtataggtacattcctgtttttgtgacaaaagaaaaactttaaaattgtcccaaacagaaaaataatggctatcagaagtatgttttgttttagtgtgagttaccgttactgtatttgtttattgtaaaggtggacatttagcgttcagtgcagttttcaataaaaagtaattaaaatttgttaagttctgaaattcaagtacatctcactaatgtaaatgttctctacttgagatgtttaaggcaattgcattgtcaattagccaatttccagctcttgttactacagggttccataaccagactcaagaccgctgacaattaattacctgtgataacaaaaagtttaattgaaaaatcaaaacctcacacaagtccatcattatcacgtcatgccatccttaagatgcaatggtgggttagtgctaaatcaattcaaaaaaaaacaaagttgctcaacttttagagttctgactttaatctaccccaaagcaaaatgacctggacctggttcaagggagggaagtgaaccttgaaactgttttgccaataacctaacaaacaaaatgatatttacaaagaagtgttgcaaatagtcccatgagttaagagcttgatttaatggatcttctttttaaatagaattaaacctttatactaaaa

SEQ ID NO: 1136 - DNA, 2036 bp, Homo sapiens
  source 1..2036: mol_type = genomic DNA
cgcctcccgcctagctcctgcgcagccagcgggtaccgggagctgcggccagcgccgcttctttcctttccttttctctccgttttccttctccttccccggaggagaaaacaaataaagaagagcaaatagccgggaggcgctcggcatccaggacgttccctcccccgatccaagttggaattagcatcctctcggggggtttcatcaccttaaatggttttgaaccaatgaaggtgtattcccttaaaaagacggacagcccatcgtgtgaactatagagtttgtggacagatttatattgggttcatagtggcgtcatgcacgcagactcctgcaagttcccctaagttcttagaggactgctttgccttttgatctgagagttgcaaagttccataaagaatggcccttgtggataagcacaaagtcaagagacagcgattggacagaatttgtgaaggtatccgcccccagatcatgaacggccccctgcacccccgccccctggtggcgctgctggacggccgcgactgcactgtggagatgcccatcctgaaggacctggccactgtggccttctgtgacgcgcagtcgacgcaggaaatccacgagaaggttctaaacgaagccgtgggcgccatgatgtaccacaccatcaccctcaccagggaggacctggagaagttcaaggccctgagagtgatcgtgcggataggcagtggctatgacaacgtggacatcaaggctgccggcgagctcggaattgccgtgtgcaacatcccgtctgcagccgtggaagagacagcggactctaccatctgccacatcctcaacctgtaccggaggaacacgtggctgtaccaggcactgcgggaaggcacgcgggttcagagcgtggagcagatccgcgaggtggcctcgggagcggcccgcatccgtggggagacgctgggcctcattggctttggtcgcacggggcaggcggttgcagttcgagccaaggcctttggattcagcgtcatattttatgacccctacttgcaggatgggatcgagcggtccctgggcgtgcagagggtctacaccctgcaggatttgctgtatcagagcgactgcgtctccttgcactgcaatctcaacgaacataaccaccacctcatcaatgactttaccataaagcagatgaggcagggagcattccttgtgaacgcagcccgtggcggcctggtggacgagaaagccttagcacaagccctcaaggagggcaggatacgaggggcagccctcgacgtgcatgagtcagagcccttcagctttgctcagggtccgttgaaagatgccccgaatctcatctgcactcctcacactgcctggtacagtgagcaggcgtcactggagatgagggaggcagctgccaccgagatccgccgagccatcacaggtcgcatcccagaaagcttaagaaattgtgtgaacaaggaattctttgtcacatcagcgccttggtcagtaatagaccagcaagcaattcatcctgagctcaatggtgccacatacagatatccgccaggcatcgtgggtgtggctccaggaggacttcctgcagccatggaagggatcatccctggaggcatcccagtgactcacaacctcccgacagtggcacatccttcccaagcgccctctcccaaccagcccacaaaacacggggacaatcgagagcaccccaacgagcaatagcagagaatgccagaaggtaatcactcagatacacttgggaccaagagacagtgaaaaatagatgaactaagagaaaaagaatcggatggtctttgtaactgattctggacatatgcatcattgatgttgcagtgttgaaactacaagagctagaaaactgaagatgtcgtctgcttacggaagcgctgaaagactaggatgtgatttattaacgaccaacttctgttattgtgtgttaagtttttcatctgtgcatcaaatcacaaaaagaataaatagagctttttccttta

SEQ ID NO: 1137 - DNA, 2014 bp, Homo sapiens
  source 1..2014: mol_type = genomic DNA
ggagccggcggcggcccgaggagcgagggaccgaaccgggagccatgccgcgctgagggggggccgcacagccgccgccaccgccaccgccgccgggtggggtgggaggggcgggagacgccgccgccgccgcctccagggtgggcgcctttcgccgtggacgccgaccgtccgggacgagatggagaaaacaaaggattcagattgaaggactgctcagacaccctccgaagaggtggccctgcctgcgctcctcctggctgcagagtaccccaccagcgcggttcatagtggcgtcatgcacgcagactcctgcaagttcccctaagttcttagaggactgctttgccttttgatctgagagttgcaaagttccataaagaatggcccttgtggataagcacaaagtcaagagacagcgattggacagaatttgtgaaggtatccgcccccagatcatgaacggccccctgcacccccgccccctggtggcgctgctggacggccgcgactgcactgtggagatgcccatcctgaaggacctggccactgtggccttctgtgacgcgcagtcgacgcaggaaatccacgagaaggttctaaacgaagccgtgggcgccatgatgtaccacaccatcaccctcaccagggaggacctggagaagttcaaggccctgagagtgatcgtgcggataggcagtggctatgacaacgtggacatcaaggctgccggcgagctcggaattgccgtgtgcaacatcccgtctgcagccgtggaagagacagcggactctaccatctgccacatcctcaacctgtaccggaggaacacgtggctgtaccaggcactgcgggaaggcacgcgggttcagagcgtggagcagatccgcgaggtggcctcgggagcggcccgcatccgtggggagacgctgggcctcattggctttggtcgcacggggcaggcggttgcagttcgagccaaggcctttggattcagcgtcatattttatgacccctacttgcaggatgggatcgagcggtccctgggcgtgcagagggtctacaccctgcaggatttgctgtatcagagcgactgcgtctccttgcactgcaatctcaacgaacataaccaccacctcatcaatgactttaccataaagcagatgaggcagggagcattccttgtgaacgcagcccgtggcggcctggtggacgagaaagccttagcacaagccctcaaggagggcaggatacgaggggcagccctcgacgtgcatgagtcagagcccttcagctttgctcagggtccgttgaaagatgccccgaatctcatctgcactcctcacactgcctggtacagtgagcaggcgtcactggagatgagggaggcagctgccaccgagatccgccgagccatcacaggtcgcatcccagaaagcttaagaaattgtgtgaacaaggaattctttgtcacatcagcgccttggtcagtaatagaccagcaagcaattcatcctgagctcaatggtgccacatacagatatccgccaggcatcgtgggtgtggctccaggaggacttcctgcagccatggaagggatcatccctggaggcatcccagtgactcacaacctcccgacagtggcacatccttcccaagcgccctctcccaaccagcccacaaaacacggggacaatcgagagcaccccaacgagcaatagcagagaatgccagaaggtaatcactcagatacacttgggaccaagagacagtgaaaaatagatgaactaagagaaaaagaatcggatggtctttgtaactgattctggacatatgcatcattgatgttgcagtgttgaaactacaagagctagaaaactgaagatgtcgtctgcttacggaagcgctgaaagactaggatgtgatttattaacgaccaacttctgttattgtgtgttaagtttttcatctgtgcatcaaatcacaaaaagaataaatagagctttttccttta

SEQ ID NO: 1138 - DNA, 578 bp, Homo sapiens
  source 1..578: mol_type = genomic DNA
aggagcgaggagtgagcgagcggcgaccctcacctcgcctcccgcctagctcctgcgcagccagcgggtaccgggagctgcggccagcgccgcttctttcctttccttttctctccgttttccttctccttccccggaggagaaaacaaataaagaagagcaaatagccgggaggcgctcggcatccaggacgttccctcccccgatccaagttggaattagcatcctctcggggggtttcatcaccttaaatggttttgaaccaatgaaggtgtattcccttaaaaagacggacagcccatcgtgtgaactatagagtttgtggacagatttatattgaatcccccacagcggtccacgccccttgccaacttccttccactatcctggttctgttgttactcctgccgactgcagtgctgttccgtgagcttcttgaatgacatcgtacagtatctccgacgcacaggttcatagtggcgtcatgcacgcagactcctgcaagttcccctaagttcttagaggactgctttgccttttgatctgagagttgcaaagttccataaagaatggccctt

SEQ ID NO: 1139 - DNA, 1918 bp, Homo sapiens
  source 1..1918: mol_type = genomic DNA
aaatccccgctctgcgtgctcgtggtggaggctgctggcaatggcctacgtcgtcataccgggcttccttgccctgtccgggggtttcatcaccttaaatggttttgaaccaatgaaggtgtattcccttaaaaagacggacagcccatcgtgtgaactatagagtttgtggacagatttatattgggttcatagtggcgtcatgcacgcagactcctgcaagttcccctaagttcttagaggactgctttgccttttgatctgagagttgcaaagttccataaagaatggcccttgtggataagcacaaagtcaagagacagcgattggacagaatttgtgaaggtatccgcccccagatcatgaacggccccctgcacccccgccccctggtggcgctgctggacggccgcgactgcactgtggagatgcccatcctgaaggacctggccactgtggccttctgtgacgcgcagtcgacgcaggaaatccacgagaaggttctaaacgaagccgtgggcgccatgatgtaccacaccatcaccctcaccagggaggacctggagaagttcaaggccctgagagtgatcgtgcggataggcagtggctatgacaacgtggacatcaaggctgccggcgagctcggaattgccgtgtgcaacatcccgtctgcagccgtggaagagacagcggactctaccatctgccacatcctcaacctgtaccggaggaacacgtggctgtaccaggcactgcgggaaggcacgcgggttcagagcgtggagcagatccgcgaggtggcctcgggagcggcccgcatccgtggggagacgctgggcctcattggctttggtcgcacggggcaggcggttgcagttcgagccaaggcctttggattcagcgtcatattttatgacccctacttgcaggatgggatcgagcggtccctgggcgtgcagagggtctacaccctgcaggatttgctgtatcagagcgactgcgtctccttgcactgcaatctcaacgaacataaccaccacctcatcaatgactttaccataaagcagatgaggcagggagcattccttgtgaacgcagcccgtggcggcctggtggacgagaaagccttagcacaagccctcaaggagggcaggatacgaggggcagccctcgacgtgcatgagtcagagcccttcagctttgctcagggtccgttgaaagatgccccgaatctcatctgcactcctcacactgcctggtacagtgagcaggcgtcactggagatgagggaggcagctgccaccgagatccgccgagccatcacaggtcgcatcccagaaagcttaagaaattgtgtgaacaaggaattctttgtcacatcagcgccttggtcagtaatagaccagcaagcaattcatcctgagctcaatggtgccacatacagatatccgccaggcatcgtgggtgtggctccaggaggacttcctgcagccatggaagggatcatccctggaggcatcccagtgactcacaacctcccgacagtggcacatccttcccaagcgccctctcccaaccagcccacaaaacacggggacaatcgagagcaccccaacgagcaatagcagagaatgccagaaggtaatcactcagatacacttgggaccaagagacagtgaaaaatagatgaactaagagaaaaagaatcggatggtctttgtaactgattctggacatatgcatcattgatgttgcagtgttgaaactacaagagctagaaaactgaagatgtcgtctgcttacggaagcgctgaaagactaggatgtgatttattaacgaccaacttctgttattgtgtgttaagtttttcatctgtgcatcaaatcacaaaaagaataaatagagctttttccttta

SEQ ID NO: 1140 - DNA, 3208 bp, Homo sapiens
  source 1..3208: mol_type = genomic DNA
aggaggagggccgggcgggcaggggaggaggaggaggcgggcgccgtgtcgcacgcagctccaggcggggcagccccggtagctgagggacgcagctagaccttggcgggacggggctttcgccggggcccaggcccagggaccaggcggaggcgtcgcgggagcctttggggcaccacagagatgcgggtttgcctgcaatgagatttcattctctacatttaaaggacatcctttctgagctgctgtgaataaatttggaatggtactgtatattttcatctaatggagaactagctgtactttgaataaggattgctgcactggacgactttagaacatccctcacaatgtcgtcaacccggagccagaacccccacggcctgaagcagattggcctggaccagatctgggacgacctcagagccggcatccagcaggtgtacacacggcagagcatggccaagtccagatatatggagctctacactcatgtttataactactgtactagtgttcaccagtcaaaccaagcacgaggagctggagttcctccttctaagtcgaaaaaggggcagacacctggaggagctcagtttgttggcctggaattatataaacgacttaaggaatttttgaagaattacttgacaaatcttcttaaggatggagaagatttgatggatgagagtgtactgaaattctacactcaacaatgggaagattatcgattttcaagcaaagtgctgaatggaatttgtgcctacctcaatagacattgggttcgccgtgaatgtgacgaaggacgaaaaggaatatatgaaatctattcgcttgcattggtgacttggagagactgtctgttcaggccactgaataaacaggtaacaaatgctgttttaaagctgattgaaaaggaaaggaatggtgaaaccatcaatacaagattgattagtggagttgtacagtcttacgtggaattggggctgaatgaagatgatgcatttgcaaagggccctacgttaacagtgtataaagaatcctttgaatctcaatttttggctgacacagagagattttataccagagagagtactgaattcttgcagcagaacccagttactgaatatatgaaaaaggcagaggctcgtctgcttgaggaacaacgaagagttcaggtttaccttcatgaaagcacacaagatgaattagcaaggaaatgtgaacaagtcctcattgaaaaacacttggaaattttccacacagaatttcagaatttattggatgctgacaaaaatgaagatttgggacgcatgtataatcttgtatctagaatccaggatggcctaggagaattgaaaaaactgttggagacacacattcataatcagggtcttgcagccattgaaaagtgtggagaagctgctttaaatgaccccaaaatgtatgtacagacagtgcttgatgttcataaaaaatacaatgccctggtaatgtctgcattcaacaatgacgctggctttgtggctgctcttgataaggcttgtggtcgcttcataaacaacaacgcggttaccaagatggcccaatcatccagtaaatcccctgagttgctggctcgatactgtgactccttgttgaagaaaagttccaagaacccagaggaggcagaactagaagacacactcaatcaagtgatggttgtcttcaagtacatagaagacaaagacgtatttcagaagttctatgcgaagatgctcgccaagaggctcgtccaccagaacagtgcaagtgacgatgccgaagccagcatgatctccaagttaaagcaagcttgcgggttcgagtacacctctaaacttcagcgcatgtttcaagacattggcgtgagcaaagatctgaacgagcaattcaaaaagcacttgacaaactcagaacccctagacttggatttcagcattcaagtgctgagctccgggtcctggcccttccagcagtcttgtacatttgccttgccgtcagagttggaacgtagttatcagcgattcacagctttctacgccagccgccacagtggccgaaaattgacgtggttatatcagttgtctaaaggagaattggtaactaactgcttcaaaaacagatatactttgcaggcgtcgacattccagatggctatcctgcttcagtacaacacggaagatgcctacactgtgcagcagctgaccgacagcactcaaattaaaatggacattttggcgcaagttttacagattttattaaagtcgaagctattggtcttggaagatgaaaatgcaaatgttgatgaggtggaattgaagccagataccttaataaaattatatcttggttataaaaataagaaattaagggttaacatcaatgtgccaatgaaaaccgaacagaagcaggaacaagaaaccacacacaaaaacatcgaggaagaccgcaaactactgattcaggcggccatcgtgagaatcatgaagatgaggaaggttctgaaacaccagcagttacttggcgaggtcctcactcagctgtcctccaggttcaaacctcgagtccctgtgatcaagaaatgcattgacattctaattgagaaagaatatttggagcgagtggatggtgaaaaggacacctacagttacttggcttaacccttctggaagggtctgactgtgtgacccgcagcaaatagttcatgttggaaagaatgaaaacaactcaagttcatagcagccagcctgccgccattggacctcccttttaaaaactgagaccaagactcccatcagctggtctcggatttacatcggaactgctcaggattgatacatttcaagtctgtaaatacggacaccaacgccatttaccctaatttaagaacagcggggactgaccctccgtgccgagggctgcatgctaccgcactaagtcaatacatgggctccccgattcgcagctgtcgtcttggcagcacttgtcacgttggcagcactttgagagcaagtctgagtggacccacatgtaacctgctatgaaaaccatttgtatagtgtgtttcattttttaatgtgtgaaaataaagaaaattaaaggatttctgtacaagtcgcattgggttttgttttaagttttactaatttctatatgtaaataaaagatataatgattgtgcaaattt

SEQ ID NO: 1141 - DNA, 2857 bp, Homo sapiens
  source 1..2857: mol_type = genomic DNA
actattttatatcacgactcatgccatccgtatgtgtaatcaaagccttctaagtcttgatatgtccttacaaagacgaaggatagagtgaatgtcaaaatttgccaaacaggagttactgaaagtctgaaggggaaagcctagttaggttttatcttagaagtgatttttaaaacgaaacacgcagataagctcgagctttctggagccgattcctaaggccttgcaggtggtaagggggtcgagaattggctgaggttcctcggaagtccgcgccgattcggagggccacctctgactttctgatctggggtgcaacccccagtccctgtcccggtcgacaaaggtgtggagtcaggttccaggtttgcctgcaatgagatttcattctctacatttaaaggacatcctttctgagctgctgtgaataaatttggaatggtactgtatattttcatctaatggagaactagctgtactttgaataaggattgctgcactggacgactttagaacatccctcacaatgtcgtcaacccggagccagaacccccacggcctgaagcagattggcctggaccagatctgggacgacctcagagccggcatccagcaggtgtacacacggcagagcatggccaagtccagatatatggagctctacactcatgtttataactactgtactagtgttcaccagtcaaaccaagcacgaggagctggagttcctccttctaagtcgaaaaaggggcagacacctggaggagctcagtttgttggcctggaattatataaacgacttaaggaatttttgaagaattacttgacaaatcttcttaaggatggagaagatttgatggatgagagtgtactgaaattctacactcaacaatgggaagattatcgattttcaagcaaagtgctgaatggaatttgtgcctacctcaatagacattgggttcgccgtgaatgtgacgaaggacgaaaaggaatatatgaaatctattcgcttgcattggtgacttggagagactgtctgttcaggccactgaataaacaggtaacaaatgctgttttaaagctgattgaaaaggaaaggaatggtgaaaccatcaatacaagattgattagtggagttgtacagtcttacgtggaattggggctgaatgaagatgatgcatttgcaaagggccctacgttaacagtgtataaagaatcctttgaatctcaatttttggctgacacagagagattttataccagagagagtactgaattcttgcagcagaacccagttactgaatatatgaaaaaggcagaggctcgtctgcttgaggaacaacgaagagttcaggtttaccttcatgaaagcacacaagatgaattagcaaggaaatgtgaacaagtcctcattgaaaaacacttggaaattttccacacagaatttcagaatttattggatgctgacaaaaatgaagatttgggacgcatgtataatcttgtatctagaatccaggatggcctaggagaattgaaaaaactgttggagacacacattcataatcagggtcttgcagccattgaaaagtgtggagaagctgctttaaatgaccccaaaatgtatgtacagacagtgcttgatgttcataaaaaatacaatgccctggtaatgtctgcattcaacaatgacgctggctttgtggctgctcttgataaggcttgtggtcgcttcataaacaacaacgcggttaccaagatggcccaatcatccagtaaatcccctgagttgctggctcgatactgtgactccttgttgaagaaaagttccaagaacccagaggaggcagaactagaagacacactcaatcaagtgatggttgtcttcaagtacatagaagacaaagacgtatttcagaagttctatgcgaagatgctcgccaagaggctcgtccaccagaacagtgcaagtgacgatgccgaagccagcatgatctccaagttaaagcaagcttgcgggttcgagtacacctctaaacttcagcgcatgtttcaagacattggcgtgagcaaagatctgaacgagcaattcaaaaagcacttgacaaactcagaacccctagacttggatttcagcattcaagtgctgagctccgggtcctggcccttccagcagtcttgtacatttgccttgccgtcagagttggaacgtagttatcagcgattcacagctttctacgccagccgccacagtggccgaaaattgacgtggttatatcagttgtctaaaggagaattggtaactaactgcttcaaaaacagatatactttgcaggcgtcgacattccagatggctatcctgcttcagtacaacacggaagatgcctacactgtgcagcagctgaccgacagcactcaaattaaaatggacattttggcgcaagttttacagattttattaaagtcgaagctattggtcttggaagatgaaaatgcaaatgttgatgaggtggaattgaagccagataccttaataaaattatatcttggttataaaaataagaaattaagggttaacatcaatgtgccaatgaaaaccgaacagaagcaggaacaagaaaccacacacaaaaacatcgaggaagaccgcaaactactgattcaggcggccatcgtgagaatcatgaagatgaggaaggttctgaaacaccagcagttacttggcgaggtcctcactcagctgtcctccaggttcaaacctcgagtccctgtgatcaagaaatgcattgacattctaattgagaaagaatatttggagcgagtggatggtgaaaaggacacctacagttacttggcttaa

SEQ ID NO: 1142 - DNA, 2848 bp, Homo sapiens
  source 1..2848: mol_type = genomic DNA
agctccaggcggggcagccccggtagctgagggacgcagctagaccttggcgggacggggctttcgccggggcccaggcccagggaccaggcggaggcgtcgcgggagcctttggggcaccacagagatgcgggtttgcctgcaatgagatttcattctctacatttaaaggacatcctttctgagctgctgtgaataaatttggaatggtactgtatattttcatctaatggagaactagctgtactttgaataaggattgctgcactggacgactttagaacatccctcacaatgtcgtcaacccggagccagaacccccacggcctgaagcagattggcctggaccagatctgggacgacctcagagccggcatccagcaggtgtacacacggcagagcatggccaagtccagatatatggagctctacactcaacaatgggaagattatcgattttcaagcaaagtgctgaatggaatttgtgcctacctcaatagacattgggttcgccgtgaatgtgacgaaggacgaaaaggaatatatgaaatctattcgcttgcattggtgacttggagagactgtctgttcaggccactgaataaacaggtaacaaatgctgttttaaagctgattgaaaaggaaaggaatggtgaaaccatcaatacaagattgattagtggagttgtacagtcttacgtggaattggggctgaatgaagatgatgcatttgcaaagggccctacgttaacagtgtataaagaatcctttgaatctcaatttttggctgacacagagagattttataccagagagagtactgaattcttgcagcagaacccagttactgaatatatgaaaaaggcagaggctcgtctgcttgaggaacaacgaagagttcaggtttaccttcatgaaagcacacaagatgaattagcaaggaaatgtgaacaagtcctcattgaaaaacacttggaaattttccacacagaatttcagaatttattggatgctgacaaaaatgaagatttgggacgcatgtataatcttgtatctagaatccaggatggcctaggagaattgaaaaaactgttggagacacacattcataatcagggtcttgcagccattgaaaagtgtggagaagctgctttaaatgaccccaaaatgtatgtacagacagtgcttgatgttcataaaaaatacaatgccctggtaatgtctgcattcaacaatgacgctggctttgtggctgctcttgataaggcttgtggtcgcttcataaacaacaacgcggttaccaagatggcccaatcatccagtaaatcccctgagttgctggctcgatactgtgactccttgttgaagaaaagttccaagaacccagaggaggcagaactagaagacacactcaatcaagtgatggttgtcttcaagtacatagaagacaaagacgtatttcagaagttctatgcgaagatgctcgccaagaggctcgtccaccagaacagtgcaagtgacgatgccgaagccagcatgatctccaagttaaagcaagcttgcgggttcgagtacacctctaaacttcagcgcatgtttcaagacattggcgtgagcaaagatctgaacgagcaattcaaaaagcacttgacaaactcagaacccctagacttggatttcagcattcaagtgctgagctccgggtcctggcccttccagcagtcttgtacatttgccttgccgtcagagttggaacgtagttatcagcgattcacagctttctacgccagccgccacagtggccgaaaattgacgtggttatatcagttgtctaaaggagaattggtaactaactgcttcaaaaacagatatactttgcaggcgtcgacattccagatggctatcctgcttcagtacaacacggaagatgcctacactgtgcagcagctgaccgacagcactcaaattaaaatggacattttggcgcaagttttacagattttattaaagtcgaagctattggtcttggaagatgaaaatgcaaatgttgatgaggtggaattgaagccagataccttaataaaattatatcttggttataaaaataagaaattaagggttaacatcaatgtgccaatgaaaaccgaacagaagcaggaacaagaaaccacacacaaaaacatcgaggaagaccgcaaactactgattcaggcggccatcgtgagaatcatgaagatgaggaaggttctgaaacaccagcagttacttggcgaggtcctcactcagctgtcctccaggttcaaacctcgagtccctgtgatcaagaaatgcattgacattctaattgagaaagaatatttggagcgagtggatggtgaaaaggacacctacagttacttggcttaacccttctggaagggtctgactgtgtgacccgcagcaaatagttcatgttggaaagaatgaaaacaactcaagttcatagcagccagcctgccgccattggacctcccttttaaaaactgagaccaagactcccatcagctggtctcggatttacatcggaactgctcaggattgatacatttcaagtctgtaaatacggacaccaacgccatttaccctaatttaagaacagcggggactgaccctccgtgccgagggctgcatgctaccgcactaagtcaatacatgggctccccgattcgcagctgtcgtcttggcagcacttgtcacgttggcagcactttgagagcaagtctgagtggacccacatgtaacctgctatgaaaaccatttgtatagtgtgtttcattttttaatgtgtgaaaataaagaaaattaaagg

SEQ ID NO: 1143 - DNA, 2930 bp, Homo sapiens
  source 1..2930: mol_type = genomic DNA
ggaggcgggcgccgtgtcgcacgcagctccaggcggggcagccccggtagctgagggacgcagctagaccttggcgggacggggctttcgccggggcccaggcccagggaccaggcggaggcgtcgcgggagcctttggggcaccacagagatgcgggtttgcctgcaatgagatttcattctctacatttaaaggacatcctttctgagctgctgtgaataaatttggaatggtactgtatattttcatctaatggagaactagctgtactttgaataaggattgctgcactggacgactttagaacatccctcacaatgtcgtcaacccggagccagaacccccacggcctgaagcagatatatggagctctacactcatgtttataactactgtactagtgttcaccagtcaaaccaagcacgaggagctggagttcctccttctaagtcgaaaaaggggcagacacctggaggagctcagtttgttggcctggaattatataaacgacttaaggaatttttgaagaattacttgacaaatcttcttaaggatggagaagatttgatggatgagagtgtactgaaattctacactcaacaatgggaagattatcgattttcaagcaaagtgctgaatggaatttgtgcctacctcaatagacattgggttcgccgtgaatgtgacgaaggacgaaaaggaatatatgaaatctattcgcttgcattggtgacttggagagactgtctgttcaggccactgaataaacaggtaacaaatgctgttttaaagctgattgaaaaggaaaggaatggtgaaaccatcaatacaagattgattagtggagttgtacagtcttacgtggaattggggctgaatgaagatgatgcatttgcaaagggccctacgttaacagtgtataaagaatcctttgaatctcaatttttggctgacacagagagattttataccagagagagtactgaattcttgcagcagaacccagttactgaatatatgaaaaaggcagaggctcgtctgcttgaggaacaacgaagagttcaggtttaccttcatgaaagcacacaagatgaattagcaaggaaatgtgaacaagtcctcattgaaaaacacttggaaattttccacacagaatttcagaatttattggatgctgacaaaaatgaagatttgggacgcatgtataatcttgtatctagaatccaggatggcctaggagaattgaaaaaactgttggagacacacattcataatcagggtcttgcagccattgaaaagtgtggagaagctgctttaaatgaccccaaaatgtatgtacagacagtgcttgatgttcataaaaaatacaatgccctggtaatgtctgcattcaacaatgacgctggctttgtggctgctcttgataaggcttgtggtcgcttcataaacaacaacgcggttaccaagatggcccaatcatccagtaaatcccctgagttgctggctcgatactgtgactccttgttgaagaaaagttccaagaacccagaggaggcagaactagaagacacactcaatcaagtgatggttgtcttcaagtacatagaagacaaagacgtatttcagaagttctatgcgaagatgctcgccaagaggctcgtccaccagaacagtgcaagtgacgatgccgaagccagcatgatctccaagttaaagcaagcttgcgggttcgagtacacctctaaacttcagcgcatgtttcaagacattggcgtgagcaaagatctgaacgagcaattcaaaaagcacttgacaaactcagaacccctagacttggatttcagcattcaagtgctgagctccgggtcctggcccttccagcagtcttgtacatttgccttgccgtcagagttggaacgtagttatcagcgattcacagctttctacgccagccgccacagtggccgaaaattgacgtggttatatcagttgtctaaaggagaattggtaactaactgcttcaaaaacagatatactttgcaggcgtcgacattccagatggctatcctgcttcagtacaacacggaagatgcctacactgtgcagcagctgaccgacagcactcaaattaaaatggacattttggcgcaagttttacagattttattaaagtcgaagctattgtaagaaattaagggttaacatcaatgtgccaatgaaaaccgaacagaagcaggaacaagaaaccacacacaaaaacatcgaggaagaccgcaaactactgattcaggcggccatcgtgagaatcatgaagatgaggaaggttctgaaacaccagcagttacttggcgaggtcctcactcagctgtcctccaggttcaaacctcgagtccctgtgatcaagaaatgcattgacattctaattgagaaagaatatttggagcgagtggatggtgaaaaggacacctacagttacttggcttaacccttctggaagggtctgactgtgtgacccgcagcaaatagttcatgttggaaagaatgaaaacaactcaagttcatagcagccagcctgccgccattggacctcccttttaaaaactgagaccaagactcccatcagctggtctcggatttacatcggaactgctcaggattgatacatttcaagtctgtaaatacggacaccaacgccatttaccctaatttaagaacagcggggactgaccctccgtgccgagggctgcatgctaccgcactaagtcaatacatgggctccccgattcgcagctgtcgtcttggcagcacttgtcacgttggcagcactttgagagcaagtctgagtggacccacatgtaacctgctatgaaaaccatttgtatagtgtgtttcattttttaatgtgtgaaaataaagaaaattaaaggat

SEQ ID NO: 1144 - DNA, 2787 bp, Homo sapiens
  source 1..2787: mol_type = genomic DNA
attgctttccgggtggcgggggggatttggcagcagcggaagaaggagaccggagggtgtgtgttgggcaaagccggaggcagaggaggacgattgttttacggatcccgtgatcggcccgtccttctcccctttccccccctccctaccgcccctgtcccgccggggagcggcggcggccttggactttgctgtctttcctcgcggagacagatttcaacactacacttgcacaatgtctttgaaaccaagagtagtagattttgatgaaacatggaacaaacttttgacgacaataaaagccgtggtcatgttggaatacgtcgaaagagcaacatggaatgaccgtttctcagatatctatgctttatgtgtggcctatcctgaaccccttggagaaagactttatacagaaactaagatttttttggaaaatcatgttcggcatttgcataagagagttttggagtcagaagaacaagtacttgttatgtatcataggtactgggaagaatacagcaagggtgcagactatatggactgcttatataggtatctcaacacccagtttattaaaaagaataaattaacagaagcggaccttcagtatggctatggtggtgtagatatgaatgaaccacttatggaaataggagagctagcattggatatgtggaggaaattgatggttgaaccacttcaggccatccttatccgaatgctgctccgagaaatcaaaaatgatcgtggtggagaagacccaaaccagaaagtaatccatggggttattaactcctttgttcatgttgaacagtataagaaaaaattccccttaaagttttatcaggaaatttttgagtctccctttctgactgaaacaggagagtattacaaacaagaagcttcaaatttattacaagaatcaaactgctcacagtatatggaaaaggttctaggtagattaaaagatgaagaaattcgatgtcgaaaatacctacatccaagttcatatactaaggtgattcatgaatgtcaacaacgaatggtagcagaccacttacagtttttacatgcagaatgtcataatataattcgacaagagaaaaaaaatgacatggcaaatatgtacgtcttactccgtgctgtgtccactggtttacctcatatgattcaggagctgcaaaaccacatccatgatgagggccttcgagcaaccagcaaccttactcaggaaaacatgccaacactatttgtggagtcagttttggaagtgcatggtaaatttgttcagcttatcaacactgttttgaatggtgatcagcattttatgagtgcgttggataaggcccttacgtcagttgtaaattacagagaacctaagtctgtttgcaaagcacctgaactgcttgctaagtactgtgacaacttactgaagaagtcagcgaaagggatgacagagaatgaagtggaagacaggctcacgagcttcatcacagtgttcaaatacattgatgacaaggacgtctttcaaaagttctacgcaagaatgctggcaaaacgtttaattcatgggttatccatgtctatggactctgaagaagccatgatcaacaaattaaagcaagcctgtggttatgagtttaccagcaagctacatcggatgtatacagatatgagtgtcagcgctgatctcaacaataagttcaacaattttatcaaaaaccaagacacagtaatagatttgggaattagttttcaaatatatgttctacaggctggtgcgtggcctcttactcaggctccttcatctacgtttgcaattccccaggaattagaaaaaagtgtacagatgtttgaattattttatagccaacatttcagtggaaggaaacttacatggttacattatctgtgtacaggtgaagttaaaatgaactatttgggcaaaccatatgtagccatggttacaacataccaaatggcagttcttcttgcctttaacaacagtgaaactgtcagttataaagagcttcaggacagcactcagatgaatgaaaaggaactgacaaaaacaatcaaatcattacttgatgtgaaaatgattaaccatgattcagaaaaggaagatattgatgcagaatcttcgttttcattaaatatgaactttagcagtaaaagaacaaaatttaaaattactacatcaatgcagaaagacacaccacaagtgattagccagtcaagagctaggtttaatcccagtatcagcatgattaagaagtgtattgaagttctgatagacaaacaatacatagaacgcagccaggcgtcggcagatgaatacagctacgtcgcgtgatgtcgctctcctccagcgtggtgtgagaagatcattgccatcaccatttggtgtgttcctgtgggaaaaagcaggactgtgcctccataatttggtcatttggcagcccctgttttctgctgtttacaacatcaccagtgccacgtcatgagcgtcaaagaaaatgcctagagatatttcaagctcatgtcattatgacatttcttaaaactttattaaaagaatgagtgaagtattgctgaaaagtggaaattcggttgggtaccatgctttttctccccttcacgtttgcagttgatgtgtctttttttttttttttaatgtatcttaaaggacataaaatttaaaaacttaaatattgtaatatgacagataacctaataattgtatctacattaaaatgacaaacatgatactgctgcttgtcaaat

SEQ ID NO: 1145 - DNA, 3903 bp, Homo sapiens
  source 1..3903: mol_type = genomic DNA
atttcaacactacacttgcacaatgtctttgaaaccaagagtagtagattttgatgaaacatggaacaaacttttgacgacaataaaagccgtggtcatgttggaatacgtcgaaagagcaacatggaatgaccgtttctcagatatctatgctttatgtgtggcctatcctgaaccccttggagaaagactttatacagaaactaagatttttttggaaaatcatgttcggcatttgcataagagagttttggagtcagaagaacaagtacttgttatgtatcataggtactgggaagaatacagcaagggtgcagactatatggactgcttatataggtatctcaacacccagtttattaaaaagaataaattaacagaagcggaccttcagtatggctatggtggtgtagatatgaatgaaccacttatggaaataggagagctagcattggatatgtggaggaaattgatggttgaaccacttcaggccatccttatccgaatgctgctccgagaaatcaaaaatgatcgtggtggagaagacccaaaccagaaagtaatccatggggttattaactcctttgttcatgttgaacagtataagaaaaaattccccttaaagttttatcaggaaatttttgagtctccctttctgactgaaacaggagagtattacaaacaagaagcttcaaatttattacaagaatcaaactgctcacagtatatggaaaaggttctaggtagattaaaagatgaagaaattcgatgtcgaaaatacctacatccaagttcatatactaaggtgattcatgaatgtcaacaacgaatggtagcagaccacttacagtttttacatgcagaatgtcataatataattcgacaagagaaaaaaaatgacatggcaaatatgtacgtcttactccgtgctgtgtccactggtttacctcatatgattcaggagctgcaaaaccacatccatgatgagggccttcgagcaaccagcaaccttactcaggaaaacatgccaacactatttgtggagtcagttttggaagtgcatggtaaatttgttcagcttatcaacactgttttgaatggtgatcagcattttatgagtgcgttggataaggcccttacgtcagttgtaaattacagagaacctaagtctgtttgcaaagcacctgaactgcttgctaagtactgtgacaacttactgaagaagtcagcgaaagggatgacagagaatgaagtggaagacaggctcacgagcttcatcacagtgttcaaatacattgatgacaaggacgtctttcaaaagttctacgcaagaatgctggcaaaacgtttaattcatgggttatccatgtctatggactctgaagaagccatgatcaacaaattaaagcaagcctgtggttatgagtttaccagcaagctacatcggatgtatacagatatgagtgtcagcgctgatctcaacaataagttcaacaattttatcaaaaaccaagacacagtaatagatttgggaattagttttcaaatatatgttctacaggctggtgcgtggcctcttactcaggctccttcatctacgtttgcaattccccaggaattagaaaaaagtgtacagatgtttgaattattttatagccaacatttcagtggaaggaaacttacatggttacattatctgtgtacaggtgaagttaaaatgaactatttgggcaaaccatatgtagccatggttacaacataccaaatggcagttcttcttgcctttaacaacagtgaaactgtcagttataaagagcttcaggacagcactcagatgaatgaaaaggaactgacaaaaacaatcaaatcattacttgatgtgaaaatgattaaccatgattcagaaaaggaagatattgatgcagaatcttcgttttcattaaatatgaactttagcagtaaaagaacaaaatttaaaattactacatcaatgcagaaagacacaccacaagtgattagccagtcaagagctaggtttaatcccagtatcagcatgattaagaagtgtattgaagttctgatagacaaacaatacatagaacgcagccaggcgtcggcagatgaatacagctacgtcgcgtgatgtcgctctcctccagcgtggtgtgagaagatcattgccatcaccatttggtgtgttcctgtgggaaaaagcaggactgtgcctccataatttggtcatttggcagcccctgttttctgctgtttacaacatcaccagtgccacgtcatgagcgtcaaagaaaatgcctagagatatttcaagctcatgtcattatgacatttcttaaaactttattaaaagaatgagtgaagtattgctgaaaagtggaaattcggttgggtaccatgctttttctccccttcacgtttgcagttgatgtgtctttttttttttttttaatgtatcttaaaggacataaaatttaaaaacttaaatattgtaatatgacagataacctaataattgtatctacattaaaatgacaaacatgatactgctgcttgtcaaataaaaaaaaaataaagaaatagaatgccttttttatgtggatggagtatcaggttgaccacaaaatatattgactcaaagcagctaatgcatctttagttgcgtttttatctgaatggtttaattcacttgtactcctatttaaatcctacatgaaaaatgtctagattattgttcttgactgcataggactgcattcagcataaagaatgctttatttttatggattagatatattggatctaaacattttgaatcttgaagatgtaattccatcagcagtttctggtggtgtgctactccacagacatcgcagagtgtgagcaggatgcttggtgacctcaagtctggcacagagagagcttttcattcaaaagttgtctttcttcggttgcataatccattaattctagcatagactagtaccctagctctgtggccttccctgagtcttaggaaatctatgataccaacatattccttctatatgcctcccctacctgttacccttacaaccctcctccaacagtttagatactagagtcactctcatcaatcacagatgtgcttagcaatgcataacctaaatacttttttaaaaaagaaaattgtacattgtactgggtgccacatatataaatcccattattttgtttattttatatatatatatatatataatatatatatatatatatctcaacagcagtgttaagagtactgcgatctattatcatatttattgtctatccacaccatcaccaccaccaccacacccctcctccctcaacatacaatttttctttattttaaaaaaaataagagacggggtttcgccatgtttcccaggctagtctggaacttctggcctcaagcaatcctatctctgtctcccaaagtgctgggattacaagcatgagccactgcatccatccaacacaaaatttttaaaatcggaatattttaaagcaaatcacacaaattatttcacttataatacttcagtaaggcctttaaaaaatccacagtgatattattactcctaacaaaaacaataattacttagtatcatctaatatgtggttcatatttaaatttgttgttttgagatgggtcttacaattggtttattcaattgcattttttctaactcgtgtctcaagtgttttaaaaatctactgaacttataatgacttatataatgtatttctcattttacctttcttccaaaagaggaaataatggcaaaccatataatattgtacattcactgtcaaaaagcaaacccttgttttgataacttgttgattgataaaagttttccaaattga

SEQ ID NO: 1146 - DNA, 4312 bp, Homo sapiens
  source 1..4312: mol_type = genomic DNA
cggcggccggccggggaggcggcctcggcgcacagtaatggcagcgctgtgagcaggggaacgcgagctgacagccgccgccgccgccgcctccgcccaccttcctcgccggggcttcgtctttcactccttcgggctgcctccccctccccttgtcccctgccccttgccctgcttctgcagaagagcgctgacccgtaagccctgccaccccctggactggatcccgggcctccccaacccgatcttggccgcctctcccgcggccccattttccttcgaaggagggaagatttcaacactacacttgcacaatgtctttgaaaccaagagtagtagattttgatgaaacatggaacaaacttttgacgacaataaaagccgtggtcatgttggaatacgtcgaaagagcaacatggaatgaccgtttctcagatatctatgctttatgtgtggcctatcctgaaccccttggagaaagactttatacagaaactaagatttttttggaaaatcatgttcggcatttgcataagagagttttggagtcagaagaacaagtacttgttatgtatcataggtactgggaagaatacagcaagggtgcagactatatggactgcttatataggtatctcaacacccagtttattaaaaagaataaattaacagaagcggaccttcagtatggctatggtggtgtagatatgaatgaaccacttatggaaataggagagctagcattggatatgtggaggaaattgatggttgaaccacttcaggccatccttatccgaatgctgctccgagaaatcaaaaatgatcgtggtggagaagacccaaaccagaaagtaatccatggggttattaactcctttgttcatgttgaacagtataagaaaaaattccccttaaagttttatcaggaaatttttgagtctccctttctgactgaaacaggagagtattacaaacaagaagcttcaaatttattacaagaatcaaactgctcacagtatatggaaaaggttctaggtagattaaaagatgaagaaattcgatgtcgaaaatacctacatccaagttcatatactaaggtgattcatgaatgtcaacaacgaatggtagcagaccacttacagtttttacatgcagaatgtcataatataattcgacaagagaaaaaaaatgacatggcaaatatgtacgtcttactccgtgctgtgtccactggtttacctcatatgattcaggagctgcaaaaccacatccatgatgagggccttcgagcaaccagcaaccttactcaggaaaacatgccaacactatttgtggagtcagttttggaagtgcatggtaaatttgttcagcttatcaacactgttttgaatggtgatcagcattttatgagtgcgttggataaggcccttacgtcagttgtaaattacagagaacctaagtctgtttgcaaagcacctgaactgcttgctaagtactgtgacaacttactgaagaagtcagcgaaagggatgacagagaatgaagtggaagacaggctcacgagcttcatcacagtgttcaaatacattgatgacaaggacgtctttcaaaagttctacgcaagaatgctggcaaaacgtttaattcatgggttatccatgtctatggactctgaagaagccatgatcaacaaattaaagcaagcctgtggttatgagtttaccagcaagctacatcggatgtatacagatatgagtgtcagcgctgatctcaacaataagttcaacaattttatcaaaaaccaagacacagtaatagatttgggaattagttttcaaatatatgttctacaggctggtgcgtggcctcttactcaggctccttcatctacgtttgcaattccccaggaattagaaaaaagtgtacagatgtttgaattattttatagccaacatttcagtggaaggaaacttacatggttacattatctgtgtacaggtgaagttaaaatgaactatttgggcaaaccatatgtagccatggttacaacataccaaatggcagttcttcttgcctttaacaacagtgaaactgtcagttataaagagcttcaggacagcactcagatgaatgaaaaggaactgacaaaaacaatcaaatcattacttgatgtgaaaatgattaaccatgattcagaaaaggaagatattgatgcagaatcttcgttttcattaaatatgaactttagcagtaaaagaacaaaatttaaaattactacatcaatgcagaaagacacaccacaagaaatggagcagactagaagtgcagttgatgaggaccggaaaatgtatctccaagctgctatagttcgtatcatgaaagcacgaaaagtgcttcggcacaatgcccttattcaagaggtgattagccagtcaagagctaggtttaatcccagtatcagcatgattaagaagtgtattgaagttctgatagacaaacaatacatagaacgcagccaggcgtcggcagatgaatacagctacgtcgcgtgatgtcgctctcctccagcgtggtgtgagaagatcattgccatcaccatttggtgtgttcctgtgggaaaaagcaggactgtgcctccataatttggtcatttggcagcccctgttttctgctgtttacaacatcaccagtgccacgtcatgagcgtcaaagaaaatgcctagagatatttcaagctcatgtcattatgacatttcttaaaactttattaaaagaatgagtgaagtattgctgaaaagtggaaattcggttgggtaccatgctttttctccccttcacgtttgcagttgatgtgtctttttttttttttttaatgtatcttaaaggacataaaatttaaaaacttaaatattgtaatatgacagataacctaataattgtatctacattaaaatgacaaacatgatactgctgcttgtcaaataaaaaaaaaataaagaaatagaatgccttttttatgtggatggagtatcaggttgaccacaaaatatattgactcaaagcagctaatgcatctttagttgcgtttttatctgaatggtttaattcacttgtactcctatttaaatcctacatgaaaaatgtctagattattgttcttgactgcataggactgcattcagcataaagaatgctttatttttatggattagatatattggatctaaacattttgaatcttgaagatgtaattccatcagcagtttctggtggtgtgctactccacagacatcgcagagtgtgagcaggatgcttggtgacctcaagtctggcacagagagagcttttcattcaaaagttgtctttcttcggttgcataatccattaattctagcatagactagtaccctagctctgtggccttccctgagtcttaggaaatctatgataccaacatattccttctatatgcctcccctacctgttacccttacaaccctcctccaacagtttagatactagagtcactctcatcaatcacagatgtgcttagcaatgcataacctaaatacttttttaaaaaagaaaattgtacattgtactgggtgccacatatataaatcccattattttgtttattttatatatatatatatatataatatatatatatatatatctcaacagcagtgttaagagtactgcgatctattatcatatttattgtctatccacaccatcaccaccaccaccacacccctcctccctcaacatacaatttttctttattttaaaaaaaataagagacggggtttcgccatgtttcccaggctagtctggaacttctggcctcaagcaatcctatctctgtctcccaaagtgctgggattacaagcatgagccactgcatccatccaacacaaaatttttaaaatcggaatattttaaagcaaatcacacaaattatttcacttataatacttcagtaaggcctttaaaaaatccacagtgatattattactcctaacaaaaacaataattacttagtatcatctaatatgtggttcatatttaaatttgttgttttgagatgggtcttacaattggtttattcaattgcattttttctaactcgtgtctcaagtgttttaaaaatctactgaacttataatgacttatataatgtatttctcattttacctttcttccaaaagaggaaataatggcaaaccatataatattgtacattcactgtcaaaaagcaaacccttgttttgataacttgttgattgataaaagttttccaaattga

SEQ ID NO: 1147 - DNA, 4208 bp, Homo sapiens
  source 1..4208: mol_type = genomic DNA
ggcggcggccggccggggaggcggcctcggcgcacagtaatggcagcgctgtgagcaggggaacgcgagctgacagccgccgccgccgccgcctccgcccaccttcctcgccggggcttcgtctttcactccttcgggctgcctccccctccccttgtcccctgccccttgccctgcttctgcagaagatttcaacactacacttgcacaatgtctttgaaaccaagagtagtagattttgatgaaacatggaacaaacttttgacgacaataaaagccgtggtcatgttggaatacgtcgaaagagcaacatggaatgaccgtttctcagatatctatgctttatgtgtggcctatcctgaaccccttggagaaagactttatacagaaactaagatttttttggaaaatcatgttcggcatttgcataagagagttttggagtcagaagaacaagtacttgttatgtatcataggtactgggaagaatacagcaagggtgcagactatatggactgcttatataggtatctcaacacccagtttattaaaaagaataaattaacagaagcggaccttcagtatggctatggtggtgtagatatgaatgaaccacttatggaaataggagagctagcattggatatgtggaggaaattgatggttgaaccacttcaggccatccttatccgaatgctgctccgagaaatcaaaaatgatcgtggtggagaagacccaaaccagaaagtaatccatggggttattaactcctttgttcatgttgaacagtataagaaaaaattccccttaaagttttatcaggaaatttttgagtctccctttctgactgaaacaggagagtattacaaacaagaagcttcaaatttattacaagaatcaaactgctcacagtatatggaaaaggttctaggtagattaaaagatgaagaaattcgatgtcgaaaatacctacatccaagttcatatactaaggtgattcatgaatgtcaacaacgaatggtagcagaccacttacagtttttacatgcagaatgtcataatataattcgacaagagaaaaaaaatgacatggcaaatatgtacgtcttactccgtgctgtgtccactggtttacctcatatgattcaggagctgcaaaaccacatccatgatgagggccttcgagcaaccagcaaccttactcaggaaaacatgccaacactatttgtggagtcagttttggaagtgcatggtaaatttgttcagcttatcaacactgttttgaatggtgatcagcattttatgagtgcgttggataaggcccttacgtcagttgtaaattacagagaacctaagtctgtttgcaaagcacctgaactgcttgctaagtactgtgacaacttactgaagaagtcagcgaaagggatgacagagaatgaagtggaagacaggctcacgagcttcatcacagtgttcaaatacattgatgacaaggacgtctttcaaaagttctacgcaagaatgctggcaaaacgtttaattcatgggttatccatgtctatggactctgaagaagccatgatcaacaaattaaagcaagcctgtggttatgagtttaccagcaagctacatcggatgtatacagatatgagtgtcagcgctgatctcaacaataagttcaacaattttatcaaaaaccaagacacagtaatagatttgggaattagttttcaaatatatgttctacaggctggtgcgtggcctcttactcaggctccttcatctacgtttgcaattccccaggaattagaaaaaagtgtacagatgtttgaattattttatagccaacatttcagtggaaggaaacttacatggttacattatctgtgtacaggtgaagttaaaatgaactatttgggcaaaccatatgtagccatggttacaacataccaaatggcagttcttcttgcctttaacaacagtgaaactgtcagttataaagagcttcaggacagcactcagatgaatgaaaaggaactgacaaaaacaatcaaatcattacttgatgtgaaaatgattaaccatgattcagaaaaggaagatattgatgcagaatcttcgttttcattaaatatgaactttagcagtaaaagaacaaaatttaaaattactacatcaatgcagaaagacacaccacaagaaatggagcagactagaagtgcagttgatgaggaccggaaaatgtatctccaagctgctatagttcgtatcatgaaagcacgaaaagtgcttcggcacaatgcccttattcaagaggtgattagccagtcaagagctaggtttaatcccagtatcagcatgattaagaagtgtattgaagttctgatagacaaacaatacatagaacgcagccaggcgtcggcagatgaatacagctacgtcgcgtgatgtcgctctcctccagcgtggtgtgagaagatcattgccatcaccatttggtgtgttcctgtgggaaaaagcaggactgtgcctccataatttggtcatttggcagcccctgttttctgctgtttacaacatcaccagtgccacgtcatgagcgtcaaagaaaatgcctagagatatttcaagctcatgtcattatgacatttcttaaaactttattaaaagaatgagtgaagtattgctgaaaagtggaaattcggttgggtaccatgctttttctccccttcacgtttgcagttgatgtgtctttttttttttttttaatgtatcttaaaggacataaaatttaaaaacttaaatattgtaatatgacagataacctaataattgtatctacattaaaatgacaaacatgatactgctgcttgtcaaataaaaaaaaaataaagaaatagaatgccttttttatgtggatggagtatcaggttgaccacaaaatatattgactcaaagcagctaatgcatctttagttgcgtttttatctgaatggtttaattcacttgtactcctatttaaatcctacatgaaaaatgtctagattattgttcttgactgcataggactgcattcagcataaagaatgctttatttttatggattagatatattggatctaaacattttgaatcttgaagatgtaattccatcagcagtttctggtggtgtgctactccacagacatcgcagagtgtgagcaggatgcttggtgacctcaagtctggcacagagagagcttttcattcaaaagttgtctttcttcggttgcataatccattaattctagcatagactagtaccctagctctgtggccttccctgagtcttaggaaatctatgataccaacatattccttctatatgcctcccctacctgttacccttacaaccctcctccaacagtttagatactagagtcactctcatcaatcacagatgtgcttagcaatgcataacctaaatacttttttaaaaaagaaaattgtacattgtactgggtgccacatatataaatcccattattttgtttattttatatatatatatatatataatatatatatatatatatctcaacagcagtgttaagagtactgcgatctattatcatatttattgtctatccacaccatcaccaccaccaccacacccctcctccctcaacatacaatttttctttattttaaaaaaaataagagacggggtttcgccatgtttcccaggctagtctggaacttctggcctcaagcaatcctatctctgtctcccaaagtgctgggattacaagcatgagccactgcatccatccaacacaaaatttttaaaatcggaatattttaaagcaaatcacacaaattatttcacttataatacttcagtaaggcctttaaaaaatccacagtgatattattactcctaacaaaaacaataattacttagtatcatctaatatgtggttcatatttaaatttgttgttttgagatgggtcttacaattggtttattcaattgcattttttctaactcgtgtctcaagtgttttaaaaatctactgaacttataatgacttatataatgtatttctcattttacctttcttccaaaagaggaaataatggcaaaccatataatattgtacattcactgtcaaaaagcaaacccttgttttgataacttgttgattgataaaagttttccaaattga

SEQ ID NO: 1148 - DNA, 4233 bp, Homo sapiens
  source 1..4233: mol_type = genomic DNA
attgctttccgggtggcgggggggatttggcagcagcggaagaaggagaccggagggtgtgtgttgggcaaagccggaggcagaggaggacgattgttttacggatcccgtgatcggcccgtccttctcccctttccccccctccctaccgcccctgtcccgccggggagcggcggcggccttggactttgctgtctttcctcgcggagacagatttcaacactacacttgcacaatgtctttgaaaccaagagtagtagattttgatgaaacatggaacaaacttttgacgacaataaaagccgtggtcatgttggaatacgtcgaaagagcaacatggaatgaccgtttctcagatatctatgctttatgtgtggcctatcctgaaccccttggagaaagactttatacagaaactaagatttttttggaaaatcatgttcggcatttgcataagagagttttggagtcagaagaacaagtacttgttatgtatcataggtactgggaagaatacagcaagggtgcagactatatggactgcttatataggtatctcaacacccagtttattaaaaagaataaattaacagaagcggaccttcagtatggctatggtggtgtagatatgaatgaaccacttatggaaataggagagctagcattggatatgtggaggaaattgatggttgaaccacttcaggccatccttatccgaatgctgctccgagaaatcaaaaatgatcgtggtggagaagacccaaaccagaaagtaatccatggggttattaactcctttgttcatgttgaacagtataagaaaaaattccccttaaagttttatcaggaaatttttgagtctccctttctgactgaaacaggagagtattacaaacaagaagcttcaaatttattacaagaatcaaactgctcacagtatatggaaaaggttctaggtagattaaaagatgaagaaattcgatgtcgaaaatacctacatccaagttcatatactaaggtgattcatgaatgtcaacaacgaatggtagcagaccacttacagtttttacatgcagaatgtcataatataattcgacaagagaaaaaaaatgacatggcaaatatgtacgtcttactccgtgctgtgtccactggtttacctcatatgattcaggagctgcaaaaccacatccatgatgagggccttcgagcaaccagcaaccttactcaggaaaacatgccaacactatttgtggagtcagttttggaagtgcatggtaaatttgttcagcttatcaacactgttttgaatggtgatcagcattttatgagtgcgttggataaggcccttacgtcagttgtaaattacagagaacctaagtctgtttgcaaagcacctgaactgcttgctaagtactgtgacaacttactgaagaagtcagcgaaagggatgacagagaatgaagtggaagacaggctcacgagcttcatcacagtgttcaaatacattgatgacaaggacgtctttcaaaagttctacgcaagaatgctggcaaaacgtttaattcatgggttatccatgtctatggactctgaagaagccatgatcaacaaattaaagcaagcctgtggttatgagtttaccagcaagctacatcggatgtatacagatatgagtgtcagcgctgatctcaacaataagttcaacaattttatcaaaaaccaagacacagtaatagatttgggaattagttttcaaatatatgttctacaggctggtgcgtggcctcttactcaggctccttcatctacgtttgcaattccccaggaattagaaaaaagtgtacagatgtttgaattattttatagccaacatttcagtggaaggaaacttacatggttacattatctgtgtacaggtgaagttaaaatgaactatttgggcaaaccatatgtagccatggttacaacataccaaatggcagttcttcttgcctttaacaacagtgaaactgtcagttataaagagcttcaggacagcactcagatgaatgaaaaggaactgacaaaaacaatcaaatcattacttgatgtgaaaatgattaaccatgattcagaaaaggaagatattgatgcagaatcttcgttttcattaaatatgaactttagcagtaaaagaacaaaatttaaaattactacatcaatgcagaaagacacaccacaagaaatggagcagactagaagtgcagttgatgaggaccggaaaatgtatctccaagctgctatagttcgtatcatgaaagcacgaaaagtgcttcggcacaatgcccttattcaagaggtgattagccagtcaagagctaggtttaatcccagtatcagcatgattaagaagtgtattgaagttctgatagacaaacaatacatagaacgcagccaggcgtcggcagatgaatacagctacgtcgcgtgatgtcgctctcctccagcgtggtgtgagaagatcattgccatcaccatttggtgtgttcctgtgggaaaaagcaggactgtgcctccataatttggtcatttggcagcccctgttttctgctgtttacaacatcaccagtgccacgtcatgagcgtcaaagaaaatgcctagagatatttcaagctcatgtcattatgacatttcttaaaactttattaaaagaatgagtgaagtattgctgaaaagtggaaattcggttgggtaccatgctttttctccccttcacgtttgcagttgatgtgtctttttttttttttttaatgtatcttaaaggacataaaatttaaaaacttaaatattgtaatatgacagataacctaataattgtatctacattaaaatgacaaacatgatactgctgcttgtcaaataaaaaaaaaataaagaaatagaatgccttttttatgtggatggagtatcaggttgaccacaaaatatattgactcaaagcagctaatgcatctttagttgcgtttttatctgaatggtttaattcacttgtactcctatttaaatcctacatgaaaaatgtctagattattgttcttgactgcataggactgcattcagcataaagaatgctttatttttatggattagatatattggatctaaacattttgaatcttgaagatgtaattccatcagcagtttctggtggtgtgctactccacagacatcgcagagtgtgagcaggatgcttggtgacctcaagtctggcacagagagagcttttcattcaaaagttgtctttcttcggttgcataatccattaattctagcatagactagtaccctagctctgtggccttccctgagtcttaggaaatctatgataccaacatattccttctatatgcctcccctacctgttacccttacaaccctcctccaacagtttagatactagagtcactctcatcaatcacagatgtgcttagcaatgcataacctaaatacttttttaaaaaagaaaattgtacattgtactgggtgccacatatataaatcccattattttgtttattttatatatatatatatatataatatatatatatatatatctcaacagcagtgttaagagtactgcgatctattatcatatttattgtctatccacaccatcaccaccaccaccacacccctcctccctcaacatacaatttttctttattttaaaaaaaataagagacggggtttcgccatgtttcccaggctagtctggaacttctggcctcaagcaatcctatctctgtctcccaaagtgctgggattacaagcatgagccactgcatccatccaacacaaaatttttaaaatcggaatattttaaagcaaatcacacaaattatttcacttataatacttcagtaaggcctttaaaaaatccacagtgatattattactcctaacaaaaacaataattacttagtatcatctaatatgtggttcatatttaaatttgttgttttgagatgggtcttacaattggtttattcaattgcattttttctaactcgtgtctcaagtgttttaaaaatctactgaacttataatgacttatataatgtatttctcattttacctttcttccaaaagaggaaataatggcaaaccatataatattgtacattcactgtcaaaaagcaaacccttgttttgataacttgttgattgataaaagttttccaaattga

SEQ ID NO: 1149 - DNA, 4189 bp, Homo sapiens
  source 1..4189: mol_type = genomic DNA
attgctttccgggtggcgggggggatttggcagcagcggaagaaggagaccggagggtgtgtgttgggcaaagccggaggcagaggaggacgattgttttacggatcccgtgatcggcccgtccttctcccctttccccccctccctaccgcccctgtcccgccggggagcggcggcggccttggactttgctgtctttcctcgcggagacagatttcaacactacacttgcacaatgtctttgaaaccaagagtagtagattttgatgaaacatggaacaaacttttgacgacaataaaagccgtggtcatgttggaatacgtcgaaagagcaacatggaatgaccgtttctcagatatctatgctttatgtgtggcctatcctgaaccccttggagaaagactttatacagaaactaagatttttttggaaaatcatgttcggcatttgcataaggtactgggaagaatacagcaagggtgcagactatatggactgcttatataggtatctcaacacccagtttattaaaaagaataaattaacagaagcggaccttcagtatggctatggtggtgtagatatgaatgaaccacttatggaaataggagagctagcattggatatgtggaggaaattgatggttgaaccacttcaggccatccttatccgaatgctgctccgagaaatcaaaaatgatcgtggtggagaagacccaaaccagaaagtaatccatggggttattaactcctttgttcatgttgaacagtataagaaaaaattccccttaaagttttatcaggaaatttttgagtctccctttctgactgaaacaggagagtattacaaacaagaagcttcaaatttattacaagaatcaaactgctcacagtatatggaaaaggttctaggtagattaaaagatgaagaaattcgatgtcgaaaatacctacatccaagttcatatactaaggtgattcatgaatgtcaacaacgaatggtagcagaccacttacagtttttacatgcagaatgtcataatataattcgacaagagaaaaaaaatgacatggcaaatatgtacgtcttactccgtgctgtgtccactggtttacctcatatgattcaggagctgcaaaaccacatccatgatgagggccttcgagcaaccagcaaccttactcaggaaaacatgccaacactatttgtggagtcagttttggaagtgcatggtaaatttgttcagcttatcaacactgttttgaatggtgatcagcattttatgagtgcgttggataaggcccttacgtcagttgtaaattacagagaacctaagtctgtttgcaaagcacctgaactgcttgctaagtactgtgacaacttactgaagaagtcagcgaaagggatgacagagaatgaagtggaagacaggctcacgagcttcatcacagtgttcaaatacattgatgacaaggacgtctttcaaaagttctacgcaagaatgctggcaaaacgtttaattcatgggttatccatgtctatggactctgaagaagccatgatcaacaaattaaagcaagcctgtggttatgagtttaccagcaagctacatcggatgtatacagatatgagtgtcagcgctgatctcaacaataagttcaacaattttatcaaaaaccaagacacagtaatagatttgggaattagttttcaaatatatgttctacaggctggtgcgtggcctcttactcaggctccttcatctacgtttgcaattccccaggaattagaaaaaagtgtacagatgtttgaattattttatagccaacatttcagtggaaggaaacttacatggttacattatctgtgtacaggtgaagttaaaatgaactatttgggcaaaccatatgtagccatggttacaacataccaaatggcagttcttcttgcctttaacaacagtgaaactgtcagttataaagagcttcaggacagcactcagatgaatgaaaaggaactgacaaaaacaatcaaatcattacttgatgtgaaaatgattaaccatgattcagaaaaggaagatattgatgcagaatcttcgttttcattaaatatgaactttagcagtaaaagaacaaaatttaaaattactacatcaatgcagaaagacacaccacaagaaatggagcagactagaagtgcagttgatgaggaccggaaaatgtatctccaagctgctatagttcgtatcatgaaagcacgaaaagtgcttcggcacaatgcccttattcaagaggtgattagccagtcaagagctaggtttaatcccagtatcagcatgattaagaagtgtattgaagttctgatagacaaacaatacatagaacgcagccaggcgtcggcagatgaatacagctacgtcgcgtgatgtcgctctcctccagcgtggtgtgagaagatcattgccatcaccatttggtgtgttcctgtgggaaaaagcaggactgtgcctccataatttggtcatttggcagcccctgttttctgctgtttacaacatcaccagtgccacgtcatgagcgtcaaagaaaatgcctagagatatttcaagctcatgtcattatgacatttcttaaaactttattaaaagaatgagtgaagtattgctgaaaagtggaaattcggttgggtaccatgctttttctccccttcacgtttgcagttgatgtgtctttttttttttttttaatgtatcttaaaggacataaaatttaaaaacttaaatattgtaatatgacagataacctaataattgtatctacattaaaatgacaaacatgatactgctgcttgtcaaataaaaaaaaaataaagaaatagaatgccttttttatgtggatggagtatcaggttgaccacaaaatatattgactcaaagcagctaatgcatctttagttgcgtttttatctgaatggtttaattcacttgtactcctatttaaatcctacatgaaaaatgtctagattattgttcttgactgcataggactgcattcagcataaagaatgctttatttttatggattagatatattggatctaaacattttgaatcttgaagatgtaattccatcagcagtttctggtggtgtgctactccacagacatcgcagagtgtgagcaggatgcttggtgacctcaagtctggcacagagagagcttttcattcaaaagttgtctttcttcggttgcataatccattaattctagcatagactagtaccctagctctgtggccttccctgagtcttaggaaatctatgataccaacatattccttctatatgcctcccctacctgttacccttacaaccctcctccaacagtttagatactagagtcactctcatcaatcacagatgtgcttagcaatgcataacctaaatacttttttaaaaaagaaaattgtacattgtactgggtgccacatatataaatcccattattttgtttattttatatatatatatatatataatatatatatatatatatctcaacagcagtgttaagagtactgcgatctattatcatatttattgtctatccacaccatcaccaccaccaccacacccctcctccctcaacatacaatttttctttattttaaaaaaaataagagacggggtttcgccatgtttcccaggctagtctggaacttctggcctcaagcaatcctatctctgtctcccaaagtgctgggattacaagcatgagccactgcatccatccaacacaaaatttttaaaatcggaatattttaaagcaaatcacacaaattatttcacttataatacttcagtaaggcctttaaaaaatccacagtgatattattactcctaacaaaaacaataattacttagtatcatctaatatgtggttcatatttaaatttgttgttttgagatgggtcttacaattggtttattcaattgcattttttctaactcgtgtctcaagtgttttaaaaatctactgaacttataatgacttatataatgtatttctcattttacctttcttccaaaagaggaaataatggcaaaccatataatattgtacattcactgtcaaaaagcaaacccttgttttgataacttgttgattgataaaagttttccaaattga

SEQ ID NO: 1150 - DNA, 767 bp, Homo sapiens
  source 1..767: mol_type = genomic DNA
gttgcagttgagcccaaactgaatgctgtctgtagaaggaaacaacaaactttgtactttatgtacagagtaacatggtcaactttttggcttagatttcaacactacacttgcacaatgtctttgaaaccaagagtagtagattttgatgaaacatggaacaaacttttgacgacaataaaagccgtggtcatgttggaatacgtcgaaagagcaacatggaatgaccgtttctcagatatctatgctttatgtgtggcctatcctgaaccccttggagaaagactttatacagaaactaagatttttttggaaaatcatgttcggcatttgcataagagagttttggagtcagaagaacaagtacttgttatgtatcataggtactgggaagaatacagcaagggtgcagactatatggactgcttatataggtatctcaacacccagtttattaaaaagaataaattaacagaagcggaccttcagtatggctatggtggtgtagatatgaatgaaccacttatggaaataggagagctagcattggatatgtggaggaaattgatggttgaaccacttcaggccatccttatccgaatgctgctccgagaaatcaaaaatgatcgtggtggagaagacccaaaccagaaagtaatccatggggttattaactcctttgttcatgttgaacagtataagaaaaaattccccttaaagttttatcaggaaatttttgagtctccctttctgactgaaacaggaga

SEQ ID NO: 1151 - DNA, 2376 bp, Homo sapiens
  source 1..2376: mol_type = genomic DNA
atgttgcagttgagcccaaactgaatgctgtctgtagaaggaaacaacaaactttgtactttatgtacagagtaacatggtcaactttttggcttagatttcaacactacacttgcacaatgtctttgaaaccaagagtagtagattttgatgaaacatggaacaaacttttgacgacaataaaagccgtggtcatgttggaatacgtcgaaagagcaacatggaatgaccgtttctcagatatctatgctttatgtgtggcctatcctgaaccccttggagaaagactttatacagaaactaagatttttttggaaaatcatgttcggcatttgcataagagagttttggagtcagaagaacaagtacttgttatgtatcataggtactgggaagaatacagcaagggtgcagactatatggactgcttatataggtatctcaacacccagtttattaaaaagaataaattaacagaagcggaccttcagtatggctatggtggtgtagatatgaatgaaccacttatggaaataggagagctagcattggatatgtggaggaaattgatggttgaaccacttcaggccatccttatccgaatgctgctccgagaaatcaaaaatgatcgtggtggagaagacccaaaccagaaagtaatccatggggttattaactcctttgttcatgttgaacagtataagaaaaaattccccttaaagttttatcaggaaatttttgagtctccctttctgactgaaacaggagagtattacaaacaagaagcttcaaatttattacaagaatcaaactgctcacagtatatggaaaaggttctaggtagattaaaagatgaagaaattcgatgtcgaaaatacctacatccaagttcatatactaaggtgattcatgaatgtcaacaacgaatggtagcagaccacttacagtttttacatgcagaatgtcataatataattcgacaagagaaaaaaaatgacatggcaaatatgtacgtcttactccgtgctgtgtccactggtttacctcatatgattcaggagctgcaaaaccacatccatgatgagggccttcgagcaaccagcaaccttactcaggaaaacatgccaacactatttgtggagtcagttttggaagtgcatggtaaatttgttcagcttatcaacactgttttgaatggtgatcagcattttatgagtgcgttggataaggcccttacgtcagttgtaaattacagagaacctaagtctgtttgcaaagcacctgaactgcttgctaagtactgtgacaacttactgaagaagtcagcgaaagggatgacagagaatgaagtggaagacaggctcacgagcttcatcacagtgttcaaatacattgatgacaaggacgtctttcaaaagttctacgcaagaatgctggcaaaacgtttaattcatgggttatccatgtctatggactctgaagaagccatgatcaacaaattaaagcaagcctgtggttatgagtttaccagcaagctacatcggatgtatacagatatgagtgtcagcgctgatctcaacaataagttcaacaattttatcaaaaaccaagacacagtaatagatttgggaattagttttcaaatatatgttctacaggctggtgcgtggcctcttactcaggctccttcatctacgtttgcaattccccaggaattagaaaaaagtgtacagatgtttgaattattttatagccaacatttcagtggaaggaaacttacatggttacattatctgtgtacaggtgaagttaaaatgaactatttgggcaaaccatatgtagccatggttacaacataccaaatggcagttcttcttgcctttaacaacagtgaaactgtcagttataaagagcttcaggacagcactcagatgaatgaaaaggaactgacaaaaacaatcaaatcattacttgatgtgaaaatgattaaccatgattcagaaaaggaagatattgatgcagaatcttcgttttcattaaatatgaactttagcagtaaaagaacaaaatttaaaattactacatcaatgcagaaagacacaccacaagaaatggagcagactagaagtgcagttgatgaggaccggaaaatgtatctccaagctgctatagttcgtatcatgaaagcacgaaaagtgcttcggcacaatgcccttattcaagaggtgattagccagtcaagagctaggtttaatcccagtatcagcatgattaagaagtgtattgaagttctgatagacaaacaatacatagaacgcagccaggcgtcggcagatgaatacagctacgtcgcgtgatgtcgctctcctccagcgt

SEQ ID NO: 1152 - DNA, 6741 bp, Homo sapiens
  source 1..6741: mol_type = genomic DNA
cctgcgcagtgagatgtttgtccgtcgccgccgccgccgccatcgcggaggagcgcgataaagggagccgagccggacgtgagggggaccccgcggagccgccgcgccagcgcagccccccagccgcatcggagtcgccagagtccgagccgccgccgccgccgccgccgcccccgccgccgccgcggctgcccaggggccggccagctccccagccctgcccgggggtcgcgccgccgccgcccccagcgtcgcccctagcctgcctgcccgccttaaatgtgacaccggcgtcgcggagcgcgacctgaagccgccgccggggaggggacgagcaccatgtcgaatctgagcaaaggcacgggcagccggaaggacaccaagatgcggatccgggcctttccgatgaccatggatgaaaaatatgtaaacagcatttgggaccttctgaaaaatgcaattcaagaaatccagcgtaagaataacagtggtcttagttttgaggagctctatagaaatgcatatacaatggttttgcataaacatggagaaaagctctacactggactaagagaagttgttaccgaacatctcataaataaggtgcgagaagatgtactaaattcattgaataacaactttcttcaaacgctaaatcaagcttggaatgatcatcaaacagctatggtgatgattagagacatactaatgtacatggaccgtgtgtatgtacaacaaaataatgtggagaacgtctacaatttgggattaattatttttcgagatcaagttgtacgttatgggtgtattagggatcatctacggcaaactctattggatatgattgcaagagagcggaaaggagaagtcgtagacagaggcgcaataagaaatgcttgccagatgttaatgattttaggtctcgaaggaagatcagtctatgaagaagattttgaggctccttttttggaaatgtctgcagaattttttcagatggaaagccagaaatttttagcagaaaatagtgcttcagtatatataaagaaagtagaagctagaattaatgaagaaatagaacgagtgatgcactgccttgacaaatcaacggaagaaccaattgtaaaggtggttgaaagggaactcatttccaagcacatgaagactatagtagaaatggagaattctgggctagtacatatgttgaaaaatggaaagacagaagaccttggttgcatgtacaagttatttagtcgtgtgccaaatggtttgaaaacaatgtgtgagtgtatgagttcctatttgagggagcaaggtaaagctcttgtttctgaagaaggagaaggaaagaatcctgttgactatatccagggcttattggatctgaagagtaggttcgatcgcttcctcctggaatcattcaacaatgaccgtctctttaaacaaactattgcgggtgactttgagtattttctcaacctcaactccaggtctcctgaatacctctcattatttattgatgataagctgaaaaagggagtcaaagggctaacagaacaagaagtagaaacaatattggataaagcaatggtcctttttaggtttatgcaagaaaaagatgtatttgaacgttattataaacaacacttggcaaggagacttctcacaaataaaagtgtttctgatgactctgaaaaaaacatgatatctaagttaaagactgaatgtggatgtcagttcacgtcaaaactggaaggaatgtttagggatatgagcatctcaaacacaacgatggatgaattcaggcaacatctacaggcaactggtgtatctttaggtggtgttgatcttacagtccgggtgctcacgacaggatattggcccactcagtcagccacaccaaagtgcaacatcccaccagcaccaagacatgcttttgagatattcagaaggttctacttagccaaacacagtggtcgacagctcacactccagcatcatatgggttctgcagatctcaatgccacattttatggaccagttaaaaaggaagatggatctgaagttggtgttggaggtgcacaagtaactggctctaatacacggaagcacatattgcaagtttccactttccagatgaccatattaatgctctttaataatagagaaaaatacacatttgaggaaattcagcaagagacagatatccctgaaagagagcttgttagagccctacagtccctcgcctgtggtaaaccaacacagcgggttcttacaaaagaacccaaatcaaaggaaatagaaaatggtcatatatttacagttaatgatcaattcacatccaaactacacagagtcaagattcaaacagttgctgccaaacaaggtgaatccgacccagagaggaaagaaacaaggcagaaagtagacgacgacagaaaacatgagatagaagctgctatagtgcggataatgaaatctagaaagaagatgcagcacaatgttctagtagcggaggtaactcagcagttgaaggcgcgattcttaccaagtccagttgttattaagaaacgtattgaaggacttattgagagagaatatttggcacgaacacctgaggatcgcaaagtatacacatatgtagcataaaatgcgttcagaaatttgatttattcttggactgtactcttcgcatggactgggaagttcttttaaatcattaaatattaagacgaccatctcttctattaaattacagtacatgttctagaccattgagatcaagcctttactccctttgagagtttccaacatcagttgattgagcttcaggctttacaacgtttatccctgtagagatcatctttacagttcctcgggaaaatgtgaatgtgctgcgttttgttttctttactgtatgaaaacaggaaaataaaagagaaatttagaaaatacagctcattacaataaaattgttggatttcatttccccaggtcttcagtgttgatgtaaatgtgttttgtagtgttgcttagcactttgcgcattgtgtaagttgggtaacaaaaatggcaaaagaaatgcagatttcccagttatcttgctctgaagacatttctttagctagtcttatttaattttaaaggtttgataaatatacaaagacccaagcatacaatttgagcatgctgtattctaccacttgcacttactcatcttctagccttatgaccaggaacctttgttttgggctcaagtacacatcctgatttggtttctccctgttgtaatttgagatttcccaaattaagtcttataatgattaggttttgttctgagttatttctagagaaagaaagtattttagtatgtgtaaattgtacaataatttttttgctgttgtactcactgctaatagtggattgtatagggtggtgtttttatttcatttattgtagacaaaaataatgaatttagtatacacatacccactaattcaagtatgtcagagcacaaagttggcagctggttatatttaattcagcccctctgaaaagcacatacagtctatactttgtttataaataccctaggtcctccctgcccctaaatatatattttggtgaagctgtggtgcactattaattttctgtttcaaaatgcaatctaaagatgcaataaatatgatgaccttgatagttttaatgaaatcttcaattcttgcagctgtgttttggaaagtgattaagcaatatttctcaaacctgatgattcttggatatttagctattgtcctccaaagagtcatcgtttcacgttttcaaacatgtgctttgtgctgaagattcttgtcagatatcctgtgcttccagagtatttttatcttcaattttatttaattttgtttcattttgttttcataagacaatgtttcagatatgtaatggggcaaaccactatagatttctgttggatagaaaaatgaaatgttactaataagtttaaattgacccttcgttgactatcagtactgttgatacatttattagaatgtatgtctcagaagatggtttctgtttaaatttatggtcaagttacaacaactgaattctaatatggattaaaaactccacataaatatttttccccatgcgtcttgggttataattttccttttagacttgcaaatatgcttttattgcaattttgtctccatctgtactgtagaattacaagccttgtgctctttatctctacattttccacttctacatgatgcaattaagatgccaatgaaaagtattgtgaacattattctcaggacacttttaccatacttgagtagtactaagtcaggtgtaacatggaaagctaagggtttcaccttctgattttgacataattggaaattttctataatggtaagatgtttataggaaagtaatggtagttcatgtttgagaatttttttattgctttcatttcccagttaaatgatatttaacacctgggaaaacaggacagctcagattgtcgagttagtaaacatgagcgatgtaaaaactttatttgaaatctcctaagtgagacattaaacattttagtgctagtttaagccattaaaagtaaagtttaagtttacgtcattgtctcaagtgtggctgtaaaaatcagatctagagtttagagacatacttgttaactttggagcacaggtttgatatttatgcttctaaatacattaaaacatttctgaattgcagttgaatggttggagattgctggcgatgtgatgctgcactgaaaaaactggtcacacaaaatgtttatatgtttgactgcataagtattattttaggtcataaaggttataacaaaatacatttaacattgctttctttttagcaagaggtcacagatgctattttttctcagtttttaatgctttaatttgaaagaaaaatgcatcctaaccattccatcctgttggtgcagagaaattttggtgatttattagaagacttttaaggagggtggatacatagtttttcaactgcaaaaatcatgtcatctcttcagtaactgttaaagtgtaattctctgccttcattatcaagtccaggacagtgtttattttgaatcgttaacattatttaaagactgaaaattcattgcaattagggaacgcacagcctcacaaaaagtggttgtgattgcaaggattctttatgtcagtgaacttaaaaagggaatgggggaagagatgcatgcctttctaaaggtatgctagagtcacctgtgtagcattgtaattatgtactatcaaacccccaagatgctgatgataggccttctctgtaagaatccttctcatagtgaagcactgttgatgttttgttcaccggatatgttgggtagcagaaaaggcctagaaccagttttaagattatgcctacatctctagaagactagtacactggcatcatcttaggtttctaaatattatttaattccttaatttggaaagcagttttaatgtttacagtttaagatactcattttcagtaactagtgttaaagatttttatctttgcctgtctactgtaacttaagactttcatagaataattttttatagagtatatggtatattgtgtcaatcttggaaggaaagctgttgcatatcaattgtaggtcatgtattttactatatgttgcatagtattttgcattctgtaaatacgaatgttaaaacatttcaggtcagcaaaattagaagtcatttctagtcctcaaagcagaaataattagaaatgttaacatttaagtgcttatcatatgccagatactattctgaatattttatgtatattcattcatttagttgtcatattggctttatgtgacataactgtcattataccagtgttgtccaaggttgctagcaggaaatggcagagccaggagttggacctaggtttaatcctatccatattccatgttacaaattgacatgattttccatattaaaaaattttcatttattttgtacctcattcacatgaatagtaatgtgacaaactaaagttaatacatgaagcattgcaatatggaattttgcacatttttgttagctttacattatttgctgataccaacttttggtaggaaggaaaacagggaaggtgattgctgctattctggaatgtgtccattgaaaagaaaataggcgctttgtctcctacaatcttagagaaagttttacatacttaagtgggtaccacagataggcatgtaccttaaattcaaatctacagttttacaaaatgttttcctttgtgtgcctttcctatgtcaaattagccagaaggaagaagagacgttaagaatggcagataaatttaacaggtaatgatacagagattggccattacgccagctctcaggagaaaaacaactaggatgtcttgaaacccgtgcatttaattttagaaatggcaaatttgtaagcgtgtcatttaagtaatttgatgctcagttttagggtctaagttgacctcgagtgagccatgcaaaaatagctttaaaattatacatgagcagctcaaagtaaacgtgtattttttagtaacaatgaaattgtcaaatttcaagattttaataacaggacagttcaactaataaactttattgcatacaagatttattgcaatgtgggaaaattaaaattctcagtctcagaa

SEQ ID NO: 1153 - DNA, 6586 bp, Homo sapiens
  source 1..6586: mol_type = genomic DNA
gctcaggcggaggaggagaaggaggaggaggaggacgacgttcggcctgcgcagtgagatgtttgtccgtcgccgccgccgccgccatcgcggaggagcgcgataaagggagccgagccggacgtgagggggaccccgcggagccgccgcgccagcgcagccccccagccgcatcggagtcgccagagtccgagccgccgccgccgccgccgccgcccccgccgccgccgcggctgcccaggggccggccagctccccagccctgcccgggggtcgcgccgccgccgcccccagcgtcgcccctagcctgcctgcccgccttaaatgtgacaccggcgtcgcggagcgcgacctgaagccgccgccggggaggggacgagcaccatgtcgaatctgagcaaaggcacgggcagccggaaggacaccaagatgcggatccgggcctttccggtgcgagaagatgtactaaattcattgaataacaactttcttcaaacgctaaatcaagcttggaatgatcatcaaacagctatggtgatgattagagacatactaatgtacatggaccgtgtgtatgtacaacaaaataatgtggagaacgtctacaatttgggattaattatttttcgagatcaagttgtacgttatgggtgtattagggatcatctacggcaaactctattggatatgattgcaagagagcggaaaggagaagtcgtagacagaggcgcaataagaaatgcttgccagatgttaatgattttaggtctcgaaggaagatcagtctatgaagaagattttgaggctccttttttggaaatgtctgcagaattttttcagatggaaagccagaaatttttagcagaaaatagtgcttcagtatatataaagaaagtagaagctagaattaatgaagaaatagaacgagtgatgcactgccttgacaaatcaacggaagaaccaattgtaaaggtggttgaaagggaactcatttccaagcacatgaagactatagtagaaatggagaattctgggctagtacatatgttgaaaaatggaaagacagaagaccttggttgcatgtacaagttatttagtcgtgtgccaaatggtttgaaaacaatgtgtgagtgtatgagttcctatttgagggagcaaggtaaagctcttgtttctgaagaaggagaaggaaagaatcctgttgactatatccagggcttattggatctgaagagtaggttcgatcgcttcctcctggaatcattcaacaatgaccgtctctttaaacaaactattgcgggtgactttgagtattttctcaacctcaactccaggtctcctgaatacctctcattatttattgatgataagctgaaaaagggagtcaaagggctaacagaacaagaagtagaaacaatattggataaagcaatggtcctttttaggtttatgcaagaaaaagatgtatttgaacgttattataaacaacacttggcaaggagacttctcacaaataaaagtgtttctgatgactctgaaaaaaacatgatatctaagttaaagactgaatgtggatgtcagttcacgtcaaaactggaaggaatgtttagggatatgagcatctcaaacacaacgatggatgaattcaggcaacatctacaggcaactggtgtatctttaggtggtgttgatcttacagtccgggtgctcacgacaggatattggcccactcagtcagccacaccaaagtgcaacatcccaccagcaccaagacatgcttttgagatattcagaaggttctacttagccaaacacagtggtcgacagctcacactccagcatcatatgggttctgcagatctcaatgccacattttatggaccagttaaaaaggaagatggatctgaagttggtgttggaggtgcacaagtaactggctctaatacacggaagcacatattgcaagtttccactttccagatgaccatattaatgctctttaataatagagaaaaatacacatttgaggaaattcagcaagagacagatatccctgaaagagagcttgttagagccctacagtccctcgcctgtggtaaaccaacacagcgggttcttacaaaagaacccaaatcaaaggaaatagaaaatggtcatatatttacagttaatgatcaattcacatccaaactacacagagtcaagattcaaacagttgctgccaaacaaggtgaatccgacccagagaggaaagaaacaaggcagaaagtagacgacgacagaaaacatgagatagaagctgctatagtgcggataatgaaatctagaaagaagatgcagcacaatgttctagtagcggaggtaactcagcagttgaaggcgcgattcttaccaagtccagttgttattaagaaacgtattgaaggacttattgagagagaatatttggcacgaacacctgaggatcgcaaagtatacacatatgtagcataaaatgcgttcagaaatttgatttattcttggactgtactcttcgcatggactgggaagttcttttaaatcattaaatattaagacgaccatctcttctattaaattacagtacatgttctagaccattgagatcaagcctttactccctttgagagtttccaacatcagttgattgagcttcaggctttacaacgtttatccctgtagagatcatctttacagttcctcgggaaaatgtgaatgtgctgcgttttgttttctttactgtatgaaaacaggaaaataaaagagaaatttagaaaatacagctcattacaataaaattgttggatttcatttccccaggtcttcagtgttgatgtaaatgtgttttgtagtgttgcttagcactttgcgcattgtgtaagttgggtaacaaaaatggcaaaagaaatgcagatttcccagttatcttgctctgaagacatttctttagctagtcttatttaattttaaaggtttgataaatatacaaagacccaagcatacaatttgagcatgctgtattctaccacttgcacttactcatcttctagccttatgaccaggaacctttgttttgggctcaagtacacatcctgatttggtttctccctgttgtaatttgagatttcccaaattaagtcttataatgattaggttttgttctgagttatttctagagaaagaaagtattttagtatgtgtaaattgtacaataatttttttgctgttgtactcactgctaatagtggattgtatagggtggtgtttttatttcatttattgtagacaaaaataatgaatttagtatacacatacccactaattcaagtatgtcagagcacaaagttggcagctggttatatttaattcagcccctctgaaaagcacatacagtctatactttgtttataaataccctaggtcctccctgcccctaaatatatattttggtgaagctgtggtgcactattaattttctgtttcaaaatgcaatctaaagatgcaataaatatgatgaccttgatagttttaatgaaatcttcaattcttgcagctgtgttttggaaagtgattaagcaatatttctcaaacctgatgattcttggatatttagctattgtcctccaaagagtcatcgtttcacgttttcaaacatgtgctttgtgctgaagattcttgtcagatatcctgtgcttccagagtatttttatcttcaattttatttaattttgtttcattttgttttcataagacaatgtttcagatatgtaatggggcaaaccactatagatttctgttggatagaaaaatgaaatgttactaataagtttaaattgacccttcgttgactatcagtactgttgatacatttattagaatgtatgtctcagaagatggtttctgtttaaatttatggtcaagttacaacaactgaattctaatatggattaaaaactccacataaatatttttccccatgcgtcttgggttataattttccttttagacttgcaaatatgcttttattgcaattttgtctccatctgtactgtagaattacaagccttgtgctctttatctctacattttccacttctacatgatgcaattaagatgccaatgaaaagtattgtgaacattattctcaggacacttttaccatacttgagtagtactaagtcaggtgtaacatggaaagctaagggtttcaccttctgattttgacataattggaaattttctataatggtaagatgtttataggaaagtaatggtagttcatgtttgagaatttttttattgctttcatttcccagttaaatgatatttaacacctgggaaaacaggacagctcagattgtcgagttagtaaacatgagcgatgtaaaaactttatttgaaatctcctaagtgagacattaaacattttagtgctagtttaagccattaaaagtaaagtttaagtttacgtcattgtctcaagtgtggctgtaaaaatcagatctagagtttagagacatacttgttaactttggagcacaggtttgatatttatgcttctaaatacattaaaacatttctgaattgcagttgaatggttggagattgctggcgatgtgatgctgcactgaaaaaactggtcacacaaaatgtttatatgtttgactgcataagtattattttaggtcataaaggttataacaaaatacatttaacattgctttctttttagcaagaggtcacagatgctattttttctcagtttttaatgctttaatttgaaagaaaaatgcatcctaaccattccatcctgttggtgcagagaaattttggtgatttattagaagacttttaaggagggtggatacatagtttttcaactgcaaaaatcatgtcatctcttcagtaactgttaaagtgtaattctctgccttcattatcaagtccaggacagtgtttattttgaatcgttaacattatttaaagactgaaaattcattgcaattagggaacgcacagcctcacaaaaagtggttgtgattgcaaggattctttatgtcagtgaacttaaaaagggaatgggggaagagatgcatgcctttctaaaggtatgctagagtcacctgtgtagcattgtaattatgtactatcaaacccccaagatgctgatgataggccttctctgtaagaatccttctcatagtgaagcactgttgatgttttgttcaccggatatgttgggtagcagaaaaggcctagaaccagttttaagattatgcctacatctctagaagactagtacactggcatcatcttaggtttctaaatattatttaattccttaatttggaaagcagttttaatgtttacagtttaagatactcattttcagtaactagtgttaaagatttttatctttgcctgtctactgtaacttaagactttcatagaataattttttatagagtatatggtatattgtgtcaatcttggaaggaaagctgttgcatatcaattgtaggtcatgtattttactatatgttgcatagtattttgcattctgtaaatacgaatgttaaaacatttcaggtcagcaaaattagaagtcatttctagtcctcaaagcagaaataattagaaatgttaacatttaagtgcttatcatatgccagatactattctgaatattttatgtatattcattcatttagttgtcatattggctttatgtgacataactgtcattataccagtgttgtccaaggttgctagcaggaaatggcagagccaggagttggacctaggtttaatcctatccatattccatgttacaaattgacatgattttccatattaaaaaattttcatttattttgtacctcattcacatgaatagtaatgtgacaaactaaagttaatacatgaagcattgcaatatggaattttgcacatttttgttagctttacattatttgctgataccaacttttggtaggaaggaaaacagggaaggtgattgctgctattctggaatgtgtccattgaaaagaaaataggcgctttgtctcctacaatcttagagaaagttttacatacttaagtgggtaccacagataggcatgtaccttaaattcaaatctacagttttacaaaatgttttcctttgtgtgcctttcctatgtcaaattagccagaaggaagaagagacgttaagaatggcagataaatttaacaggtaatgatacagagattggccattacgccagctctcaggagaaaaacaactaggatgtcttgaaacccgtgcatttaattttagaaatggcaaatttgtaagcgtgtcatttaagtaatttgatgctcagttttagggtctaagttgacctcgagtgagccatgcaaaaatagctttaaaattatacatgagcagctcaaagtaaacgtgtattttttagtaacaatgaaattgtcaaatttcaagattttaataacaggacagttcaactaataaactttattgcatacaagatttattgcaatgtgggaaaattaaaattctcagtctcag

SEQ ID NO: 1154 - DNA, 2701 bp, Homo sapiens
  source 1..2701: mol_type = genomic DNA
gtagaaaattattcacagaggactaaagacttcttgtcctttgtatgtagtagatgttaagaattcacttcttttcatttagttttaatttgtctcatgatgtagttctctcagtaatcacagaaccttcaagatgtatgaccatggatgaaaaatatgtaaacagcatttgggaccttctgaaaaatgcaattcaagaaatccagcgtaagaataacagtggtcttagttttgaggagctctatagaaatgcatatacaatggttttgcataaacatggagaaaagctctacactggactaagagaagttgttaccgaacatctcataaataaggtgcgagaagatgtactaaattcattgaataacaactttcttcaaacgctaaatcaagcttggaatgatcatcaaacagctatggtgatgattagagacatactaatgtacatggaccgtgtgtatgtacaacaaaataatgtggagaacgtctacaatttgggattaattatttttcgagatcaagttgtacgttatgggtgtattagggatcatctacggcaaactctattggatatgattgcaagagagcggaaaggagaagtcgtagacagaggcgcaataagaaatgcttgccagatgttaatgattttaggtctcgaaggaagatcagtctatgaagaagattttgaggctccttttttggaaatgtctgcagaattttttcagatggaaagccagaaatttttagcagaaaatagtgcttcagtatatataaagaaagtagaagctagaattaatgaagaaatagaacgagtgatgcactgccttgacaaatcaacggaagaaccaattgtaaaggtggttgaaagggaactcatttccaagcacatgaagactatagtagaaatggagaattctgggctagtacatatgttgaaaaatggaaagacagaagaccttggttgcatgtacaagttatttagtcgtgtgccaaatggtttgaaaacaatgtgtgagtgtatgagttcctatttgagggagcaaggtaaagctcttgtttctgaagaaggagaaggaaagaatcctgttgactatatccagggcttattggatctgaagagtaggttcgatcgcttcctcctggaatcattcaacaatgaccgtctctttaaacaaactattgcgggtgactttgagtattttctcaacctcaactccaggtctcctgaatacctctcattatttattgatgataagctgaaaaagggagtcaaagggctaacagaacaagaagtagaaacaatattggataaagcaatggtcctttttaggtttatgcaagaaaaagatgtatttgaacgttattataaacaacacttggcaaggagacttctcacaaataaaagtgtttctgatgactctgaaaaaaacatgatatctaagttaaagactgaatgtggatgtcagttcacgtcaaaactggaaggaatgtttagggatatgagcatctcaaacacaacgatggatgaattcaggcaacatctacaggcaactggtgtatctttaggtggtgttgatcttacagtccgggtgctcacgacaggatattggcccactcagtcagccacaccaaagtgcaacatcccaccagcaccaagacatgcttttgagatattcagaaggttctacttagccaaacacagtggtcgacagctcacactccagcatcatatgggttctgcagatctcaatgccacattttatggaccagttaaaaaggaagatggatctgaagttggtgttggaggtgcacaagtaactggctctaatacacggaagcacatattgcaagtttccactttccagatgaccatattaatgctctttaataatagagaaaaatacacatttgaggaaattcagcaagagacagatatccctgaaagagagcttgttagagccctacagtccctcgcctgtggtaaaccaacacagcgggttcttacaaaagaacccaaatcaaaggaaatagaaaatggtcatatatttacagttaatgatcaattcacatccaaactacacagagtcaagattcaaacagttgctgccaaacaaggtgaatccgacccagagaggaaagaaacaaggcagaaagtagacgacgacagaaaacatgagatagaagctgctatagtgcggataatgaaatctagaaagaagatgcagcacaatgttctagtagcggaggtaactcagcagttgaaggcgcgattcttaccaagtccagttgttattaagaaacgtattgaaggacttattgagagagaatatttggcacgaacacctgaggatcgcaaagtatacacatatgtagcataaaatgcgttcagaaatttgatttattcttggactgtactcttcgcatggactgggaagttcttttaaatcattaaatattaagacgaccatctcttctattaaattacagtacatgttctagaccattgagatcaagcctttactccctttgagagtttccaacatcagttgattgagcttcaggctttacaacgtttatccctgtagagatcatctttacagttcctcgggaaaatgtgaatgtgctgcgttttgttttctttactgtatgaaaacaggaaaataaaagagaaatttagaaaatacagctcattacaataaaa

SEQ ID NO: 1155 - DNA, 3147 bp, Homo sapiens
  source 1..3147: mol_type = genomic DNA
aggacagagttctcagggtgaaaatgatttaaatggctctggaaaagtagtatacaagagatgtaggggaataatgttttctaaaagaaagctacgttatactgaggtgcatttatcatagtgttattcttaaggtgcctttgttttagctcatatctgtatatttgctaagcttgaaaaagctatatttctttctgacatttatttgatgactgtcgatgagcgttcaagagattctatcattgggcactttcctttgttgatgcatgagggattatactgtgctctgggctgtgttaaatctactgacgttctcatttaatcttcatgacagccctttgagatagatgctgttattgaacccaggacttaattttctcaaggtcacatggcttgtgagtaacaaagctgtggcacaaacctaaggctgtctgacagcaaaacccatgttctctaccagtatactaactatgtttaccaagataatcagtgactgtgatgttactttaccatattagcacaatggaatgtgacattagtccactgatttggactaggttttgggatatataagttctaatcccagctctatgattttggatgaccatggatgaaaaatatgtaaacagcatttgggaccttctgaaaaatgcaattcaagaaatccagcgtaagaataacagtggtcttagttttgaggagctctatagaaatgcatatacaatggttttgcataaacatggagaaaagctctacactggactaagagaagttgttaccgaacatctcataaataaggtgcgagaagatgtactaaattcattgaataacaactttcttcaaacgctaaatcaagcttggaatgatcatcaaacagctatggtgatgattagagacatactaatgtacatggaccgtgtgtatgtacaacaaaataatgtggagaacgtctacaatttgggattaattatttttcgagatcaagttgtacgttatgggtgtattagggatcatctacggcaaactctattggatatgattgcaagagagcggaaaggagaagtcgtagacagaggcgcaataagaaatgcttgccagatgttaatgattttaggtctcgaaggaagatcagtctatgaagaagattttgaggctccttttttggaaatgtctgcagaattttttcagatggaaagccagaaatttttagcagaaaatagtgcttcagtatatataaagaaagtagaagctagaattaatgaagaaatagaacgagtgatgcactgccttgacaaatcaacggaagaaccaattgtaaaggtggttgaaagggaactcatttccaagcacatgaagactatagtagaaatggagaattctgggctagtacatatgttgaaaaatggaaagacagaagaccttggttgcatgtacaagttatttagtcgtgtgccaaatggtttgaaaacaatgtgtgagtgtatgagttcctatttgagggagcaaggtaaagctcttgtttctgaagaaggagaaggaaagaatcctgttgactatatccagggcttattggatctgaagagtaggttcgatcgcttcctcctggaatcattcaacaatgaccgtctctttaaacaaactattgcgggtgactttgagtattttctcaacctcaactccaggtctcctgaatacctctcattatttattgatgataagctgaaaaagggagtcaaagggctaacagaacaagaagtagaaacaatattggataaagcaatggtcctttttaggtttatgcaagaaaaagatgtatttgaacgttattataaacaacacttggcaaggagacttctcacaaataaaagtgtttctgatgactctgaaaaaaacatgatatctaagttaaagactgaatgtggatgtcagttcacgtcaaaactggaaggaatgtttagggatatgagcatctcaaacacaacgatggatgaattcaggcaacatctacaggcaactggtgtatctttaggtggtgttgatcttacagtccgggtgctcacgacaggatattggcccactcagtcagccacaccaaagtgcaacatcccaccagcaccaagacatgcttttgagatattcagaaggttctacttagccaaacacagtggtcgacagctcacactccagcatcatatgggttctgcagatctcaatgccacattttatggaccagttaaaaaggaagatggatctgaagttggtgttggaggtgcacaagtaactggctctaatacacggaagcacatattgcaagtttccactttccagatgaccatattaatgctctttaataatagagaaaaatacacatttgaggaaattcagcaagagacagatatccctgaaagagagcttgttagagccctacagtccctcgcctgtggtaaaccaacacagcgggttcttacaaaagaacccaaatcaaaggaaatagaaaatggtcatatatttacagttaatgatcaattcacatccaaactacacagagtcaagattcaaacagttgctgccaaacaaggtgaatccgacccagagaggaaagaaacaaggcagaaagtagacgacgacagaaaacatgagatagaagctgctatagtgcggataatgaaatctagaaagaagatgcagcacaatgttctagtagcggaggtaactcagcagttgaaggcgcgattcttaccaagtccagttgttattaagaaacgtattgaaggacttattgagagagaatatttggcacgaacacctgaggatcgcaaagtatacacatatgtagcataaaatgcgttcagaaatttgatttattcttggactgtactcttcgcatggactgggaagttcttttaaatcattaaatattaagacgaccatctcttctattaaattacagtacatgttctagaccattgagatcaagcctttactccctttgagagtttccaacatcagttgattgagcttcaggctttacaacgtttatccctgtagagatcatctttacagttcctcgggaaaatgtgaatgtgctgcgttttgttttctttactgtatgaaaacaggaaaataaaagagaaatttagaaaatac

SEQ ID NO: 1156 - DNA, 1879 bp, Homo sapiens
  source 1..1879: mol_type = genomic DNA
ccgcccttccgtgccctgcccttccctgcccttccccgccctgccccgcccggcccggcccggccctgcccaaccctgccccgccctgccccgcccagccggccacctcttaaccgcgatcctccagtgcacttgccagttgttccggacacatagaaagataacgacgggaagagcggggcccgctttggggtccaggcaggttttggggcctcctgtctggtgggaggaggccgcagcgcagcaccctgctcgtcacttgggatggagaccggctttcccgcaatcatgtaccctggatcttttattgggggctggggagaagagtatctcagctgggaaggaccggggctcccagatttcgtcttccagcagcagcccgtggagtctgaagcaatgcactgcagcaaccccaagagtggagttgtgctggctacagtggcccgaggtcccgatgcttgtcagatactcaccagagccccgctgggccaggatcccccgcagaggacagtgctagggctgctaactgcaaatgggcagtacaggaggacctgtggccaggggatcacaagaatcaggtgttattctggatcagaaaatgccttccctccagctggaaagaaagcactccctgactgtggggtccaagagccccccaagcaagggtttgacatctacatggatgaactagagcagggggacagagacagctgctcggtcagagaggggatggcatttgaggatgtgtatgaagtagacaccggcacactcaagtcagacctgcacttcctgctggatttcaacacagtttcccctatgctggtagattcatctctcctctcccagtctgaagatatatccagtcttggcacagatgtgataaatgtgactgaatatgctgaagaaatttatcagtaccttagggaagctgaaataaggcacagacccaaagcacactacatgaagaagcagccagacatcacggaaggcatgcgcacgattctggtggactggctggtggaggttggggaagaatataaacttcgagcagagaccctgtatctggctgtcaacttcctggacaggttcctttcatgtatgtctgttctgagagggaaactgcagctcgtaggaacagcagctatgcttttggcttcgaaatatgaagagatatatcctcctgaagtagacgagtttgtctatatcaccgatgatacatacacaaaacgacaactgttaaaaatggaacacttgcttctgaaagttctagcttttgatctgacagtaccaaccaccaaccagtttctccttcagtacttgaggcgacaaggagtgtgcgtcaggactgagaacctggctaagtacgtagcagagctgagtctacttgaagcagatccattcttgaaatatcttccttcactgatagctgcagcagctttttgcctggcaaactatactgtgaacaagcacttttggccagaaacccttgctgcatttacagggtattcattaagtgaaattgtgccttgcctgagtgagcttcataaagcgtaccttgatataccccatcgacctcagcaagcaattagggagaagtacaaggcttcaaagtacctgtgtgtgtccctcatggagccacctgcagttcttcttctacaataagtttctgaatggaagcacttccagaacttcacctccatatcagaagtgccaataatcgtcataggcttctgcacgttggatcaactaatgttgtttacaatatagatgacattttaaaaatgtaaatgaatttagtttcccttagactttagtagtttgtaatatagtccaacattttttaaacaataaactgcttgtcttatgaccatgtgttaga

SEQ ID NO: 1157 - DNA, 1962 bp, Homo sapiens
  source 1..1962: mol_type = genomic DNA
aacagacgcgggtgggcagctcagccgcatcgctaagcccggccgcctcccaggctggaatccctcgacacttggtccttcccgccccgcccttccgtgccctgcccttccctgcccttccccgccctgccccgcccggcccggcccggccctgcccaaccctgccccgccctgccccgcccagccggccacctcttaaccgcgatcctccagtgcacttgccagttgttccggacacatagaaagataacgacgggaagagcggggcccgctttggggtccaggcaggttttggggcctcctgtctggtgggaggaggccgcagcgcagcaccctgctcgtcacttgggatggagaccggctttcccgcaatcatgtaccctggatcttttattgggggctggggagaagagtatctcagctgggaaggaccggggctcccagatttcgtcttccagcagcccgtggagtctgaagcaatgcactgcagcaaccccaagagtggagttgtgctggctacagtggcccgaggtcccgatgcttgtcagatactcaccagagccccgctgggccaggatcccccgcagaggacagtgctagggctgctaactgcaaatgggcagtacaggaggacctgtggccaggggatcacaagaatcaggtgttattctggatcagaaaatgccttccctccagctggaaagaaagcactccctgactgtggggtccaagagccccccaagcaagggtttgacatctacatggatgaactagagcagggggacagagacagctgctcggtcagagaggggatggcatttgaggatgtgtatgaagtagacaccggcacactcaagtcagacctgcacttcctgctggatttcaacacagtttcccctatgctggtagattcatctctcctctcccagtctgaagatatatccagtcttggcacagatgtgataaatgtgactgaatatgctgaagaaatttatcagtaccttagggaagctgaaataaggcacagacccaaagcacactacatgaagaagcagccagacatcacggaaggcatgcgcacgattctggtggactggctggtggaggttggggaagaatataaacttcgagcagagaccctgtatctggctgtcaacttcctggacaggttcctttcatgtatgtctgttctgagagggaaactgcagctcgtaggaacagcagctatgcttttggcttcgaaatatgaagagatatatcctcctgaagtagacgagtttgtctatatcaccgatgatacatacacaaaacgacaactgttaaaaatggaacacttgcttctgaaagttctagcttttgatctgacagtaccaaccaccaaccagtttctccttcagtacttgaggcgacaaggagtgtgcgtcaggactgagaacctggctaagtacgtagcagagctgagtctacttgaagcagatccattcttgaaatatcttccttcactgatagctgcagcagctttttgcctggcaaactatactgtgaacaagcacttttggccagaaacccttgctgcatttacagggtattcattaagtgaaattgtgccttgcctgagtgagcttcataaagcgtaccttgatataccccatcgacctcagcaagcaattagggagaagtacaaggcttcaaagtacctgtgtgtgtccctcatggagccacctgcagttcttcttctacaataagtttctgaatggaagcacttccagaacttcacctccatatcagaagtgccaataatcgtcataggcttctgcacgttggatcaactaatgttgtttacaatatagatgacattttaaaaatgtaaatgaatttagtttcccttagactttagtagtttgtaatatagtccaacattttttaaacaataaactgcttgtcttatgaccatgtgttaga

SEQ ID NO: 1158 - DNA, 1844 bp, Homo sapiens
  source 1..1844: mol_type = genomic DNA
gccgcagcctgcgcagccccgaggaccccgcgtcgctctcccgagccagggttctcaggagcgggccgcgcaggagacgttagagggggttgttagcggctgttgggagaacgggtcacggaaacagtcccttccaaagccggggccatcgtggggtgggcgagtccgccctcccaggccgggggcgcggaccagaggggacgtgtgcagacggccgcggtcagccccacctcgcccgggcggagacgcacagctggagctggagggccgtcgcccgttgggccctcaggggcctgaacgcccaggggtcgcggcgagtccacccggagcgagtcagcagcagcccgtggagtctgaagcaatgcactgcagcaaccccaagagtggagttgtgctggctacagtggcccgaggtcccgatgcttgtcagatactcaccagagccccgctgggccaggatcccccgcagaggacagtgctagggctgctaactgcaaatgggcagtacaggaggacctgtggccaggggatcacaagaatcaggtgttattctggatcagaaaatgccttccctccagctggaaagaaagcactccctgactgtggggtccaagagccccccaagcaagggtttgacatctacatggatgaactagagcagggggacagagacagctgctcggtcagagaggggatggcatttgaggatgtgtatgaagtagacaccggcacactcaagtcagacctgcacttcctgctggatttcaacacagtttcccctatgctggtagattcatctctcctctcccagtctgaagatatatccagtcttggcacagatgtgataaatgtgactgaatatgctgaagaaatttatcagtaccttagggaagctgaaataaggcacagacccaaagcacactacatgaagaagcagccagacatcacggaaggcatgcgcacgattctggtggactggctggtggaggttggggaagaatataaacttcgagcagagaccctgtatctggctgtcaacttcctggacaggttcctttcatgtatgtctgttctgagagggaaactgcagctcgtaggaacagcagctatgcttttggcttcgaaatatgaagagatatatcctcctgaagtagacgagtttgtctatatcaccgatgatacatacacaaaacgacaactgttaaaaatggaacacttgcttctgaaagttctagcttttgatctgacagtaccaaccaccaaccagtttctccttcagtacttgaggcgacaaggagtgtgcgtcaggactgagaacctggctaagtacgtagcagagctgagtctacttgaagcagatccattcttgaaatatcttccttcactgatagctgcagcagctttttgcctggcaaactatactgtgaacaagcacttttggccagaaacccttgctgcatttacagggtattcattaagtgaaattgtgccttgcctgagtgagcttcataaagcgtaccttgatataccccatcgacctcagcaagcaattagggagaagtacaaggcttcaaagtacctgtgtgtgtccctcatggagccacctgcagttcttcttctacaataagtttctgaatggaagcacttccagaacttcacctccatatcagaagtgccaataatcgtcataggcttctgcacgttggatcaactaatgttgtttacaatatagatgacattttaaaaatgtaaatgaatttagtttcccttagactttagtagtttgtaatatagtccaacattttttaaacaataaactgcttgtcttatgaccatgtgttaga

SEQ ID NO: 1159 - DNA, 1841 bp, Homo sapiens
  source 1..1841: mol_type = genomic DNA
gccgcagcctgcgcagccccgaggaccccgcgtcgctctcccgagccagggttctcaggagcgggccgcgcaggagacgttagagggggttgttagcggctgttgggagaacgggtcacggaaacagtcccttccaaagccggggccatcgtggggtgggcgagtccgccctcccaggccgggggcgcggaccagaggggacgtgtgcagacggccgcggtcagccccacctcgcccgggcggagacgcacagctggagctggagggccgtcgcccgttgggccctcaggggcctgaacgcccaggggtcgcggcgagtccacccggagcgagtcagcagcccgtggagtctgaagcaatgcactgcagcaaccccaagagtggagttgtgctggctacagtggcccgaggtcccgatgcttgtcagatactcaccagagccccgctgggccaggatcccccgcagaggacagtgctagggctgctaactgcaaatgggcagtacaggaggacctgtggccaggggatcacaagaatcaggtgttattctggatcagaaaatgccttccctccagctggaaagaaagcactccctgactgtggggtccaagagccccccaagcaagggtttgacatctacatggatgaactagagcagggggacagagacagctgctcggtcagagaggggatggcatttgaggatgtgtatgaagtagacaccggcacactcaagtcagacctgcacttcctgctggatttcaacacagtttcccctatgctggtagattcatctctcctctcccagtctgaagatatatccagtcttggcacagatgtgataaatgtgactgaatatgctgaagaaatttatcagtaccttagggaagctgaaataaggcacagacccaaagcacactacatgaagaagcagccagacatcacggaaggcatgcgcacgattctggtggactggctggtggaggttggggaagaatataaacttcgagcagagaccctgtatctggctgtcaacttcctggacaggttcctttcatgtatgtctgttctgagagggaaactgcagctcgtaggaacagcagctatgcttttggcttcgaaatatgaagagatatatcctcctgaagtagacgagtttgtctatatcaccgatgatacatacacaaaacgacaactgttaaaaatggaacacttgcttctgaaagttctagcttttgatctgacagtaccaaccaccaaccagtttctccttcagtacttgaggcgacaaggagtgtgcgtcaggactgagaacctggctaagtacgtagcagagctgagtctacttgaagcagatccattcttgaaatatcttccttcactgatagctgcagcagctttttgcctggcaaactatactgtgaacaagcacttttggccagaaacccttgctgcatttacagggtattcattaagtgaaattgtgccttgcctgagtgagcttcataaagcgtaccttgatataccccatcgacctcagcaagcaattagggagaagtacaaggcttcaaagtacctgtgtgtgtccctcatggagccacctgcagttcttcttctacaataagtttctgaatggaagcacttccagaacttcacctccatatcagaagtgccaataatcgtcataggcttctgcacgttggatcaactaatgttgtttacaatatagatgacattttaaaaatgtaaatgaatttagtttcccttagactttagtagtttgtaatatagtccaacattttttaaacaataaactgcttgtcttatgaccatgtgttaga

SEQ ID NO: 1160 - DNA, 2797 bp, Homo sapiens
  source 1..2797: mol_type = genomic DNA
catttcaatagtcgcgggatacttgaactgcaagaacagccgccgctccggcgggctgctcgctgcatctctgggcgtctttggctcgccacgctgggcagtgcctgcctgcgcctttcgcaacctcctcggccctgcgtggtctcgagctgggtgagcgagcgggcgggctggtaggctggcctgggctgcgaccggcggctacgactattctttggccgggtcggtgcgagtggtcggctgggcagagtgcacgctgcttggcgccgcaggctgatcccgccgtccactcccgggagcagtgatgttgggcaactctgcgccggggcctgcgacccgcgaggcgggctcggcgctgctagcattgcagcagacggcgctccaagaggaccaggagaatatcaacccggaaaaggcagcgcccgtccaacaaccgcggacccgggccgcgctggcggtactgaagtccgggaacccgcggggtctagcgcagcagcagaggccgaagacgagacgggttgcaccccttaaggatcttcctgtaaatgatgagcatgtcaccgttcctccttggaaagcaaacagtaaacagcctgcgttcaccattcatgtggatgaagcagaaaaagaagctcagaagaagccagctgaatctcaaaaaatagagcgtgaagatgccctggcttttaattcagccattagtttacctggacccagaaaaccattggtccctcttgattatccaatggatggtagttttgagtcaccacatactatggacatgtcaattatattagaagatgaaaagccagtgagtgttaatgaagtaccagactaccatgaggatattcacacataccttagggaaatggaggttaaatgtaaacctaaagtgggttacatgaagaaacagccagacatcactaacagtatgagagctatcctcgtggactggttagttgaagtaggagaagaatataaactacagaatgagaccctgcatttggctgtgaactacattgataggttcctgtcttccatgtcagtgctgagaggaaaacttcagcttgtgggcactgctgctatgctgttagcctcaaagtttgaagaaatataccccccagaagtagcagagtttgtgtacattacagatgatacctacaccaagaaacaagttctgagaatggagcatctagttttgaaagtccttacttttgacttagctgctccaacagtaaatcagtttcttacccaatactttctgcatcagcagcctgcaaactgcaaagttgaaagtttagcaatgtttttgggagaattaagtttgatagatgctgacccatacctcaagtatttgccatcagttattgctggagctgcctttcatttagcactctacacagtcacgggacaaagctggcctgaatcattaatacgaaagactggatataccctggaaagtcttaagccttgtctcatggaccttcaccagacctacctcaaagcaccacagcatgcacaacagtcaataagagaaaagtacaaaaattcaaagtatcatggtgtttctctcctcaacccaccagagacactaaatctgtaacaatgaaagactgcctttgttttctaagatgtaaatcactcaaagtatatggtgtacagtttttaacttaggttttaattttacaatcatttctgaatacagaagttgtggccaagtacaaattatggtatctattactttttaaatggttttaatttgtatatcttttgtatatgtatctgtcttagatatttggctaattttaagtggttttgttaaagtattaatgatgccagctgtcaggataataaattgatttggaaaactttgcaagtcaaatttaacttcttcaggattttgcttagtaaagaagtttacttggtttactatataatgggaagtgaaaagccttcctctaaaattaaagtaggtttaggaaaacagaccctcaaattctgacattcattttcctaagcaactggatcaatttgctgacttgggcataatctaatctaagcatatctgaatacagtattcagagatagatacagtagagattccccagactttttcgctctttgtaaaacctgtttgtttaggttttgcgaggtaaactcaacagaggttgggagtggaagagggtgggaagcttatatgcaaattaacagacgagaaatgctccagaaggtttattattttaaagcacattaaaaacaaaaaactatttttaaaatcctgctagattttataatggatttgtgaataaaaaatacccagggttctcagaatggaataaatatcccttttaatagttatatatacagatatacaactgttagctttaattggcagctctcttcttttttcttcttttcactggctttttacttggtgctttttcttgttttgcactggtggtctgtgttctgtgaataaagcaaagtaagaatttactaagagtatgttaagttttggattattgaaataagaggcatttcttagttttccagtaggatctaaaatgtgtcagctatgagtaagactggcatccaagaagtttatattatagatttaggtcctaatttttataaatcacaaggtaaaaaaatcacagaacagatggatctctaatgaaaaagggatgtctttttgtttatagtcatgtggcaagatgagagtaaaaccagagagcaaacctctataagtgttgagtatatgtatacatttgaaataaaccagaaatttgttacctta

SEQ ID NO: 1161 - DNA, 2169 bp, Homo sapiens
  source 1..2169: mol_type = genomic DNA
cgaacgccttcgcgcgatcgccctggaaacgcattctctgcgaccggcagccgccaatgggaagggagtgagtgccacgaacaggccaataaggagggagcagtgcggggtttaaatctgaggctaggctggctcttctcggcgtgctgcggcggaacggctgttggtttctgctgggtgtaggtccttggctggtcgggcctccggtgttctgcttctccccgctgagctgctgcctggtgaagaggaagccatggcgctccgagtcaccaggaactcgaaaattaatgctgaaaataaggcgaagatcaacatggcaggcgcaaagcgcgttcctacggcccctgctgcaacctccaagcccggactgaggccaagaacagctcttggggacattggtaacaaagtcagtgaacaactgcaggccaaaatgcctatgaagaaggaagcaaaaccttcagctactggaaaagtcattgataaaaaactaccaaaacctcttgaaaaggtacctatgctggtgccagtgccagtgtctgagccagtgccagagccagaacctgagccagaacctgagcctgttaaagaagaaaaactttcgcctgagcctattttggttgatactgcctctccaagcccaatggaaacatctggatgtgcccctgcagaagaagacctgtgtcaggctttctctgatgtaattcttgcagtaaatgatgtggatgcagaagatggagctgatccaaacctttgtagtgaatatgtgaaagatatttatgcttatctgagacaacttgaggaagagcaagcagtcagaccaaaatacctactgggtcgggaagtcactggaaacatgagagccatcctaattgactggctagtacaggttcaaatgaaattcaggttgttgcaggagaccatgtacatgactgtctccattattgatcggttcatgcagaataattgtgtgcccaagaagatgctgcagctggttggtgtcactgccatgtttattgcaagcaaatatgaagaaatgtaccctccagaaattggtgactttgcttttgtgactgacaacacttatactaagcaccaaatcagacagatggaaatgaagattctaagagctttaaactttggtctgggtcggcctctacctttgcacttccttcggagagcatctaagattggagaggttgatgtcgagcaacatactttggccaaatacctgatggaactaactatgttggactatgacatggtgcactttcctccttctcaaattgcagcaggagctttttgcttagcactgaaaattctggataatggtgaatggacaccaactctacaacattacctgtcatatactgaagaatctcttcttccagttatgcagcacctggctaagaatgtagtcatggtaaatcaaggacttacaaagcacatgactgtcaagaacaagtatgccacatcgaagcatgctaagatcagcactctaccacagctgaattctgcactagttcaagatttagccaaggctgtggcaaaggtgtaacttgtaaacttgagttggagtactatatttacaaataaaattggcaccatgtgccatctgtacatattactgttgcatttacttttaataaagcttgtggccccttttacttttttatagcttaactaatttgaatgtggttacttcctactgtagggtagcggaaaagttgtcttaaaaggtatggtggggatatttttaaaaactccttttggtttacctggggatccaattgatgtatatgtttatatactgggttcttgttttatatacctggcttttactttattaatatgagttactgaaggtgatggaggtatttgaaaattttacttccataggacatactgcatgtaagccaagtcatggagaatctgctgcatagctctattttaaagtaaaagtctaccaccgaatccctagtccccctgttttctgtttcttcttgtgattgctgccataattctaagttatttacttttaccactatttaagttatcaactttagctagtatcttcaaactttcactttgaaaaatgagaattttatattctaagccagttttcattttggttttgtgttttggttaataaaacaatactcaaatacaaaa

SEQ ID NO: 1162 - DNA, 1190 bp, Homo sapiens
  source 1..1190: mol_type = genomic DNA
atggcgctccgagtcaccaggaactcgaaaattaatgctgaaaataaggcgaagatcaacatggcaggcgcaaagcgcgttcctacggcccctgctgcaacctccaagcccggactgaggccaagaacagctcttggggacattggtaacaaagtcagtgaacaactgcaggccaaaatgcctatgaagaaggaagcaaaaccttcagctactggaaaagtcattgataaaaaactaccaaaacctcttgaaaaggtacctatgctggtgccagtgccagtgtctgagccagtgccagagccagaacctgagccagaacctgagcctgttaaagaagaaaaactttcgcctgagcctattttggttgatactgcctctccaagcccaatggaaacatctggatgtgcccctgcagaagaagacctgtgtcaggctttctctgatgtaattcttgcagtaaatgatgtggatgcagaagatggagctgatccaaacctttgtagtgaatatgtgaaagatatttatgcttatctgagacaacttgaggaagagcaagcagtcagaccaaaatacctactgggtcgggaagtcactggaaacatgagagccatcctaattgactggctagtacaggttcaaatgaaattcaggttgttgcaggagaccatgtacatgactgtctccattattgatcggttcatgcagaataattgtgtgcccaagaagatgctgcagctggttggtgtcactgccatgtttattgcaagcaaatatgaagaaatgtaccctccagaaattggtgactttgcttttgtgactgacaacacttatactaagcaccaaatcagacagatggaaatgaagattctaagagctttaaactttggtctgggtcggcctctacctttgcacttccttcggagagcatctaagattggagaggttgatgtcgagcaacatactttggccaaatacctgatggaactaactatgttggactatgacatggtgcactttcctccttctcaaattgcagcaggagctttttgcttagcactgaaaattctggataatggtgaatggactgtcaagaacaagtatgccacatcgaagcatgctaagatcagcactctaccacagctgaattctgcactagttcaagatttagccaaggctgtggcaaaggtgta

SEQ ID NO: 1163 - DNA, 1331 bp, Homo sapiens
  source 1..1331: mol_type = genomic DNA
aggctggctcttctcggcgtgctgcggcggaacggctgttggtttctgctgggtgtaggtccttggctggtcgggcctccggtgttctgcttctccccgctgagctgctgcctggtgaagaggaagccatggcgctccgagtcaccaggaactcgaaaattaatgctgaaaataaggcgaagatcaacatggcaggcgcaaagcgcgttcctacggcccctgctgcaacctccaagcccggactgaggccaagaacagctcttggggacattggtaacaaagtcagtgaacaactgcaggccaaaatgcctatgaagaaggaagcaaaaccttcagctactggaaaagtcattgataaaaaactaccaaaacctcttgaaaaggtacctatgctggtgccagtgccagtgtctgagccagtgccagagccagaacctgagccagaacctgagcctgttaaagaagaaaaactttcgcctgagcctattttggttgatactgcctctccaagcccaatggaaacatctggatgtgcccctgcagaagaagacctgtgtcaggctttctctgatgtaattcttgcagtaaatgatgtggatgcagaagatggagctgatccaaacctttgtagtgaatatgtgaaagatatttatgcttatctgagacaacttgaggaagagcaagcagtcagaccaaaatacctactgggtcgggaagtcactggaaacatgagagccatcctaattgactggctagtacaggttcaaatgaaattcaggttgttgcaggagaccatgtacatgactgtctccattattgatcggttcatgcagaataattgtgtgcccaagaagatgctgcagctggttggtgtcactgccatgtttattgcaagcaaatatgaagaaatgtaccctccagaaattggtgactttgcttttgtgactgacaacacttatactaagcaccaaatcagacagatggaaatgaagattctaagagctttaaactttggtctgggtcggcctctacctttgcacttccttcggagagcatctaagattggagaggttgatgtcgagcaacatactttggccaaatacctgatggaactaactatgttggactatgacatggtgcactttcctccttctcaaattgcagcaggagctttttgcttagcactgaaaattctggataatggtgaatggacaccaactctacaacattacctgtcatatactgaagaatctcttcttccagttatgcagcacctggctaagaatgtagtcatggtaaatcaaggacttacaaagcacatggtgagtcaa

SEQ ID NO: 1164 - DNA, 1556 bp, Homo sapiens
  source 1..1556: mol_type = genomic DNA
gtgcgcagggccgcccaatggggcgcaagcgacgcggtatttgaatcctggaacaaggctacagcgtcgaagatccccagcgctgcgggctcggagagcagtcctaacggcgcctcgtacgctagtgtcctcccttttcagtccgcgtccctccctgggccgggctggcactcttgccttccccgtccctcatggcgctgctccgacgcccgacggtgtccagtgatttggagaatattgacacaggagttaattctaaagttaagagtcatgtgactattaggcgaactgttttagaagaaattggaaatagagttacaaccagagcagcacaagtagctaagaaagctcagaacaccaaagttccagttcaacccaccaaaacaacaaatgtcaacaaacaactgaaacctactgcttctgtcaaaccagtacagatggaaaagttggctccaaagggtccttctcccacacctgaggatgtctccatgaaggaagagaatctctgccaagctttttctgatgccttgctctgcaaaatcgaggacattgataacgaagattgggagaaccctcagctctgcagtgactacgttaaggatatctatcagtatctcaggcagctggaggttttgcagtccataaacccacatttcttagatggaagagatataaatggacgcatgcgtgccatcctagtggattggctggtacaagtccactccaagtttaggcttctgcaggagactctgtacatgtgcgttggcattatggatcgatttttacaggttcagccagtttcccggaagaagcttcaattagttgggattactgctctgctcttggcttccaagtatgaggagatgttttctccaaatattgaagactttgtttacatcacagacaatgcttataccagttcccaaatccgagaaatggaaactctaattttgaaagaattgaaatttgagttgggtcgacccttgccactacacttcttaaggcgagcatcaaaagccggggaggttgatgttgaacagcacactttagccaagtatttgatggagctgactctcatcgactatgatatggtgcattatcatccttctaaggtagcagcagctgcttcctgcttgtctcagaaggttctaggacaaggaaaatggaacttaaagcagcagtattacacaggatacacagagaatgaagtattggaagtcatgcagcacatggccaagaatgtggtgaaagtaaatgaaaacttaactaaattcatcgccatcaagaataagtatgcaagcagcaaactcctgaagatcagcatgatccctcagctgaactcaaaagccgtcaaagaccttgcctccccactgataggaaggtcctaggctgccgtggcccctggggatgtgtgcttcattgtgccctttttcttattggtttagaactcttgattttgtacatagtcctctggtctatctcatgaaacctcttctcagaccagttttctaaacatatattgaggaaaaataaagcgattggtttttcttaaggta

SEQ ID NO: 1165 - DNA, 1704 bp, Homo sapiens
  source 1..1704: mol_type = genomic DNA
gatttgatcgaggagcgcggttaccggacgggctgggtctatggtcgctccgcgggccgctccgccggctggtgcttttttatcagggcaagctgtgttccatggcagggaacttttggcagagctcccactatttgcaatggattttggataaacaagatctgttgaaggagcgccaaaaggatttaaagtttctctcagaggaagaatattggaagttacaaatattttttacaaatgttatccaagcattaggtgaacatcttaaattaagacaacaagttattgccactgctacggtatatttcaagagattctatgccaggtattctctgaaaagtatagatcctgtattaatggctcctacatgtgtgtttttggcatccaaagtagaggaatttggagtagtttcaaatacaagattgattgctgctgctacttctgtatgtaagtgcaaaaagtatatctgctttaaggatgtaattctaaagaaagctccagagtacatagatttttttttttttagtttatgagacatatgagattggttggctttattaaatttcctgaggataactttatatctagtgtatctggcaaaaaaatcaagctaaaaggtttttttttaaaaagatataaagatattacttttaatgttaaaatggatagtaattatcaatccaaaaacatcaactcagtggcttttaatcttgtaagagtaaagaaaaaattctgtttccgaattttattgtattttattgttttctaatgactattatgtcattcttatgggtagatattaatatctatgtgcaaacccgttcctgtgttgttgggttgttatgaggaccaaatgagttaatataagcttttagaacagtgccttgcttagtatgttactttgctgaggctgccataacaaaatgccacagaacaggtggcttaaacaacagaagcgtattttctcacagttttagagcatggaaatccaagatcaaggtgtctggctattcttacatggacctttctgtgagcacacacactcctggtttgctgtcttcttcatgtgaggacaatagtcttacagaattaggccccactcttatgtcctcatttaatcttttttttttctttcttttttttttttttttttttgagacagagtctcgctctgtcgcccaggctggagtgctcacttcaacttccgcctcctgggttcaagtgattctcctgcctcagcctcctgagtacctgggactacaggcatgtgccaccatgcccagctcatttttgtattttttagtagagacggggtttcaccatgttggccagactagtctcaaactcctgatctcgtgatccgctagcctcggcctcccaacgtgctgggattataggtgtgagccaccatgtctggcctgtcctcatttaatcttatccctttaaagaccctctctccaaatacagtcacattctgaggtactaggagttagggcttcaacatacgaattttggagggggacatatattggtccacaatacttggtaaactttaggggctatcatcatcatcatcatcttcaatgacaacaacatcattatcactggaaaacactgtgccaatgcagtggcattggtaccaaggtaaaatacaaggaatttaaggacaaaaaaagaagacagaaacataaaaatattaataca

SEQ ID NO: 1166 - DNA, 2473 bp, Homo sapiens
  source 1..2473: mol_type = genomic DNA
aacagaaccccgtatctgagccacttcgcctaggttagacccactcagcaactcccgtgctgaagacaggagaccgagcggcttgggcccccggccagaattctcaagacgctctcgcgagagccttccaaccgccgcgagctctcgtgaacactagttctcttcaatctcagcacctccaagggtcagcacctcccctccggctccctccgctaccgcgggccggaacttttgtcgataggaacgggtttgcacagttgagtgttgtcggccggcgtgaaggagactagggggccatcctcttcctttcgccgtcgccgccgcggagcggagtcgagccgagctgatttgatcgaggagcgcggttaccggacgggctgggtctatggtcgctccgcgggccgctccgccggctggtgcttttttatcagggcaagctgtgttccatggcagggaacttttggcagagctcccactatttgcaatggattttggataaacaagatctgttgaaggagcgccaaaaggatttaaagtttctctcagaggaagaatattggaagttacaaatattttttacaaatgttatccaagcattaggtgaacatcttaaattaagacaacaagttattgccactgctacggtatatttcaagagattctatgccaggtattctctgaaaagtatagatcctgtattaatggctcctacatgtgtgtttttggcatccaaagtagaggaatttggagtagtttcaaatacaagattgattgctgctgctacttctgtattaaaaactagattttcatatgcctttccaaaggaatttccttataggatgaatcatatattagaatgtgaattctatctgttagaactaatggattgttgcttgatagtgtatcatccttatagacctttgctccagtatgtgcaggacatgggccaagaagacatgttgcttccccttgcatggaggatagtgaatgatacctacagaacggatctttgcctactgtatcctcctttcatgatagctttagcttgcctacatgtagcctgtgttgtacagcagaaagatgccaggcaatggtttgctgagctttctgtggatatggaaaagattttggaaataatcagggttattttaaaactatatgagcagtggaagaatttcgatgagagaaaagagatggcaaccattcttagtaagatgccaaaaccaaaaccacctccaaacagtgaaggagagcagggtccaaatggaagtcagaactctagctacagccaatcttaaaacattccgaagaattccatagtggaccacttggaaataaaccattggacagatttcagtaatgtcttcagtggaacacaaatgaaaatgaatagcttgtttctgtcaagcatattggaaagtgattttatttttgcaaaataagtttttctttaatatgattctagtacataattgattaaaatctcttgattataaatgtttggaaaggttctaaggggacctacagacagacatacatagacatttcaaaattaatagcttttgattagtataatatttcttaatttggataataaaaattgtagctttttattaagccaggaaacatgaagcataatttgtttaaaattctctttggtcattgagggaccaaaaaaggacgtaaaatttacagtcaatctatgagggtttttttccctccataagtttaactttaaaactgtatttaaggaatcaaatcttacaaaatcctggaagattttggtaatgatgttgataatttcagggaaattaatcaagtacctatattgatttaaaagtgtattttattcagtagtttgaggatcttgccatggaagatactagcccagcctagcagaaaagtgcaatatgtatagcatactttgacattttaaacatgatagtccataaccattttgaaatgctgggcaaactacatgaagttatttataattaattcacagctaatcaggcattttgaaagcttaattggattcaaaaaccataatgttggaatttggtaaaattttaatgttgatttttactgtgaaaaggtttttataagatatacacaccctagtttaatgttgtgtcttggtgtggatttacagatttactacaggtattctgaaccaggaacacaatcaggtttcaggccagtttgatactggctgtccttaattctaatatgagagtaggacatcatactaaatgttatgtcagtgggactgtactgtctgtggaacttagcaaattaatcattttcttcagacttgaaggagagtgataaataaaatttggagtcataggatattgatgcacaatttaaggattaaacatttttaatcaattgtggatgatggcttattaaatgttgacttcctagtataaaactgcaagaataaaagtaacttctccagctgtatcgacta

SEQ ID NO: 1167 - DNA, 1035 bp, Homo sapiens
  source 1..1035: mol_type = genomic DNA
gaacactagttctcttcaatctcagcacctccaagggtcagcacctcccctccggctccctccgctaccgcgggccggaacttttgtcgataggaacgggtttgcacatttgcaatggattttggataaacaagatctgttgaaggagcgccaaaaggatttaaagtttctctcagaggaagaatattggaagttacaaatattttttacaaatgttatccaagcattaggtgaacatcttaaattaagacaacaagttattgccactgctacggtatatttcaagagattctatgccaggtattctctgaaaagtatagatcctgtattaatggctcctacatgtgtgtttttggcatccaaagtagaggaatttggagtagtttcaaatacaagattgattgctgctgctacttctgtattaaaaactagattttcatatgcctttccaaaggaatttccttataggatgaatcatatattagaatgtgaattctatctgttagaactaatggattgttgcttgatagtgtatcatccttatagacctttgctccagtatgtgcaggacatgggccaagaagacatgttgcttccccttgcatggaggatagtgaatgatacctacagaacggatctttgcctactgtatcctcctttcatgatagctttagcttgcctacatgtagcctgtgttgtacagcagaaagatgccaggcaatggtttgctgagctttctgtggatatggaaaagattttggaaataatcagggttattttaaaactatatgagcagtggaagaatttcgatgagagaaaagagatggcaaccattcttagtaagatgccaaaaccaaaaccacctccaaacagtgaaggagagcagggtccaaatggaagtcagaactctagctacagccaatcttaaaacattccgaagaattccatagtggaccacttggaaataaaccattggacagatttcagtaatgtcttcagtggaacacaaatgaaaatgaatagcttgtttctgtc

SEQ ID NO: 1168 - DNA, 958 bp, Homo sapiens
  source 1..958: mol_type = genomic DNA
gtcgccgccgcggagcggagtcgagccgagctgatttgatcgaggagcgcggttaccggacgggctgggtctatggtcgctccgcgggccgctccgccggctggtgcttttttatcagggcaagctgtgttccatggcagggaacttttggcagagctcccactattatccaagcattaggtgaacatcttaaattaagacaacaagttattgccactgctacggtatatttcaagagattctatgccaggtattctctgaaaagtatagatcctgtattaatggctcctacatgtgtgtttttggcatccaaagtagaggaatttggagtagtttcaaatacaagattgattgctgctgctacttctgtattaaaaactagattttcatatgcctttccaaaggaatttccttataggatgaatcatatattagaatgtgaattctatctgttagaactaatggattgttgcttgatagtgtatcatccttatagacctttgctccagtatgtgcaggacatgggccaagaagacatgttgcttccccttgcatggaggatagtgaatgatacctacagaacggatctttgcctactgtatcctcctttcatgatagctttagcttgcctacatgtagcctgtgttgtacagcagaaagatgccaggcaatggtttgctgagctttctgtggatatggaaaagattttggaaataatcagggttattttaaaactatatgagcagtggaagaatttcgatgagagaaaagagatggcaaccattcttagtaagatgccaaaaccaaaaccacctccaaacagtgaaggagagcagggtccaaatggaagtcagaactctagctacagccaatcttaaaacattccgaagaattccatagtggaccacttggaaataaaccattggacagatttcagtaatgtcttcagtggaacaca

SEQ ID NO: 1169 - DNA, 759 bp, Homo sapiens
  source 1..759: mol_type = genomic DNA
cggattcttggtttagctaggccgcggggggtcggatagagtgggcacagtttgcaatggattttggataaacaagatctgttgaaggagcgccaaaaggatttaaagtttctctcagaggaagaatattggaagttacaaatattttttacaaatgttatccaagcattaggtgaacatcttaaattaagacaacaagttattgccactgctacggtatatttcaagagattctatgccaggtattctctgaaaagtatagatcctgtattaatggctcctacatgtgtgtttttggcatccaaagtagaggaatttggagtagtttcaaatacaagattgattgctgctgctacttctgtattaaaaactagattttcatatgcctttccaaaggaatttccttataggatgaatcatatattagaatgtgaattctatctgttagaactaatggattgttgcttgatagtgtatcatccttatagacctttgctccagtatgtgcaggacatgggccaagaagacatgttgcttccccttgcatggaggatagtgaatgatacctacagaacggatctttgcctactgtatcctcctttcatgatagctttagcttgcctacatgtagcctgtgttgtacagcagaaagatgccaggcaatggtttgctgagctttctgtggatatggaaaagattttggaaataatcagggttattttaaaactatatgagcagtggaagaatttcgatgagaga

SEQ ID NO: 1170 - DNA, 3794 bp, Homo sapiens
  source 1..3794: mol_type = genomic DNA
agcgggacagacgagcgggaggggcagcgtgcggggagctgggggcggggcgcggccgcagctccgtttccggtggctcgtcgcgctcgctcactccagctgcagccactctcgcccgtggctgcttcctccatcctggtattttttggagcttccatcctggttcttccaaagtgcccggacccaaaacaggaaagtgttgcggagataggaacatgggagagaaacaatctgggtaacatgaaagtgatgctggttgctaagggaaggcaacttgattctgtgggaagggctgtagctgatccatccgttgtctagatttgagtatgagcacagtggaagaggattctgacacagtaacagtagaaactgtgaactctgtgactttgactcaggacacagaagggaatctcattcttcactgccctcagaatgaagcggatgaaatagactcagaagatagtattgaacctccacataaaaggctttgtttgtcctctgaggatgatcagagtattgatgattctactccttgcatatcagttgttgcacttccactttcagaaaatgatcagagctttgaagtgaccatgactgcaaccacagaagtagcagatgatgaggttactgaggggactgtgacacagatacagattttgcagaatgagcaactagatgaaatatctcccttgggtaacgaggaagtttcagcagttagccaagcatggtttacaactaaagaagataaggattctctgactaataaaggacataaatggaagcaggggatgtggtccaaggaagaaattgatattttgatgaacaatattgaacgctatcttaaggcacgcggaataaaagatgctacagaaatcatctttgagatgtcaaaagacgaaagaaaagatttctacaggactatagcatggggtctgaaccggcctttgtttgcagtttatagaagagtgcttcgcatgtatgatgacagaaaccatgtgggaaaatatacacctgaagaaattgagaagctcaaggagctccggataaagcatggcaatgactgggcaacaataggggcggcgctaggaagaagtgcatcttctgtcaaagatcggtgccgactgatgaaggatacttgcaacacagggaagtggacagaagaagaagaaaagagacttgcagaagtggttcatgagttgacaagcactgagccaggtgacatagtcacacagggtgtgtcttgggcagctgtggctgaacgagtcggtacccgctcagaaaagcaatgtcgttctaaatggctcaactacctgaattggaaacagagtgggggtactgaatggaccaaggaagatgaaatcaatctcatcctcaggatagcagaacttgatgtagctgatgaaaatgacattaactgggatctgttagctgagggatggagtagtgtccgttcaccacaatggctacgaagtaaatggtggaccatcaaaaggcaaattgcaaaccataaggatgtttcgttccctgtcttaataaaaggtcttaaacagttacatgagaaccaaaaaaacaacccaacgcttttggagaataaatcaggatctggagttccaaacagtaataccaattccagtgtgcagcatgttcagataagagttgcccgcttggaagataatacagccatctcttctagccccatggcagcattgcagattccagtccagatcacccatgtttcttcagcagactctcctgctaccgttgactcagaaacaataacactaaacagtggaacactacagacatttgagattcttccctctttccatctacagcccactggcactccaggcacctacctacttcaaacaagctcaagccaaggccttcccctaactctgactgctagtcccacagtaaccctgacagctgctgctcctgcttctcctgaacagattattgttcatgctttatccccagaacatttgttgaacacaagtgataatgttacagtgcagtgtcacacaccaagagtcatcattcagactgttgccacagaggacatcacttcttccatatcccaagcagaactgacagtcgatagtgatattcagtcatctgattttcctgagcctccagacgccctagaagcagacactttcccagatgaaattcatcaccctaagatgactgtggagccatcatttaatgatgctcatgtatccaaattcagtgaccaaaatagcacagaactgatgaatagtgttatggtcagaacagaagaagaaatctctgacaccgaccttaaacaagaggaatcaccctctgatttagccagtgcttatgttactgagggtttagagtctcccactatagaagaacaagttgatcaaacaattgatgatgaaacaatacttatcgttccttcaccacatggctttatccaggcatctgatgttatagatactgaatctgtcttgcctttgacaacactaacagatcccatactccaacatcatcaggaagaatcaaatatcattggatcatccttgggcagtcctgtttcagaagattcaaaggatgtcgaagatttggtaaactgtcattagaataattcttagaaataggcagttcaagcaaagaaggcacactgttaattacaacctcttcaaagaaataggagcaacccccaagaggcttaatttaccaatttaaatagccacagtccttaagccacacacattgttgctgctatgactttttacctcctttaaacacatcatctgaggttgagttttatgacagtatgtagttgagtggaggctgggagttttaagcataaatccctgtttagtgttacatgggaataaggaatttcattcacttcagccactaagaaaagtttagaatcacgaaagcttaactgctgtggtttaaagtacagtttctctaaagatcagacatggcactgtctcctctcaagcctggttgtagttcagatgagtcttttcaacatggtcttcaacatggtctagagcttaccagtgatcttctgatcttcaagaagactaagtttgagacttgaccagcatacaagtatagagacctaggaggtggtcttgtggtggtacatttggttaacccattgctggcagtgggagctgatttaggcagggtaaacaggaaagcattaaaagttaaaattcactacaggttttttgttacttttaaagggaatatggataagcatagtaacaaaacccaccagaatctaagcagttttcaccccctcagaaaccactgtcattagtttacaaagttagcactttgaagtaaaactaaatgaggaaggaagtaatgttacctatccttgataccatgaccatttattagatgttttgctatataaattaccgagagaatagtttgtcatccacttagtgtgttagctggtggggtacaatataacctctcatctcaggctattttaaaaaaacaatatttgcttctataacaaaaggaaacaaatctaagaatcattcctgtactacagaagggttaaggcaaaggtagccttttgggctttttaatgaatatgacccctatagaaaagtcaagaaaaaaaaacccttgtataaattattttatttattattgtaattagatcttcacaaagttgtcttttcactgtgttttgtcaacgtgaaattaaattgtagttataagcaaaagttggttgcctagggaacaattgtatattcagtttaacagaaataaaagaatatttgtcttaa

SEQ ID NO: 1171 - DNA, 1184 bp, Homo sapiens
  source 1..1184: mol_type = genomic DNA
agcgggacagacgagcgggaggggcagcgtgcggggagctgggggcggggcgcggccgcagctccgtttccggtggctcgtcgcgctcgctcactccagctgcagccactctcgcccgtggctgcttcctccatcctggtattttttggagcttccatcctggttcttccaaagtgcccggacccaaaacaggaaagtgttgcggagataggaacatgggagagaaacaatctgggtaacatgaaagtgatgctggttgctaagggaaggcaacttgattctgtgggaagggctgtagctgatccatccgttgtctagatttgagtatgagcacagtggaagaggattctgacacagtaacagtagaaactgtgaactctgtgactttgactcaggacacagaagggaatctcattcttcactgccctcagaatgaagcggatgaaatagactcagaagatagtattgaacctccacataaaaggctttgtttgtcctctgaggatgatcagagtattgatgattctactccttgcatatcagttgttgcacttccactttcagaaaatgatcagagctttgaagtgaccatgactgcaaccacagaagtagcagatgatgaggttactgaggggactgtgacacagatacagattttgcagaatgagcaactagatgaaatatctcccttgggtaacgaggaagtttcagcagttagccaagcatggtttacaactaaagaagataaggattctctgactaataaaggacataaatggaagcaggggatgtggtccaaggaagaaattgatattttgatgaacaatattgaacgctatcttaaggcacgcggaataaaagatgctacagaaatcatctttgagatgtcaaaagacgaaagaaaagatttctacaggactatagcatggggtctgaaccggcctttgtttgcagtttatagaagagtgcttcgcatgtatgatgacagaaaccatgtgggaaaatatacacctgaagaaattgagaagctcaaggagaaaaaggcaattgctgcctgtttttttttcacccacagacaactgtggaccccaaaaaaaggccacactttcaaactttggctctcaaagtattgctgcccacaacttccaaaccagtcaaatgggaagaagaagaatgaagaataa

SEQ ID NO: 1172 - DNA, 4036 bp, Homo sapiens
  source 1..4036: mol_type = genomic DNA
aagtaagtgcgatggaaccttcaggttccaaccgccgccagggccgctccgcccagtggagcctgtccggcccccttgctgcccgctagctcccgccggctggcgcaagctgtcggcgccggggcactgcgggcggggtcggagcctggccttcctgacgttgcagctgccgtccccgcacgttccggccagggcctccctcttagggccgggcggtgcccgtggctcaggctgcagagtagaaagcacaaaaaccagcctgattgtatctggaaaaaaccattatgttacagttgataggctcaccccaaaatatgcttttggggactgatttagcacctgcatattctgcgtgaatctctttaattggttgcagttgagctaatggtggagccaaaatgctattgccctgtcttcatcaacatttaatcaagtgttgcggagataggaacatgggagagaaacaatctgggtaacatgaaagtgatgctggttgctaagggaaggcaacttgattctgtgggaagggctgtagctgatccatccgttgtctagatttgagtatgagcacagtggaagaggattctgacacagtaacagtagaaactgtgaactctgtgactttgactcaggacacagaagggaatctcattcttcactgccctcagaatgaagcggatgaaatagactcagaagatagtattgaacctccacataaaaggctttgtttgtcctctgaggatgatcagagtattgatgattctactccttgcatatcagttgttgcacttccactttcagaaaatgatcagagctttgaagtgaccatgactgcaaccacagaagtagcagatgatgaggttactgaggggactgtgacacagatacagattttgcagaatgagcaactagatgaaatatctcccttgggtaacgaggaagtttcagcagttagccaagcatggtttacaactaaagaagataaggattctctgactaataaaggacataaatggaagcaggggatgtggtccaaggaagaaattgatattttgatgaacaatattgaacgctatcttaaggcacgcggaataaaagatgctacagaaatcatctttgagatgtcaaaagacgaaagaaaagatttctacaggactatagcatggggtctgaaccggcctttgtttgcagtttatagaagagtgcttcgcatgtatgatgacagaaaccatgtgggaaaatatacacctgaagaaattgagaagctcaaggagctccggataaagcatggcaatgactgggcaacaataggggcggcgctaggaagaagtgcatcttctgtcaaagatcggtgccgactgatgaaggatacttgcaacacagggaagtggacagaagaagaagaaaagagacttgcagaagtggttcatgagttgacaagcactgagccaggtgacatagtcacacagggtgtgtcttgggcagctgtggctgaacgagtcggtacccgctcagaaaagcaatgtcgttctaaatggctcaactacctgaattggaaacagagtgggggtactgaatggaccaaggaagatgaaatcaatctcatcctcaggatagcagaacttgatgtagctgatgaaaatgacattaactgggatctgttagctgagggatggagtagtgtccgttcaccacaatggctacgaagtaaatggtggaccatcaaaaggcaaattgcaaaccataaggatgtttcgttccctgtcttaataaaaggtcttaaacagttacatgagaaccaaaaaaacaacccaacgcttttggagaataaatcaggatctggagttccaaacagtaataccaattccagtgtgcagcatgttcagataagagttgcccgcttggaagataatacagccatctcttctagccccatggcagcattgcagattccagtccagatcacccatgtttcttcagcagactctcctgctaccgttgactcagaaacaataacactaaacagtggaacactacagacatttgagattcttccctctttccatctacagcccactggcactccaggcacctacctacttcaaacaagctcaagccaaggccttcccctaactctgactgctagtcccacagtaaccctgacagctgctgctcctgcttctcctgaacagattattgttcatgctttatccccagaacatttgttgaacacaagtgataatgttacagtgcagtgtcacacaccaagagtcatcattcagactgttgccacagaggacatcacttcttccatatcccaagcagaactgacagtcgatagtgatattcagtcatctgattttcctgagcctccagacgccctagaagcagacactttcccagatgaaattcatcaccctaagatgactgtggagccatcatttaatgatgctcatgtatccaaattcagtgaccaaaatagcacagaactgatgaatagtgttatggtcagaacagaagaagaaatctctgacaccgaccttaaacaagaggaatcaccctctgatttagccagtgcttatgttactgagggtttagagtctcccactatagaagaacaagttgatcaaacaattgatgatgaaacaatacttatcgttccttcaccacatggctttatccaggcatctgatgttatagatactgaatctgtcttgcctttgacaacactaacagatcccatactccaacatcatcaggaagaatcaaatatcattggatcatccttgggcagtcctgtttcagaagattcaaaggatgtcgaagatttggtaaactgtcattagaataattcttagaaataggcagttcaagcaaagaaggcacactgttaattacaacctcttcaaagaaataggagcaacccccaagaggcttaatttaccaatttaaatagccacagtccttaagccacacacattgttgctgctatgactttttacctcctttaaacacatcatctgaggttgagttttatgacagtatgtagttgagtggaggctgggagttttaagcataaatccctgtttagtgttacatgggaataaggaatttcattcacttcagccactaagaaaagtttagaatcacgaaagcttaactgctgtggtttaaagtacagtttctctaaagatcagacatggcactgtctcctctcaagcctggttgtagttcagatgagtcttttcaacatggtcttcaacatggtctagagcttaccagtgatcttctgatcttcaagaagactaagtttgagacttgaccagcatacaagtatagagacctaggaggtggtcttgtggtggtacatttggttaacccattgctggcagtgggagctgatttaggcagggtaaacaggaaagcattaaaagttaaaattcactacaggttttttgttacttttaaagggaatatggataagcatagtaacaaaacccaccagaatctaagcagttttcaccccctcagaaaccactgtcattagtttacaaagttagcactttgaagtaaaactaaatgaggaaggaagtaatgttacctatccttgataccatgaccatttattagatgttttgctatataaattaccgagagaatagtttgtcatccacttagtgtgttagctggtggggtacaatataacctctcatctcaggctattttaaaaaaacaatatttgcttctataacaaaaggaaacaaatctaagaatcattcctgtactacagaagggttaaggcaaaggtagccttttgggctttttaatgaatatgacccctatagaaaagtcaagaaaaaaaaacccttgtataaattattttatttattattgtaattagatcttcacaaagttgtcttttcactgtgttttgtcaacgtgaaattaaattgtagttataagcaaaagttggttgcctagggaacaattgtatattcagtttaacagaaataaaagaatatttgtcttaagatgc

SEQ ID NO: 1173 - DNA, 1254 bp, Homo sapiens
  source 1..1254: mol_type = genomic DNA
gtttccggtggctcgtcgcgctcgctcactccagctgcagccactctcgcccgtggctgcttcctccatcctggtattttttggagcttccatcctggttcttccaaagtgcccggacccaaaacaggaaagtgttgcggagataggaacatgggagagaaacaatctgggtaacatgaaagtgatgctggttgctaagggaaggcaacttgattctgtgggaagggctgtagctgatccatccgttgtctagatttgagtatgagcacagtggaagaggattctgacacagtaacagtagaaactgtgaactctgtgactttgactcaggacacagaagggaatctcattcttcactgccctcagaatgtttcagaaaatgatcagagctttgaagtgaccatgactgcaaccacagaagtagcagatgatgaggttactgaggggactgtgacacagatacagattttgcagaatgagcaactagatgaaatatctcccttgggtaacgaggaagtttcagcagttagccaagcatggtttacaactaaagaagataaggattctctgactaataaaggacataaatggaagcaggggatgtggtccaaggaagaaattgatattttgatgaacaatattgaacgctatcttaaggcacgcggaataaaagatgctacagaaatcatctttgagatgtcaaaagacgaaagaaaagatttctacaggactatagcatggggtctgaaccggcctttgtttgcagtttatagaagagtgcttcgcatgtatgatgacagaaaccatgtgggaaaatatacacctgaagaaattgagaagctcaaggagaaaaaggcaattgctgcctgtttttttttcacccacagacaactgtggaccccaaaaaaaggccacactttcaaactttggctctcaaagtattgctgcccacaacttccaaaccagtcaaatgggaagaagaagaatgaagaataaatgatgaaattaaaagggagaaaacaattgaaccaaatgctgattggcagactcttgttttaggctccggataaagcatggcaatgactgggcaacaataggggcggcgctaggaagaagtgcatcttctgtcaaagatcggtgccgactgatgaaggatacttgcaacacagggaagtggacagaagaagaagaaaagagacttgcagaagtggttcatgagttgacaagcactgagccaggtgacatagtcacaca

SEQ ID NO: 1174 - DNA, 4461 bp, Homo sapiens
  source 1..4461: mol_type = genomic DNA
cctttaaaaaccatttcatatttcataaagtttcacattgctttcaagagcttgtaatttgtcttttctggcctaattgtttaaggttttgtttttgttttttccacagattcctagatagggttgttcatctgtcatcttaaaagggttttctggatgaatagggtactatataatttttaatgctttaagataaaacataaagaggtgttaataattataaaggaaaactatagttactaataatatttatggtgctgtattgattgatatacacatcatgttacataatggtaccacagtctacagttcatagaatcactagcatagctgagcctgttttttttttttttttcagagaacgtttgtctgcctgatgagagccacttgggttaagaaactacctgtgaatagtcatcatttctgtccttcattggggaatacttttagaggccagtttccaaaaattctgcttaaaaaagaattctggttttgtcttactcttccagatgagatatcacagaggcttgggcctagattgtcatcagcatactgctatactattcgtttgttcttattaagccttattgtgtgtaatgctgttactttttcagagtgttgcggagataggaacatgggagagaaacaatctgggtaacatgaaagtgatgctggttgctaagggaaggcaacttgattctgtgggaagggctgtagctgatccatccgttgtctagccatgagatgctatattctgagactagttattccatctgtctgaacaagaggaaaataatatttgtgtaaaatagcagatttgagtatgagcacagtggaagaggattctgacacagtaacagtagaaactgtgaactctgtgactttgactcaggacacagaagggaatctcattcttcactgccctcagaatgaagcggatgaaatagactcagaagatagtattgaacctccacataaaaggctttgtttgtcctctgaggatgatcagagtattgatgattctactccttgcatatcagttgttgcacttccactttcagaaaatgatcagagctttgaagtgaccatgactgcaaccacagaagtagcagatgatgaggttactgaggggactgtgacacagatacagattttgcagaatgagcaactagatgaaatatctcccttgggtaacgaggaagtttcagcagttagccaagcatggtttacaactaaagaagataaggattctctgactaataaaggacataaatggaagcaggggatgtggtccaaggaagaaattgatattttgatgaacaatattgaacgctatcttaaggcacgcggaataaaagatgctacagaaatcatctttgagatgtcaaaagacgaaagaaaagatttctacaggactatagcatggggtctgaaccggcctttgtttgcagtttatagaagagtgcttcgcatgtatgatgacagaaaccatgtgggaaaatatacacctgaagaaattgagaagctcaaggaacaactgtggaccccaaaaaaaggccacactttcaaactttggctctcaaagtattgctgcccacaacttccaaaccagtcaaatgggaagaagaagaatgaagaataaatgatgaaattaaaagggagaaaacaattgaaccaaatgctgattggcagactcttgttttaggctccggataaagcatggcaatgactgggcaacaataggggcggcgctaggaagaagtgcatcttctgtcaaagatcggtgccgactgatgaaggatacttgcaacacagggaagtggacagaagaagaagaaaagagacttgcagaagtggttcatgagttgacaagcactgagccaggtgacatagtcacacagggtgtgtcttgggcagctgtggctgaacgagtcggtacccgctcagaaaagcaatgtcgttctaaatggctcaactacctgaattggaaacagagtgggggtactgaatggaccaaggaagatgaaatcaatctcatcctcaggatagcagaacttgatgtagctgatgaaaatgacattaactgggatctgttagctgagggatggagtagtgtccgttcaccacaatggctacgaagtaaatggtggaccatcaaaaggcaaattgcaaaccataaggatgtttcgttccctgtcttaataaaaggtcttaaacagttacatgagaaccaaaaaaacaacccaacgcttttggagaataaatcaggatctggagttccaaacagtaataccaattccagtgtgcagcatgttcagataagagttgcccgcttggaagataatacagccatctcttctagccccatggcagcattgcagattccagtccagatcacccatgtttcttcagcagactctcctgctaccgttgactcagaaacaataacactaaacagtggaacactacagacatttgagattcttccctctttccatctacagcccactggcactccaggcacctacctacttcaaacaagctcaagccaaggccttcccctaactctgactgctagtcccacagtaaccctgacagctgctgctcctgcttctcctgaacagattattgttcatgctttatccccagaacatttgttgaacacaagtgataatgttacagtgcagtgtcacacaccaagagtcatcattcagactgttgccacagaggacatcacttcttccatatcccaagcagaactgacagtcgatagtgatattcagtcatctgattttcctgagcctccagacgccctagaagcagacactttcccagatgaaattcatcaccctaagatgactgtggagccatcatttaatgatgctcatgtatccaaattcagtgaccaaaatagcacagaactgatgaatagtgttatggtcagaacagaagaagaaatctctgacaccgaccttaaacaagaggaatcaccctctgatttagccagtgcttatgttactgagggtttagagtctcccactatagaagaacaagttgatcaaacaattgatgatgaaacaatacttatcgttccttcaccacatggctttatccaggcatctgatgttatagatactgaatctgtcttgcctttgacaacactaacagatcccatactccaacatcatcaggaagaatcaaatatcattggatcatccttgggcagtcctgtttcagaagattcaaaggatgtcgaagatttggtaaactgtcattagaataattcttagaaataggcagttcaagcaaagaaggcacactgttaattacaacctcttcaaagaaataggagcaacccccaagaggcttaatttaccaatttaaatagccacagtccttaagccacacacattgttgctgctatgactttttacctcctttaaacacatcatctgaggttgagttttatgacagtatgtagttgagtggaggctgggagttttaagcataaatccctgtttagtgttacatgggaataaggaatttcattcacttcagccactaagaaaagtttagaatcacgaaagcttaactgctgtggtttaaagtacagtttctctaaagatcagacatggcactgtctcctctcaagcctggttgtagttcagatgagtcttttcaacatggtcttcaacatggtctagagcttaccagtgatcttctgatcttcaagaagactaagtttgagacttgaccagcatacaagtatagagacctaggaggtggtcttgtggtggtacatttggttaacccattgctggcagtgggagctgatttaggcagggtaaacaggaaagcattaaaagttaaaattcactacaggttttttgttacttttaaagggaatatggataagcatagtaacaaaacccaccagaatctaagcagttttcaccccctcagaaaccactgtcattagtttacaaagttagcactttgaagtaaaactaaatgaggaaggaagtaatgttacctatccttgataccatgaccatttattagatgttttgctatataaattaccgagagaatagtttgtcatccacttagtgtgttagctggtggggtacaatataacctctcatctcaggctattttaaaaaaacaatatttgcttctataacaaaaggaaacaaatctaagaatcattcctgtactacagaagggttaaggcaaaggtagccttttgggctttttaatgaatatgacccctatagaaaagtcaagaaaaaaaaacccttgtataaattattttatttattattgtaattagatcttcacaaagttgtcttttcactgtgttttgtcaacgtgaaattaaattgtagttataagcaaaagttggttgcctagggaacaattgtatattcagtttaacagaaataaaagaatatttgtctt

SEQ ID NO: 1175 - DNA, 3369 bp, Homo sapiens
  source 1..3369: mol_type = genomic DNA
ggcgcggccgcagctccgtttccggtggctcgtcgcgctcgctcactccagctgcagccactctcgcccgtggctgcttcctccatcctggtattttttggagcttccatcctggttcttccaaagtgcccggacccaaaacaggaaagtgttgcggagataggaacatgggagagaaacaatctgggtaacatgaaagtgatgctggttgctaagggaaggcaacttgattctgtgggaagggctgtagctgatccatccgttgtctagatttgagtatgagcacagtggaagaggattctgacacagtaacagtagaaactgtgaactctgtgactttgactcaggacacagaagggaatctcattcttcactgccctcagaatgaagcggatgaaatagactcagaagatagtattgaacctccacataaaaggctttgtttgtcctctgaggatgatcagagtattgatgattctactccttgcatatcagttgttgcacttccactttcagaaaatgatcagagctttgaagtgaccatgactgcaaccacagaagtagcagatgatgaggttactgaggggactgtgacacagatacagattttgcagaatgagcaactagatgaaatatctcccttgggtaacgaggaagtttcagcagttagccaagcatggtttacaactaaagaagataaggattctctgactaataaaggacataaatggaagcaggggatgtggtccaaggaagaaattgatattttgatgaacaatattgaacgctatcttaaggcacgcggaataaaagatgctacagaaatcatctttgagatgtcaaaagacgaaagaaaagatttctacaggactatagcatggggtctgaaccggcctttgtttgcagtttatagaagagtgcttcgcatgtatgatgacagaaaccatgtgggaaaatatacacctgaagaaattgagaagctcaaggagctccggataaagcatggcaatgactgggcaacaataggggcggcgctaggaagaagtgcatcttctgtcaaagatcggtgccgactgatgaaggatacttgcaacacagggaagtggacagaagaagaagaaaagagacttgcagaagtggttcatgagttgacaagcactgagccaggtgacatagtcacacagggtgtgtcttgggcagctgtggctgaacgagtcggtacccgctcagaaaagcaatgtcgttctaaatggctcaactacctgaattggaaacagagtgggggtactgaatggaccaaggaagatgaaatcaatctcatcctcaggatagcagaacttgatgtagctgatgaaaatgacattaactgggatctgttagctgagggatggagtagtgtccgttcaccacaatggctacgaagtaaatggtggaccatcaaaaggcaaattgcaaaccataaggatgtttcgttccctgcttcagcagactctcctgctaccgttgactcagaaacaataacactaaacagtggaacactacagacatttgagattcttccctctttccatctacagcccactggcactccaggcacctacctacttcaaacaagctcaagccaaggccttcccctaactctgactgctagtcccacagtaaccctgacagctgctgctcctgcttctcctgaacagattattgttcatgctttatccccagaacatttgttgaacacaagtgataatgttacagtgcagtgtcacacaccaagagtcatcattcagactgttgccacagaggacatcacttcttccatatcccaagcagaactgacagtcgatagtgatattcagtcatctgattttcctgagcctccagacgccctagaagcagacactttcccagatgaaattcatcaccctaagatgactgtggagccatcatttaatgatgctcatgtatccaaattcagtgaccaaaatagcacagaactgatgaatagtgttatggtcagaacagaagaagaaatctctgacaccgaccttaaacaagaggaatcaccctctgatttagccagtgcttatgttactgagggtttagagtctcccactatagaagaacaagttgatcaaacaattgatgatgaaacaatacttatcgttccttcaccacatggctttatccaggcatctgatgttatagatactgaatctgtcttgcctttgacaacactaacagatcccatactccaacatcatcaggaagaatcaaatatcattggatcatccttgggcagtcctgtttcagaagattcaaaggatgtcgaagatttggtaaactgtcattagaataattcttagaaataggcagttcaagcaaagaaggcacactgttaattacaacctcttcaaagaaataggagcaacccccaagaggcttaatttaccaatttaaatagccacagtccttaagccacacacattgttgctgctatgactttttacctcctttaaacacatcatctgaggttgagttttatgacagtatgtagttgagtggaggctgggagttttaagcataaatccctgtttagtgttacatgggaataaggaatttcattcacttcagccactaagaaaagtttagaatcacgaaagcttaactgctgtggtttaaagtacagtttctctaaagatcagacatggcactgtctcctctcaagcctggttgtagttcagatgagtcttttcaacatggtcttcaacatggtctagagcttaccagtgatcttctgatcttcaagaagactaagtttgagacttgaccagcatacaagtatagagacctaggaggtggtcttgtggtggtacatttggttaacccattgctggcagtgggagctgatttaggcagggtaaacaggaaagcattaaaagttaaaattcactacaggttttttgttacttttaaagggaatatggataagcatagtaacaaaacccaccagaatctaagcagttttcaccccctcagaaaccactgtcattagtttacaaagttagcactttgaagtaaaactaaatgaggaaggaagtaatgttacctatccttgataccatgaccatttattagatgttttgctatataaattaccgagagaatagtttgtcatccacttagtgtgttagctggtggggtacaatataacctctcatctcaggctattttaaaaaaacaatatttgcttctataacaaaaggaaacaaatctaagaatcattcctgtactacagaagggttaaggcaaaggtagccttttgggctttttaatgaatatgacccctatagaaaagtcaagaaaaaaaaa

SEQ ID NO: 1176 - DNA, 4460 bp, Homo sapiens
  source 1..4460: mol_type = genomic DNA
ctttaaaaaccatttcatatttcataaagtttcacattgctttcaagagcttgtaatttgtcttttctggcctaattgtttaaggttttgtttttgttttttccacagattcctagatagggttgttcatctgtcatcttaaaagggttttctggatgaatagggtactatataatttttaatgctttaagataaaacataaagaggtgttaataattataaaggaaaactatagttactaataatatttatggtgctgtattgattgatatacacatcatgttacataatggtaccacagtctacagttcatagaatcactagcatagctgagcctgttttttttttttttttcagagaacgtttgtctgcctgatgagagccacttgggttaagaaactacctgtgaatagtcatcatttctgtccttcattggggaatacttttagaggccagtttccaaaaattctgcttaaaaaagaattctggttttgtcttactcttccagatgagatatcacagaggcttgggcctagattgtcatcagcatactgctatactattcgtttgttcttattaagccttattgtgtgtaatgctgttactttttcagagtgttgcggagataggaacatgggagagaaacaatctgggtaacatgaaagtgatgctggttgctaagggaaggcaacttgattctgtgggaagggctgtagctgatccatccgttgtctagccatgagatgctatattctgagactagttattccatctgtctgaacaagaggaaaataatatttgtgtaaaatagcagatttgagtatgagcacagtggaagaggattctgacacagtaacagtagaaactgtgaactctgtgactttgactcaggacacagaagggaatctcattcttcactgccctcagaatgaagcggatgaaatagactcagaagatagtattgaacctccacataaaaggctttgtttgtcctctgaggatgatcagagtattgatgattctactccttgcatatcagttgttgcacttccactttcagaaaatgatcagagctttgaagtgaccatgactgcaaccacagaagtagcagatgatgaggttactgaggggactgtgacacagatacagattttgcagaatgagcaactagatgaaatatctcccttgggtaacgaggaagtttcagcagttagccaagcatggtttacaactaaagaagataaggattctctgactaataaaggacataaatggaagcaggggatgtggtccaaggaagaaattgatattttgatgaacaatattgaacgctatcttaaggcacgcggaataaaagatgctacagaaatcatctttgagatgtcaaaagacgaaagaaaagatttctacaggactatagcatggggtctgaaccggcctttgtttgcagtttatagaagagtgcttcgcatgtatgatgacagaaaccatgtgggaaaatatacacctgaagaaattgagaagctcaaggaacaactgtggaccccaaaaaaaggccacactttcaaactttggctctcaaagtattgctgcccacaacttccaaaccagtcaaatgggaagaagaagaatgaagaataaatgatgaaattaaaagggagaaaacaattgaaccaaatgctgattggcagactcttgttttaggctccggataaagcatggcaatgactgggcaacaataggggcggcgctaggaagaagtgcatcttctgtcaaagatcggtgccgactgatgaaggatacttgcaacacagggaagtggacagaagaagaagaaaagagacttgcagaagtggttcatgagttgacaagcactgagccaggtgacatagtcacacagggtgtgtcttgggcagctgtggctgaacgagtcggtacccgctcagaaaagcaatgtcgttctaaatggctcaactacctgaattggaaacagagtgggggtactgaatggaccaaggaagatgaaatcaatctcatcctcaggatagcagaacttgatgtagctgatgaaaatgacattaactgggatctgttagctgagggatggagtagtgtccgttcaccacaatggctacgaagtaaatggtggaccatcaaaaggcaaattgcaaaccataaggatgtttcgttccctgtcttaataaaaggtcttaaacagttacatgagaaccaaaaaaacaacccaacgcttttggagaataaatcaggatctggagttccaaacagtaataccaattccagtgtgcagcatgttcagataagagttgcccgcttggaagataatacagccatctcttctagccccatggcagcattgcagattccagtccagatcacccatgtttcttcagcagactctcctgctaccgttgactcagaaacaataacactaaacagtggaacactacagacatttgagattcttccctctttccatctacagcccactggcactccaggcacctacctacttcaaacaagctcaagccaaggccttcccctaactctgactgctagtcccacagtaaccctgacagctgctgctcctgcttctcctgaacagattattgttcatgctttatccccagaacatttgttgaacacaagtgataatgttacagtgcagtgtcacacaccaagagtcatcattcagactgttgccacagaggacatcacttcttccatatcccaagcagaactgacagtcgatagtgatattcagtcatctgattttcctgagcctccagacgccctagaagcagacactttcccagatgaaattcatcaccctaagatgactgtggagccatcatttaatgatgctcatgtatccaaattcagtgaccaaaatagcacagaactgatgaatagtgttatggtcagaacagaagaagaaatctctgacaccgaccttaaacaagaggaatcaccctctgatttagccagtgcttatgttactgagggtttagagtctcccactatagaagaacaagttgatcaaacaattgatgatgaaacaatacttatcgttccttcaccacatggctttatccaggcatctgatgttatagatactgaatctgtcttgcctttgacaacactaacagatcccatactccaacatcatcaggaagaatcaaatatcattggatcatccttgggcagtcctgtttcagaagattcaaaggatgtcgaagatttggtaaactgtcattagaataattcttagaaataggcagttcaagcaaagaaggcacactgttaattacaacctcttcaaagaaataggagcaacccccaagaggcttaatttaccaatttaaatagccacagtccttaagccacacacattgttgctgctatgactttttacctcctttaaacacatcatctgaggttgagttttatgacagtatgtagttgagtggaggctgggagttttaagcataaatccctgtttagtgttacatgggaataaggaatttcattcacttcagccactaagaaaagtttagaatcacgaaagcttaactgctgtggtttaaagtacagtttctctaaagatcagacatggcactgtctcctctcaagcctggttgtagttcagatgagtcttttcaacatggtcttcaacatggtctagagcttaccagtgatcttctgatcttcaagaagactaagtttgagacttgaccagcatacaagtatagagacctaggaggtggtcttgtggtggtacatttggttaacccattgctggcagtgggagctgatttaggcagggtaaacaggaaagcattaaaagttaaaattcactacaggttttttgttacttttaaagggaatatggataagcatagtaacaaaacccaccagaatctaagcagttttcaccccctcagaaaccactgtcattagtttacaaagttagcactttgaagtaaaactaaatgaggaaggaagtaatgttacctatccttgataccatgaccatttattagatgttttgctatataaattaccgagagaatagtttgtcatccacttagtgtgttagctggtggggtacaatataacctctcatctcaggctattttaaaaaaacaatatttgcttctataacaaaaggaaacaaatctaagaatcattcctgtactacagaagggttaaggcaaaggtagccttttgggctttttaatgaatatgacccctatagaaaagtcaagaaaaaaaaacccttgtataaattattttatttattattgtaattagatcttcacaaagttgtcttttcactgtgttttgtcaacgtgaaattaaattgtagttataagcaaaagttggttgcctagggaacaattgtatattcagtttaacagaaataaaagaatatttgtctt

SEQ ID NO: 1177 - DNA, 584 bp, Homo sapiens
  source 1..584: mol_type = genomic DNA
cgctcgctcactccagctgcagccactctcgcccgtggctgcttcctccatcctggtattttttggagcttccatcctggttcttccaaagtgcccggacccaaaacaggaattgataggctcaccccaaaatatgcttttggggactgatttagcacctgcatattctgcgtgaatctctttaattggttgcagttgagctaatggtggagccaaaatgctattgccctgtcttcatcaacatttaatcaagaacgtttgtctgcctgatgagagccacttgggttaagaaactacctgtgaatagtcatcatttctgtccttcattggggaatacttttagagagtgttgcggagataggaacatgggagagaaacaatctgggtaacatgaaagtgatgctggttgctaagggaaggcaacttgattctgtgggaagggctgtagctgatccatccgttgtctagatttgagtatgagcacagtggaagaggattctgacacagtaacagtagaaactgtgaactctgtgactttgactcaggacacagaagggaatctcattcttcactgccctcagaat

SEQ ID NO: 1178 - DNA, 568 bp, Homo sapiens
  source 1..568: mol_type = genomic DNA
gctcgtcgcgctcgctcactccagctgcagccactctcgcccgtggctgcttcctccatcctggtattttttggagcttccatcctggttcttccaaagtgcccggacccaaaacaggaattgataggctcaccccaaaatatgcttttggggactgatttagcacctgcatattctgcgtgaatctctttaattggttgcagttgagctaatggtggagccaaaatgctattgccctgtcttcatcaacatttaatcaagtgttgcggagataggaacatgggagagaaacaatctgggtaacatgaaagtgatgctggttgctaagggaaggcaacttgattctgtgggaagggctgtagctgatccatccgttgtctagaagcggatgaaatagactcagaagatagtattgaacctccacataaaaggctttgtttgtcctctgaggatgatcagagtattgatgattctactccttgcatatcagttgttgcacttccactttcagaaaatgatcagagctttgaagtgaccatgactgcaaccacagaagtagcagatgatg

SEQ ID NO: 1179 - DNA, 524 bp, Homo sapiens
  source 1..524: mol_type = genomic DNA
aaagcacaaaaaccagcctgattgtatctggaaaaaaccattatgttacagttgataggctcaccccaaaatatgcttttggggactgatttagcacctgcatattctgcgtgaatctctttaattggttgcagttgagctaatggtggagccaaaatgctattgccctgtcttcatcaacatttaatcaagaacgtttgtctgcctgatgagagccacttgggttaagaaactacctgtgaatagtcatcatttctgtccttcattggggaatacttttagagagtgttgcggagataggaacatgggagagaaacaatctgggtaacatgaaagtgatgctggttgctaagggaaggcaacttgattctgtgggaagggctgtagctgatccatccgttgtctagatttgagtatgagcacagtggaagaggattctgacacagtaacagtagaaactgtgaactctgtgactttgactcaggacacagaagggaatctcattcttcactgccctcagaatg

SEQ ID NO: 1180 - DNA, 3868 bp, Homo sapiens
  source 1..3868: mol_type = genomic DNA
gtttccggtggctcgtcgcgctcgctcactccagctgcagccactctcgcccgtggctgcttcctccatcctggtattttttggagcttccatcctggttcttccaaagtgcccggacccaaaacaggaaagtgttgcggagataggaacatgggagagaaacaatctgggtaacatgaaagtgatgctggttgctaagggaaggcaacttgattctgtgggaagggctgtagctgatccatccgttgtctagatttgagtatgagcacagtggaagaggattctgacacagtaacagtagaaactgtgaactctgtgactttgactcaggacacagaagggaatctcattcttcactgccctcagaatgtttcagaaaatgatcagagctttgaagtgaccatgactgcaaccacagaagtagcagatgatgaggttactgaggggactgtgacacagatacagattttgcagaatgagcaactagatgaaatatctcccttgggtaacgaggaagtttcagcagttagccaagcatggtttacaactaaagaagataaggattctctgactaataaaggacataaatggaagcaggggatgtggtccaaggaagaaattgatattttgatgaacaatattgaacgctatcttaaggcacgcggaataaaagatgctacagaaatcatctttgagatgtcaaaagacgaaagaaaagatttctacaggactatagcatggggtctgaaccggcctttgtttgcagtttatagaagagtgcttcgcatgtatgatgacagaaaccatgtgggaaaatatacacctgaagaaattgagaagctcaaggagaaaaaggcaattgctgcctgtttttttttcacccacagacaactgtggaccccaaaaaaaggccacactttcaaactttggctctcaaagtattgctgcccacaacttccaaaccagtcaaatgggaagaagaagaatgaagaataaatgatgaaattaaaagggagaaaacaattgaaccaaatgctgattggcagactcttgttttaggctccggataaagcatggcaatgactgggcaacaataggggcggcgctaggaagaagtgcatcttctgtcaaagatcggtgccgactgatgaaggatacttgcaacacagggaagtggacagaagaagaagaaaagagacttgcagaagtggttcatgagttgacaagcactgagccaggtgacatagtcacacagggtgtgtcttgggcagctgtggctgaacgagtcggtacccgctcagaaaagcaatgtcgttctaaatggctcaactacctgaattggaaacagagtgggggtactgaatggaccaaggaagatgaaatcaatctcatcctcaggatagcagaacttgatgtagctgatgaaaatgacattaactgggatctgttagctgagggatggagtagtgtccgttcaccacaatggctacgaagtaaatggtggaccatcaaaaggcaaattgcaaaccataaggatgtttcgttccctgatggtggtctgtcggagaatcaatgttctttttgtctacccatctcccttcagtcttaataaaaggtcttaaacagttacatgagaaccaaaaaaacaacccaacgcttttggagaataaatcaggatctggagttccaaacagtaataccaattccagtgtgcagcatgttcagataagagttgcccgcttggaagataatacagccatctcttctagccccatggcagcattgcagattccagtccagatcacccatgtttcttcagcagactctcctgctaccgttgactcagaaacaataacactaaacagtggaacactacagacatttgagattcttccctctttccatctacagcccactggcactccaggcacctacctacttcaaacaagctcaagccaaggccttcccctaactctgactgctagtcccacagtaaccctgacagctgctgctcctgcttctcctgaacagattattgttcatgctttatccccagaacatttgttgaacacaagtgataatgttacagtgcagtgtcacacaccaagagtcatcattcagactgttgccacagaggacatcacttcttccatatcccaagcagaactgacagtcgatagtgatattcagtcatctgattttcctgagcctccagacgccctagaagcagacactttcccagatgaaattcatcaccctaagatgactgtggagccatcatttaatgatgctcatgtatccaaattcagtgaccaaaatagcacagaactgatgaatagtgttatggtcagaacagaagaagaaatctctgacaccgaccttaaacaagaggaatcaccctctgatttagccagtgcttatgttactgagggtttagagtctcccactatagaagaacaagttgatcaaacaattgatgatgaaacaatacttatcgttccttcaccacatggctttatccaggcatctgatgttatagatactgaatctgtcttgcctttgacaacactaacagatcccatactccaacatcatcaggaagaatcaaatatcattggatcatccttgggcagtcctgtttcagaagattcaaaggatgtcgaagatttggtaaactgtcattagaataattcttagaaataggcagttcaagcaaagaaggcacactgttaattacaacctcttcaaagaaataggagcaacccccaagaggcttaatttaccaatttaaatagccacagtccttaagccacacacattgttgctgctatgactttttacctcctttaaacacatcatctgaggttgagttttatgacagtatgtagttgagtggaggctgggagttttaagcataaatccctgtttagtgttacatgggaataaggaatttcattcacttcagccactaagaaaagtttagaatcacgaaagcttaactgctgtggtttaaagtacagtttctctaaagatcagacatggcactgtctcctctcaagcctggttgtagttcagatgagtcttttcaacatggtcttcaacatggtctagagcttaccagtgatcttctgatcttcaagaagactaagtttgagacttgaccagcatacaagtatagagacctaggaggtggtcttgtggtggtacatttggttaacccattgctggcagtgggagctgatttaggcagggtaaacaggaaagcattaaaagttaaaattcactacaggttttttgttacttttaaagggaatatggataagcatagtaacaaaacccaccagaatctaagcagttttcaccccctcagaaaccactgtcattagtttacaaagttagcactttgaagtaaaactaaatgaggaaggaagtaatgttacctatccttgataccatgaccatttattagatgttttgctatataaattaccgagagaatagtttgtcatccacttagtgtgttagctggtggggtacaatataacctctcatctcaggctattttaaaaaaacaatatttgcttctataacaaaaggaaacaaatctaagaatcattcctgtactacagaagggttaaggcaaaggtagccttttgggctttttaatgaatatgacccctatagaaaagtcaagaaaaaaaaacccttgtataaattattttatttattattgtaattagatcttcacaaagttgtcttttcactgtgttttgtcaacgtgaaattaaattgtagttataagcaaaagttggttgcctagggaacaattgtatattcagtttaacagaaataaaagaatatttgtctt

SEQ ID NO: 1181 - DNA, 845 bp, Homo sapiens
  source 1..845: mol_type = genomic DNA
aagaattctggttttgtcttactcttccagatgagatatcacagaggcttgggcctagattgtcatcagcatactgctatactattcgtttgttcttattaagccttattgtgtgtaatgctgttactttttcagagtgttgcggagataggaacatgggagagaaacaatctgggtaacatgaaagtgatgctggttgctaagggaaggcaacttgattctgtgggaagggctgtagctgatccatccgttgtctagatttgagtatgagcacagtggaagaggattctgacacagtaacagtagaaactgtgaactctgtgactttgactcaggacacagaagggaatctcattcttcactgccctcagaatgaagcggatgaaatagactcagaagatagtattgaacctccacataaaaggctttgtttgtcctctgaggatgatcagagtattgatgattctactccttgcatatcagttgttgcacttccactttcagaaaatgatcagagctttgaagtgaccatgactgcaaccacagaagtagcagatgatgaggttactgaggggactgtgacacagatacagattttgcagaatgagcaactagatgaaatatctcccttgggtaacgaggaagtttcagcagttagccaagcatggtttacaactaaagaagataaggattctctgactaataaaggacataaatggaagcaggggatgtggtccaaggaagaaattgatattttgatgaacaatattgaacgctatcttaaggcacgcggaataaaagatgctacagaaatcatctttgagatgtcaaaagacgaaagaaaa

SEQ ID NO: 1182 - DNA, 533 bp, Homo sapiens
  source 1..533: mol_type = genomic DNA
actccagctgcagccactctcgcccgtggctgcttcctccatcctggtattttttggagcttccatcctggttcttccaaagtgcccggacccaaaacaggaattgataggctcaccccaaaatatgcttttggggactgatttagcacctgcatattctgcgtgaatctctttaattggttgcagttgagctaatggtggagccaaaatgctattgccctgtcttcatcaacatttaatcaagtgttgcggagataggaacatgggagagaaacaatctgggtaacatgaaagtgatgctggttgctaagggaaggcaacttgattctgtgggaagggctgtagctgatccatccgttgtctagccatgagatgctatattctgagactagttattccatctgtctgaacaagaggaaaataatatttgtgtaaaatagcagatttgagtatgagcacagtggaagaggattctgacacagtaacagtagaaactgtgaactctgtgactttgactcaggacacagaaggga

SEQ ID NO: 1183 - DNA, 553 bp, Homo sapiens
  source 1..553: mol_type = genomic DNA
actccagctgcagccactctcgcccgtggctgcttcctccatcctggtattttttggagcttccatcctggttcttccaaagtgcccggacccaaaacaggaaatttgagtatgagcacagtggaagaggattctgacacagtaacagtagaaactgtgaactctgtgactttgactcaggacacagaagggaatctcattcttcactgccctcagaatgaagcggatgaaatagactcagaagatagtattgaacctccacataaaaggctttgtttgtcctctgaggatgatcagagtattgatgattctactccttgcatatcagttgttgcacttccactttcagaaaatgatcagagctttgaagtgaccatgactgcaaccacagaagtagcagatgatgaggttactgaggggactgtgacacagatacagattttgcagaatgagcaactagatgaaatatctcccttgggtaacgaggaagtttcagcagttagccaagcatggtttacaactaaagaagataaggattctctgactaataaag

SEQ ID NO: 1184 - DNA, 532 bp, Homo sapiens
  source 1..532: mol_type = genomic DNA
ttgataggctcaccccaaaatatgcttttggggactgatttagcacctgcatattctgcgtgaatctctttaattggttgcagttgagctaatggtggagccaaaatgctattgccctgtcttcatcaacatttaatcactcctttatgtctccaaatgatacaagaagacccgagaaagtgagtgttgcggagataggaacatgggagagaaacaatctgggtaacatgaaagtgatgctggttgctaagggaaggcaacttgattctgtgggaagggctgtagctgatccatccgttgtctagatttgagtatgagcacagtggaagaggattctgacacagtaacagtagaaactgtgaactctgtgactttgactcaggacacagaagggaatctcattcttcactgccctcagaatgaagcggatgaaatagactcagaagatagtattgaacctccacataaaaggctttgtttgtcctctgaggatgatcagagtattgatgattctactccttgcatatcagtt

SEQ ID NO: 1185 - DNA, 2411 bp, Homo sapiens
  source 1..2411: mol_type = genomic DNA
actctcgcccgtggctgcttcctccatcctggtattttttggagcttccatcctggttcttccaaagtgcccggacccaaaacaggaaagtgttgcggagataggaacatgggagagaaacaatctgggtaacatgaaagtgatgctggttgctaagggaaggcaacttgattctgtgggaagggctgtagctgatccatccgttgtctagaagcggatgaaatagactcagaagatagtattgaacctccacataaaaggctttgtttgtcctctgaggatgatcagagtattgatgattctactccttgcatatcagttgttgcacttccactttcagaaaatgatcagagctttgaagtgaccatgactgcaaccacagaagtagcagatgatgaggttactgaggggactgtgacacagatacagattttgcagaatgagcaactagatgaaatatctcccttgggtaacgaggaagtttcagcagttagccaagcatggtttacaactaaagaagataaggattctctgactaataaaggacataaatggaagcaggggatgtggtccaaggaagaaattgatattttgatgaacaatattgaacgctatcttaaggcacgcggaataaaagatgctacagaaatcatctttgagatgtcaaaagacgaaagaaaagatttctacaggactatagcatggggtctgaaccggcctttgtttgcagtttatagaagagtgcttcgcatgtatgatgacagaaaccatgtgggaaaatatacacctgaagaaattgagaagctcaaggagctccggataaagcatggcaatgactgggcaacaataggggcggcgctaggaagaagtgcatcttctgtcaaagatcggtgccgactgatgaaggatacttgcaacacagggaagtggacagaagaagaagaaaagagacttgcagaagtggttcatgagttgacaagcactgagccaggtgacatagtcacacagggtgtgtcttgggcagctgtggctgaacgagtcggtacccgctcagaaaagcaatgtcgttctaaatggctcaactacctgaattggaaacagagtgggggtactgaatggaccaaggaagatgaaatcaatctcatcctcaggatagcagaacttgatgtagctgatgaaaatgacattaactgggatctgttagctgagggatggagtagtgtccgttcaccacaatggctacgaagtaaatggtggaccatcaaaaggcaaattgcaaaccataaggatgtttcgttccctgtcttaataaaaggtcttaaacagttacatgagaaccaaaaaaacaacccaacgcttttggagaataaatcaggatctggagttccaaacagtaataccaattccagtgtgcagcatgttcagataagagttgcccgcttggaagataatacagccatctcttctagccccatggcagcattgcagattccagtccagatcacccatgtttcttcagcagactctcctgctaccgttgactcagaaacaataacactaaacagtggaacactacagacatttgagattcttccctctttccatctacagcccactggcactccaggcacctacctacttcaaacaagctcaagccaaggccttcccctaactctgactgctagtcccacagtaaccctgacagctgctgctcctgcttctcctgaacagattattgttcatgctttatccccagaacatttgttgaacacaagtgataatgttacagtgcagtgtcacacaccaagagtcatcattcagactgttgccacagaggacatcacttcttccatatcccaagcagaactgacagtcgatagtgatattcagtcatctgattttcctgagcctccagacgccctagaagcagacactttcccagatgaaattcatcaccctaagatgactgtggagccatcatttaatgatgctcatgtatccaaattcagtgaccaaaatagcacagaactgatgaatagtgttatggtcagaacagaagaagaaatctctgacaccgaccttaaacaagaggaatcaccctctgatttagccagtgcttatgttactgagggtttagagtctcccactatagaagaacaagttgatcaaacaattgatgatgaaacaatacttatcgttccttcaccacatggctttatccaggcatctgatgttatagatactgaatctgtcttgcctttgacaacactaacagatcccatactccaacatcatcaggaagaatcaaatatcattggatcatccttgggcagtcctgtttcagaagattcaaaggatgtcgaagatttggtaaactgtcattagaataattcttagaaataggcagttca

SEQ ID NO: 1186 - DNA, 581 bp, Homo sapiens
  source 1..581: mol_type = genomic DNA
gctgcccgctagctcccgccggctggcgcaagctgtcggcgccggggcactgcgggcggggtcggagcctggccttcctgacgttgcagctgccgtccccgcacgttccggccagggcctccctcttagggccgggcggtgcccgtggctcaggctgcagaagtgttgcggagataggaacatgggagagaaacaatctgggtaacatgaaagtgatgctggttgctaagggaaggcaacttgattctgtgggaagggctgtagctgatccatccgttgtctagatttgagtatgagcacagtggaagaggattctgacacagtaacagtagaaactgtgaactctgtgactttgactcaggacacagaagggaatctcattcttcactgccctcagaatgaagcggatgaaatagactcagaagatagtattgaacctccacataaaaggctttgtttgtcctctgaggatgatcagagtattgatgattctactccttgcatatcagttgttgcacttccactttcagaaaatgatcagagctttgaagtgaccatgactgcaaccacagaagtagcag

SEQ ID NO: 1187 - DNA, 523 bp, Homo sapiens
  source 1..523: mol_type = genomic DNA
gtttccggtggctcgtcgcgctcgctcactccagctgcagccactctcgcccgtggctgcttcctccatcctggtattttttggagcttccatcctggttcttccaaagtgcccggacccaaaacaggaaagaacgtttgtctgcctgatgagagccacttgggttaagaaactacctgtgaatagtcatcatttctgtccttcattggggaatacttttagagagtgttgcggagataggaacatgggagagaaacaatctgggtaacatgaaagtgatgctggttgctaagggaaggcaacttgattctgtgggaagggctgtagctgatccatccgttgtctagatttgagtatgagcacagtggaagaggattctgacacagtaacagtagaaactgtgaactctgtgactttgactcaggacacagaagggaatctcattcttcactgccctcagaatgaagcggatgaaatagactcagaagatagtattgaacctccacataaaaggctttgtttg

SEQ ID NO: 1188 - DNA, 3954 bp, Homo sapiens
  source 1..3954: mol_type = genomic DNA
gcggccgcagctccgtttccggtggctcgtcgcgctcgctcactccagctgcagccactctcgcccgtggctgcttcctccatcctggtattttttggagcttccatcctggttcttccaaagtgcccggacccaaaacaggaaagtgttgcggagataggaacatgggagagaaacaatctgggtaacatgaaagtgatgctggttgctaagggaaggcaacttgattctgtgggaagggctgtagctgatccatccgttgtctagatttgagtatgagcacagtggaagaggattctgacacagtaacagtagaaactgtgaactctgtgactttgactcaggacacagaagggaatctcattcttcactgccctcagaatgaagcggatgaaatagactcagaagatagtattgaacctccacataaaaggctttgtttgtcctctgaggatgatcagagtattgatgattctactccttgcatatcagttgttgcacttccactttcagaaaatgatcagagctttgaagtgaccatgactgcaaccacagaagtagcagatgatgaggttactgaggggactgtgacacagatacagattttgcagaatgagcaactagatgaaatatctcccttgggtaacgaggaagtttcagcagttagccaagcatggtttacaactaaagaagataaggattctctgactaataaaggacataaatggaagcaggggatgtggtccaaggaagaaattgatattttgatgaacaatattgaacgctatcttaaggcacgcggaataaaagatgctacagaaatcatctttgagatgtcaaaagacgaaagaaaagatttctacaggactatagcatggggtctgaaccggcctttgtttgcagtttatagaagagtgcttcgcatgtatgatgacagaaaccatgtgggaaaatatacacctgaagaaattgagaagctcaaggagaaaaaggcaattgctgcctgtttttttttcacccacagacaactgtggaccccaaaaaaaggccacactttcaaactttggctctcaaagtattgctgcccacaacttccaaaccagtcaaatgggaagaagaagaatgaagaataaatgatgaaattaaaagggagaaaacaattgaaccaaatgctgattggcagactcttgttttaggctccggataaagcatggcaatgactgggcaacaataggggcggcgctaggaagaagtgcatcttctgtcaaagatcggtgccgactgatgaaggatacttgcaacacagggaagtggacagaagaagaagaaaagagacttgcagaagtggttcatgagttgacaagcactgagccaggtgacatagtcacacagggtgtgtcttgggcagctgtggctgaacgagtcggtacccgctcagaaaagcaatgtcgttctaaatggctcaactacctgaattggaaacagagtgggggtactgaatggaccaaggaagatgaaatcaatctcatcctcaggatagcagaacttgatgtagctgatgaaaatgacattaactgggatctgttagctgagggatggagtagtgtccgttcaccacaatggctacgaagtaaatggtggaccatcaaaaggcaaattgcaaaccataaggatgtttcgttccctgtcttaataaaaggtcttaaacagttacatgagaaccaaaaaaacaacccaacgcttttggagaataaatcaggatctggagttccaaacagtaataccaattccagtgtgcagcatgttcagataagagttgcccgcttggaagataatacagccatctcttctagccccatggcagcattgcagattccagtccagatcacccatgtttcttcagcagactctcctgctaccgttgactcagaaacaataacactaaacagtggaacactacagacatttgagattcttccctctttccatctacagcccactggcactccaggcacctacctacttcaaacaagctcaagccaaggccttcccctaactctgactgctagtcccacagtaaccctgacagctgctgctcctgcttctcctgaacagattattgttcatgctttatccccagaacatttgttgaacacaagtgataatgttacagtgcagtgtcacacaccaagagtcatcattcagactgttgccacagaggacatcacttcttccatatcccaagcagaactgacagtcgatagtgatattcagtcatctgattttcctgagcctccagacgccctagaagcagacactttcccagatgaaattcatcaccctaagatgactgtggagccatcatttaatgatgctcatgtatccaaattcagtgaccaaaatagcacagaactgatgaatagtgttatggtcagaacagaagaagaaatctctgacaccgaccttaaacaagaggaatcaccctctgatttagccagtgcttatgttactgagggtttagagtctcccactatagaagaacaagttgatcaaacaattgatgatgaaacaatacttatcgttccttcaccacatggctttatccaggcatctgatgttatagatactgaatctgtcttgcctttgacaacactaacagatcccatactccaacatcatcaggaagaatcaaatatcattggatcatccttgggcagtcctgtttcagaagattcaaaggatgtcgaagatttggtaaactgtcattagaataattcttagaaataggcagttcaagcaaagaaggcacactgttaattacaacctcttcaaagaaataggagcaacccccaagaggcttaatttaccaatttaaatagccacagtccttaagccacacacattgttgctgctatgactttttacctcctttaaacacatcatctgaggttgagttttatgacagtatgtagttgagtggaggctgggagttttaagcataaatccctgtttagtgttacatgggaataaggaatttcattcacttcagccactaagaaaagtttagaatcacgaaagcttaactgctgtggtttaaagtacagtttctctaaagatcagacatggcactgtctcctctcaagcctggttgtagttcagatgagtcttttcaacatggtcttcaacatggtctagagcttaccagtgatcttctgatcttcaagaagactaagtttgagacttgaccagcatacaagtatagagacctaggaggtggtcttgtggtggtacatttggttaacccattgctggcagtgggagctgatttaggcagggtaaacaggaaagcattaaaagttaaaattcactacaggttttttgttacttttaaagggaatatggataagcatagtaacaaaacccaccagaatctaagcagttttcaccccctcagaaaccactgtcattagtttacaaagttagcactttgaagtaaaactaaatgaggaaggaagtaatgttacctatccttgataccatgaccatttattagatgttttgctatataaattaccgagagaatagtttgtcatccacttagtgtgttagctggtggggtacaatataacctctcatctcaggctattttaaaaaaacaatatttgcttctataacaaaaggaaacaaatctaagaatcattcctgtactacagaagggttaaggcaaaggtagccttttgggctttttaatgaatatgacccctatagaaaagtcaagaaaaaaaaacccttgtataaattattttatttattattgtaattagatcttcacaaagttgtcttttcactgtgttttgtcaacgtgaaattaaattgtagttataagcaaaagttggttgcctagggaacaattgtatattcagtttaacagaaataaaagaatatttgtcttaa

SEQ ID NO: 1189 - DNA, 572 bp, Homo sapiens
  source 1..572: mol_type = genomic DNA
actccagctgcagccactctcgcccgtggctgcttcctccatcctggtattttttggagcttccatcctggttcttccaaagtgcccggacccaaaacaggaaaaagcacaaaaaccagcctgattgtatctggaaaaaaccattatgttacagttgataggctcaccccaaaatatgcttttggggactgatttagcacctgcatattctgcgtgaatctctttaattggttgcagttgagctaatggtggagccaaaatgctattgccctgtcttcatcaacatttaatcaagtgttgcggagataggaacatgggagagaaacaatctgggtaacatgaaagtgatgctggttgctaagggaaggcaacttgattctgtgggaagggctgtagctgatccatccgttgtctagatttgagtatgagcacagtggaagaggattctgacacagtaacagtagaaactgtgaactctgtgactttgactcaggacacagaagggaatctcattcttcactgccctcagaatgaagcggatgaaatagactcagaagatagtattgaacctc

SEQ ID NO: 1190 - DNA, 700 bp, Homo sapiens
  source 1..700: mol_type = genomic DNA
actccagctgcagccactctcgcccgtggctgcttcctccatcctggtattttttggagcttccatcctggttcttccaaagtgcccggacccaaaacaggaattgataggctcaccccaaaatatgcttttggggactgatttagcacctgcatattctgcgtgaatctctttaattggttgcagttgagctaatggtggagccaaaatgctattgccctgtcttcatcaacatttaatcaagtgttgcggagataggaacatgggagagaaacaatctgggtaacatgaaagtgatgctggttgctaagggaaggcaacttgattctgtgggaagggctgtagctgatccatccgttgtctagatttgagtatgagcacagtggaagaggattctgacacagtaacagtagaaactgtgaactctgtgactttgactcaggacacagaagggaatctcattcttcactgccctcagaatgaagcggatgaaatagactcagaagatagtattgaacctccacataaaaggctttgtttgtcctctgaggatgatcagagtattgatgattctactccttgcatatcagttgttgcacttccactttcagaaaatgatcagagctttgaagtgaccatgactgcaaccacagaagtagcagatgatgaggttactgaggggactgtgacacagatacag

SEQ ID NO: 1191 - DNA, 585 bp, Homo sapiens
  source 1..585: mol_type = genomic DNA
cactccagctgcagccactctcgcccgtggctgcttcctccatcctggtattttttggagcttccatcctggttcttccaaagtgcccggacccaaaacaggaaagtgttgcggagataggaacatgggagagaaacaatctgggtaacatgaaagtgatgctggttgctaagggaaggcaacttgattctgtgggaagggctgtagctgatccatccgttgtctagccatgagatgctatattctgagactagttattccatctgtctgaacaagaggaaaataatatttgtgtaaaatagcagatttgagtatgagcacagtggaagaggattctgacacagtaacagtagaaactgtgaactctgtgactttgactcaggacacagaagggaatctcattcttcactgccctcagaatgaagcggatgaaatagactcagaagatagtattgaacctccacataaaaggctttgtttgtcctctgaggatgatcagagtattgatgattctactccttgcatatcagttgttgcacttccactttcagaaaatgatcagagctttgaagtgaccatgactgc

SEQ ID NO: 1192 - DNA, 4307 bp, Homo sapiens
  source 1..4307: mol_type = genomic DNA
gcttaacaacagtaacgtcacacggactacaggggagttttgttgaagttgcaaagtcctggagcctccagagggctgtcggcgcagtagcagcgagcagcagagtccgcacgctccggcgaggggcagaagagcgcgagggagcgcggggcagcagaagcgagagccgagcgcggacccagccaggacccacagccctccccagctgcccaggaagagccccagccatggaacaccagctcctgtgctgcgaagtggaaaccatccgccgcgcgtaccccgatgccaacctcctcaacgaccgggtgctgcgggccatgctgaaggcggaggagacctgcgcgccctcggtgtcctacttcaaatgtgtgcagaaggaggtcctgccgtccatgcggaagatcgtcgccacctggatgctggaggtctgcgaggaacagaagtgcgaggaggaggtcttcccgctggccatgaactacctggaccgcttcctgtcgctggagcccgtgaaaaagagccgcctgcagctgctgggggccacttgcatgttcgtggcctctaagatgaaggagaccatccccctgacggccgagaagctgtgcatctacaccgacaactccatccggcccgaggagctgctgcaaatggagctgctcctggtgaacaagctcaagtggaacctggccgcaatgaccccgcacgatttcattgaacacttcctctccaaaatgccagaggcggaggagaacaaacagatcatccgcaaacacgcgcagaccttcgttgccctctgtgccacagatgtgaagttcatttccaatccgccctccatggtggcagcggggagcgtggtggccgcagtgcaaggcctgaacctgaggagccccaacaacttcctgtcctactaccgcctcacacgcttcctctccagagtgatcaagtgtgacccggactgcctccgggcctgccaggagcagatcgaagccctgctggagtcaagcctgcgccaggcccagcagaacatggaccccaaggccgccgaggaggaggaagaggaggaggaggaggtggacctggcttgcacacccaccgacgtgcgggacgtggacatctgagggcgccaggcaggcgggcgccaccgccacccgcagcgagggcggagccggccccaggtgctcccctgacagtccctcctctccggagcattttgataccagaagggaaagcttcattctccttgttgttggttgttttttcctttgctctttcccccttccatctctgacttaagcaaaagaaaaagattacccaaaaactgtctttaaaagagagagagagaaaaaaaaaatagtatttgcataaccctgagcggtgggggaggagggttgtgctacagatgatagaggattttataccccaataatcaactcgtttttatattaatgtacttgtttctctgttgtaagaataggcattaacacaaaggaggcgtctcgggagaggattaggttccatcctttacgtgtttaaaaaaaagcataaaaacattttaaaaacatagaaaaattcagcaaaccatttttaaagtagaagagggttttaggtagaaaaacatattcttgtgcttttcctgataaagcacagctgtagtggggttctaggcatctctgtactttgcttgctcatatgcatgtagtcactttataagtcattgtatgttattatattccgtaggtagatgtgtaacctcttcaccttattcatggctgaagtcacctcttggttacagtagcgtagcgtgcccgtgtgcatgtcctttgcgcctgtgaccaccaccccaacaaaccatccagtgacaaaccatccagtggaggtttgtcgggcaccagccagcgtagcagggtcgggaaaggccacctgtcccactcctacgatacgctactataaagagaagacgaaatagtgacataatatattctatttttatactcttcctatttttgtagtgacctgtttatgagatgctggttttctacccaacggccctgcagccagctcacgtccaggttcaacccacagctacttggtttgtgttcttcttcatattctaaaaccattccatttccaagcactttcagtccaataggtgtaggaaatagcgctgtttttgttgtgtgtgcagggagggcagttttctaatggaatggtttgggaatatccatgtacttgtttgcaagcaggactttgaggcaagtgtgggccactgtggtggcagtggaggtggggtgtttgggaggctgcgtgccagtcaagaagaaaaaggtttgcattctcacattgccaggatgataagttcctttccttttctttaaagaagttgaagtttaggaatcctttggtgccaactggtgtttgaaagtagggacctcagaggtttacctagagaacaggtggtttttaagggttatcttagatgtttcacaccggaaggtttttaaacactaaaatatataatttatagttaaggctaaaaagtatatttattgcagaggatgttcataaggccagtatgatttataaatgcaatctccccttgatttaaacacacagatacacacacacacacacacacacacaaaccttctgcctttgatgttacagatttaatacagtttatttttaaagatagatccttttataggtgagaaaaaaacaatctggaagaaaaaaaccacacaaagacattgattcagcctgtttggcgtttcccagagtcatctgattggacaggcatgggtgcaaggaaaattagggtactcaacctaagttcggttccgatgaattcttatcccctgccccttcctttaaaaaacttagtgacaaaatagacaatttgcacatcttggctatgtaattcttgtaatttttatttaggaagtgttgaagggaggtggcaagagtgtggaggctgacgtgtgagggaggacaggcgggaggaggtgtgaggaggaggctcccgaggggaaggggcggtgcccacaccggggacaggccgcagctccattttcttattgcgctgctaccgttgacttccaggcacggtttggaaatattcacatcgcttctgtgtatctctttcacattgtttgctgctattggaggatcagttttttgttttacaatgtcatatactgccatgtactagttttagttttctcttagaacattgtattacagatgccttttttgtagttttttttttttttatgtgatcaattttgacttaatgtgattactgctctattccaaaaaggttgctgtttcacaatacctcatgcttcacttagccatggtggacccagcgggcaggttctgcctgctttggcgggcagacacgcgggcgcgatcccacacaggctggcgggggccggccccgaggccgcgtgcgtgagaaccgcgccggtgtccccagagaccaggctgtgtccctcttctcttccctgcgcctgtgatgctgggcacttcatctgatcgggggcgtagcatcatagtagtttttacagctgtgttattctttgcgtgtagctatggaagttgcataattattattattattattataacaagtgtgtcttacgtgccaccacggcgttgtacctgtaggactctcattcgggatgattggaatagcttctggaatttgttcaagttttgggtatgtttaatctgttatgtactagtgttctgtttgttattgttttgttaattacaccataatgctaatttaaagagactccaaatctcaatgaagccagctcacagtgctgtgtgccccggtcacctagcaagctgccgaaccaaaagaatttgcaccccgctgcgggcccacgtggttggggccctgccctggcagggtcatcctgtgctcggaggccatctcgggcacaggcccaccccgccccacccctccagaacacggctcacgcttacctcaaccatcctggctgcggcgtctgtctgaaccacgcgggggccttgagggacgctttgtctgtcgtgatggggcaagggcacaagtcctggatgttgtgtgtatcgagaggccaaaggctggtggcaagtgcacggggcacagcggagtctgtcctgtgacgcgcaagtctgagggtctgggcggcgggcggctgggtctgtgcatttctggttgcaccgcggcgcttcccagcaccaacatgtaaccggcatgtttccagcagaagacaaaaagacaaacatgaaagtctagaaataaaactggtaaaacccca

SEQ ID NO: 1193 - DNA, 1394 bp, Homo sapiens
  source 1..1394: mol_type = genomic DNA
agagggctgtcggcgcagtagcagcgagcagcagagtccgcacgctccggcgaggggcagaagagcgcgagggagcgcggggcagcagaagcgagagccgagcgcggacccagccaggacccacagccctccccagctgcccaggaagagccccagccatggaacaccagctcctgtgctgcgaagtggaaaccatccgccgcgcgtaccccgatgccaacctcctcaacgaccgggtgctgcgggccatgctgaaggcggaggagacctgcgcgccctcggtgtcctacttcaaatgtgtgcagaccttcgttgccctctgtgccacagatgtgaagttcatttccaatccgccctccatggtggcagcggggagcgtggtggccgcagtgcaaggcctgaacctgaggagccccaacaacttcctgtcctactaccgcctcacacgcttcctctccagagtgatcaagtgtgacccggactgcctccgggcctgccaggagcagatcgaagccctgctggagtcaagcctgcgccaggcccagcagaacatggaccccaaggccgccgaggaggaggaagaggaggaggaggaggtggacctggcttgcacacccaccgacgtgcgggacgtggacatctgagggcgccaggcaggcgggcgccaccgccacccgcagcgagggcggagccggccccaggtgctcccctgacagtccctcctctccggagcattttgataccagaagggaaagcttcattctccttgttgttggttgttttttcctttgctctttcccccttccatctctgacttaagcaaaagaaaaagattacccaaaaactgtctttaaaagagagagagagaaaaaaaaaatagtatttgcataaccctgagcggtgggggaggagggttgtgctacagatgatagaggattttataccccaataatcaactcgtttttatattaatgtacttgtttctctgttgtaagaataggcattaacacaaaggaggcgtctcgggagaggattaggttccatcctttacgtgtttaaaaaaaagcataaaaacattttaaaaacatagaaaaattcagcaaaccatttttaaagtagaagagggttttaggtagaaaaacatattcttgtgcttttcctgataaagcacagctgtagtggggttctaggcatctctgtactttgcttgctcatatgcatgtagtcactttataagtcattgtatgttattatattccgtaggtagatgtgtaacctcttcaccttattcatggctgaagtcacctcttggttacagtagcgtagcgtgcccgtgtgcatgtcctttgcgcctgtgaccaccaccccaacaaaccatccagtgacaaaccatc

SEQ ID NO: 1194 - DNA, 6480 bp, Homo sapiens
  source 1..6480: mol_type = genomic DNA
agagcgagcaggggagagcgagaccagttttaaggggaggaccggtgcgagtgaggcagccccgaggctctgctcgcccaccacccaatcctcgcctcccttctgctccaccttctctctctgccctcacctctcccccgaaaaccccctatttagccaaaggaaggaggtcaggggaacgctctcccctccccttccaaaaaacaaaaacagaaaaacctttttccaggccggggaaagcaggagggagaggggccgccgggctggccatggagctgctgtgccacgaggtggacccggtccgcagggccgtgcgggaccgcaacctgctccgagacgaccgcgtcctgcagaacctgctcaccatcgaggagcgctaccttccgcagtgctcctacttcaagtgcgtgcagaaggacatccaaccctacatgcgcagaatggtggccacctggatgctggaggtctgtgaggaacagaagtgcgaagaagaggtcttccctctggccatgaattacctggaccgtttcttggctggggtcccgactccgaagtcccatctgcaactcctgggtgctgtctgcatgttcctggcctccaaactcaaagagaccagcccgctgaccgcggagaagctgtgcatttacaccgacaactccatcaagcctcaggagctgctggagtgggaactggtggtgctggggaagttgaagtggaacctggcagctgtcactcctcatgacttcattgagcacatcttgcgcaagctgccccagcagcgggagaagctgtctctgatccgcaagcatgctcagaccttcattgctctgtgtgccaccgactttaagtttgccatgtacccaccgtcgatgatcgcaactggaagtgtgggagcagccatctgtgggctccagcaggatgaggaagtgagctcgctcacttgtgatgccctgactgagctgctggctaagatcaccaacacagacgtggattgtctcaaagcttgccaggagcagattgaggcggtgctcctcaatagcctgcagcagtaccgtcaggaccaacgtgacggatccaagtcggaggatgaactggaccaagccagcacccctacagacgtgcgggatatcgacctgtgaggatgccagttgggccgaaagagagagacgcgtccataatctggtctcttcttctttctggttgtttttgttctttgtgttttagggtgaaacttaaaaaaaaaattctgcccccacctagatcatatttaaagatcttttagaagtgagagaaaaaggtcctacgaaaacggaataataaaaagcatttggtgcctatttgaagtacagcataagggaatcccttgtatatgcgaacagttattgtttgattatgtaaaagtaatagtaaaatgcttacaggaaaacctgcagagtagttagagaatatgtatgcctgcaatatgggaacaaattagaggagacttttttttttcatgttatgagctagcacatacacccccttgtagtataatttcaaggaactgtgtacgccatttatggcatgattagattgcaaagcaatgaactcaagaaggaattgaaataaggagggacatgatggggaaggagtacaaaacaatctctcaacatgattgaaccatttgggatggagaagcacctttgctctcagccacctgttactaagtcaggagtgtagttggatctctacattaatgtcctcttgctgtctacagtagctgctacctaaaaaaagatgttttattttgccagttggacacaggtgattggctcctgggtttcatgttctgtgacatcctgcttcttcttccaaatgcagttcattgcagacaccaccatattgctatctaatggggaaatgtagctatgggccataaccaaaactcacatgaaacggaggcagatggagaccaagggtgggatccagaatggagtcttttctgttattgtatttaaaagggtaatgtggccttggcatttcttcttagaaaaaaactaatttttggtgctgattggcatgtctggttcacagtttagcattgttataaaccattccattcgaaaagcactttgaaaaattgttcccgagcgatagatgggatggtttatgcaagtcatgctgaatactcctcccctcttctcttttgccccctcccttcctgcccccagtctgggttactcttcgcttctggtatctggcgttctttggtacacagttctggtgttcctaccaggactcaagagacaccccttcctgctgacattcccatcacaacattcctcagacaagcctgtaaactaaaatctgttaccattctgatggcacagaaggatcttaattcccatctctatacttctcctttggacatggaaagaaaagttattgctggtgcaaagatagatggctgaacatcagggtgtggcattttgttcccttttccgtttttttttttttattgttgttgttaattttattgcaaagttgtattcagcgtacttgaatttttcttcctctccacttcttagaggcattcagttagcaaagaggttggagcaacaacttttttttttttttttgcacaattgtaattgacaggtaatgaagctatttgttaaaatatttgcctttttaagtaaaaaagaaaaatcagaacagggctatttgaagaattattttatacacagattctgccttgtttcatagtatgagggttgaagacggaaaacaatctaagggtctctcatttttttaattttgttttgttcagtttggtttttttttttttttgcgctgctaagaagctaaagtcatccatccttattcacgttgacagtacctagctgtaatgtttcacagagtgtgctgctattttataaacatttttataatatattattttactgcttaaattccaagtcctgaagtagatggttgagatatgagttcttcgtactggaaaagcccttccgtagtttgttttcttctggtagcatattcatggttgtttttttttttcttttttggttttttggttttttttttttcctctgatcacattcttcaaagacggagtattctttacctcaggtttactggacaaaatcaataactacaaaaggcaatgattcacgcttttgttttcataatacctcacaaccgtacagtttctgcttgggagcccattcgcatgaggaatacagaagcagtgtgagcagggctgactccctctcaggtggaaggcagggcggtctcactcccagggacctttttggtcatggaggccatcgggctcccagttagaccctggtatcctcatcatgatggaaaaaatacattgaaccaagggatcctccctccccttcaaggcagacgttcagtacaaacatttatgcggtaggctcagatgtcgtaatttgcacttaggtaccaggtgtcaggaaacagactaaaaagaattccaccaggctgtttggagatcctcatcttggagctttttcaaaagcggggcttcatctgcaaagggccctttcatcttgaagtttttcccctccgtctttcccctcccctggcatggacaccttgtgtttaggatcatctctgcaggtttcctaggtctgaatctgcgagtagatgaacctgcagcaagcagcgtttatggtgcttccttctccctcctctgtctcaaactgcgcaggcaagcactatgcaagcccaggccctctgctgagcggtactaaacggtcgggttttcaatcacactgaattggcaggataagaaaaataggtcagataagtatgggatgatagttgaagggaggtgaagaggctgcttctctacagaggtgaaattccagatgagtcagtctcttgggaagtgtgtttagaagggttcaggactttgtgagttagcatgaccctaaaattctaggggatttctggtgggacaatgggtggtgaattctgaagttttggagagggaagtggagcagccagcaagtaagctagccagagttttctcaagagccagctttgctcagcacactctcctgggccccaaggagtcccacggaatggggaaagcgggaaccctggagttcttgggaatcttggagcctaaagagaaaccgaggtgcaaattcatttcatggtgactgacccttgagcttaaacagaagcagcaaatgaaagaaccggacaaataaggaagggcacaagcctacccgactctatttacagtctgtaactttccactcttcctgtagtcccgaggcccctgggtccttctagcttttctctttcccatccttggggccttgtgtgatgatgggtgtggggctgccgatgggaaagtcgggggttgttaggcttttctgcctgctcctgcttaaacacaagaaggaatcctggattttgccctctccttagctcttagtctctttggtaggagttttgttccagaggagctctcccccttggatttgaacttgctctttttgttgttgttgttctttctcttctttttcttacctcccactaaaggggttccaaattatcctggtctttttctaccttgttgtgtttctatctcgtctttacttccatctgtttgtttttttctccatcagtgggggccgagttgttcccccagcctgccaaattttgatccttcccctcttttggccaaatcctagggggaagaaatcctagtatgccaaaaatatatgctaagcataattaaactccatgcgggtccataacagccaagaagcctgcaggagaaagccaagggcagttccctccgcagaacaccccatgcgtgctgagaggcgagctccttgaagaaggggctgttcttccaggaggccttattttgaactgcctcaggaccccactggagagcacagcatgccttactactgggtcatccttggtctatgtgctctgtactggaggctctgttctgcctcttatcagccaggtcaggggcacacatggcttaagtgacaaagccagaggagaagacaaccctgacagcatcacgctgcatcccattgctagcaggattggcaactcttcagacggagctgcgcttccctgcagtctagcacctctagggcctctccagactgtgccctgggagctctgggactgaaaggttaagaacataaggcaggatcagatgactctctccaagagggcaggggaattttctctccatgggccacaggggacagggctgggagaagaaatagacttgcaccttatgtcatgtaaataattgattttctagttcaagaagataatattggtagtgtgggaattggaggtaggaaggggaggaagtctgagtaagccagttggcttctaagccaaaaggattcctctttgtttatctctgagacagtccaaccttgagaatagctttaaaagggaaattaatgctgagatgataaagtccccttaagccaacaaaccctctgtagctatagaatgagtgcaggtttctattggtgtggactcagagcaatttacaagagctgttcatgcagccatccatttgtgcaaaatagggtaagaagattcaagaggatatttattacttcctcataccacatggcttttgatgattctggattctaaacaacccagaatggtcatttcaggcacaacgatactacattcgtgtgtgtctgcttttaaacttggctgggctatcagaccctattctcggctcaggttttgagaagccatcagcaaatgtgtacgtgcatgctgtagctgcagcctgcatcccttcgcctgcagcctactttggggaaataaagtgccttactgactgtagccattacagtatccaatgtcttttgacaggtgcctgtccttgaaaaacaaagtttctatttttatttttaattggtttagttcttaactgctggccaactcttacatccccagcaaatcatcgggccattggattttttccattatgttcatcacccttatatcatgtacctcagatctctctctctctcctctctctcagttatgtagtttcttgtcttggacttttttttttcttttctttttctttttttttttgctttaaaacaagtgtgatgccatatcaagtccatgttattctctcacagtgtactctataagaggtgtgggtgtctgtttggtcaggatgttagaaagtgctgataagtagcatgatcagtgtatgcgaaaaggtttttaggaagtatggcaaaaatgttgtattggctatgatggtgacatgatatagtcagctgccttttaagaggtcttatctgttcagtgttaagtgatttaaaaaaataataacctgttttctgactagtttaaagatggatttgaaaatggttttgaatgcaattaggttatgctatttggacaataaactcaccttgacct

SEQ ID NO: 1195 - DNA, 2233 bp, Homo sapiens
  source 1..2233: mol_type = genomic DNA
acttccagtgcgtgcagcgggagatcaagccgcacatgcggaagatgctggcttactggatgctggaggtaccgcccggacgcgtccccctcccccaccgctcccgggtctggacacaccggggccgccctgtcgggacatcccggtccccacagcaatctgcaggatgctccgaggctaagactcccggggcctggcctttcactagggcacccacgccagctgcctcccttgctttcccgagccctaatcggctcctcccgacagtgactgccagtcacttggcaccctaactgtgcctctcttcgggccgagcaaacgggaccaaggacactctctccccttcggcttctcacagcgtctcccgcttccctccgcctcccggccttctccggagagcgcgcctggaaaaccctgggctcggccgcccccgcccgggagccggttcctgtgtctttcgcggggttctggcggggaaggcgatgggggtggcgcgcgccctgttccggccgacagggaaatgaaaagtgcaggaggcagcggcaggagcctcctcccttcccctcgggtatgtgaggagcagcgctgtgaggaggaagtcttccccctggccatgaactacctggatcgctacctgtcttgcgtccccacccgaaaggcgcagttgcagctcctgggtgcggtctgcatgctgctggcctccaagctgcgcgagaccacgcccctgaccatcgaaaaactgtgcatctacaccgaccacgctgtctctccccgccagttgcgggactgggaggtgctggtcctagggaagctcaagtgggacctggctgctgtgattgcacatgatttcctggccttcattctgcaccggctctctctgccccgtgaccgacaggccttggtcaaaaagcatgcccagacctttttggccctctgtgctacagattatacctttgccatgtacccgccatccatgatcgccacgggcagcattggggctgcagtgcaaggcctgggtgcctgctccatgtccggggatgagctcacagagctgctggcagggatcactggcactgaagtggactgcctgcgggcctgtcaggagcagatcgaagctgcactcagggagagcctcagggaagcctctcagaccagctccagcccagcgcccaaagccccccggggctccagcagccaagggcccagccagaccagcactcctacagatgtcacagccatacacctgtagccctggagaggccctctggagtggccactaagcagaggaggggccgctgccacccacctccctgcctccaggaaccacaccacatctaagcctgaaggggcgtctgttcccccttcacaaagcccaagggatctggtcctacccatccccgcagtgtgcactaaggggcccggccagccatgtctgcatttcggtggctagtcaagctcctcctccctgcatctgaccagcagcgcctttcccaactctagctgggggtgggccaggctgatgggacagaattggatacatacaccagcattccttttgaacgcccccccccacccctgggggctctcatgttttcaactgccaaaatgctctagtgccttctaaaggtgttgtcccttctagggttattgcatttggattggggtccctctaaaatttaatgcatgatagacacatatgagggggaatagtctagatggctcctctcagtactttggaggcccctatgtagtccgtgctgacagctgctcctagagggaggggcctaggcctcagccagagaagctataaattcctctttgctttgctttctgctcagcttctcctgtgtgattgacagctttgctgctgaaggctcattttaatttattaattgctttgagcacaactttaagaggacataatggggtcctggccatcccacaagtggtggtaaccctggtggttgctgttttcctcccttctgctactggcaaaaggatctttgtggccaaggagctgctatagcctggggtggggtcatgccctcctctcccattgtccctctgccccatcctccagcagggaaaatgcagcagggatgccctggaggtggctgagcccctgtctagagagggaggcaagccctgttgacacaggtctttcctaaggctgcaaggtttaggctggtggcccaggaccatcatcctactgtaataaagatgattgtgaaat

SEQ ID NO: 1196 - DNA, 2133 bp, Homo sapiens
  source 1..2133: mol_type = genomic DNA
ggcagcggtccgggaacccgtgctgccccggccccgccgcccacacctgagcctccgtggcgccccgcccccgcacctatgccgcgtggggcgggggctgcgggcgggggtgcgcggcgccggatgagcctcctggcctcgccgagggtgtacagggggtgggagagtcaggccggggaccgaaacttggctgagcagagcaccagcccctttgtctcctccgccccctcttccccacttcctgcccagctctggatcggcggcgcggcgcggactttgtaaacacttcgccactgcaggggtggagactggctctgttcggatgccggccgggggggagaggtgcaatcctctcctcgcggctggtggttgcgaccacccccactccccaaaggcaggctccggaggcggcgggacagagcgcctgcgaccccagtcggtgctccggggaggtcacctgacgaggaggtatgtgaggagcagcgctgtgaggaggaagtcttccccctggccatgaactacctggatcgctacctgtcttgcgtccccacccgaaaggcgcagttgcagctcctgggtgcggtctgcatgctgctggcctccaagctgcgcgagaccacgcccctgaccatcgaaaaactgtgcatctacaccgaccacgctgtctctccccgccagttgcgggactgggaggtgctggtcctagggaagctcaagtgggacctggctgctgtgattgcacatgatttcctggccttcattctgcaccggctctctctgccccgtgaccgacaggccttggtcaaaaagcatgcccagacctttttggccctctgtgctacagattatacctttgccatgtacccgccatccatgatcgccacgggcagcattggggctgcagtgcaaggcctgggtgcctgctccatgtccggggatgagctcacagagctgctggcagggatcactggcactgaagtggactgcctgcgggcctgtcaggagcagatcgaagctgcactcagggagagcctcagggaagcctctcagaccagctccagcccagcgcccaaagccccccggggctccagcagccaagggcccagccagaccagcactcctacagatgtcacagccatacacctgtagccctggagaggccctctggagtggccactaagcagaggaggggccgctgccacccacctccctgcctccaggaaccacaccacatctaagcctgaaggggcgtctgttcccccttcacaaagcccaagggatctggtcctacccatccccgcagtgtgcactaaggggcccggccagccatgtctgcatttcggtggctagtcaagctcctcctccctgcatctgaccagcagcgcctttcccaactctagctgggggtgggccaggctgatgggacagaattggatacatacaccagcattccttttgaacgcccccccccacccctgggggctctcatgttttcaactgccaaaatgctctagtgccttctaaaggtgttgtcccttctagggttattgcatttggattggggtccctctaaaatttaatgcatgatagacacatatgagggggaatagtctagatggctcctctcagtactttggaggcccctatgtagtccgtgctgacagctgctcctagagggaggggcctaggcctcagccagagaagctataaattcctctttgctttgctttctgctcagcttctcctgtgtgattgacagctttgctgctgaaggctcattttaatttattaattgctttgagcacaactttaagaggacataatggggtcctggccatcccacaagtggtggtaaccctggtggttgctgttttcctcccttctgctactggcaaaaggatctttgtggccaaggagctgctatagcctggggtggggtcatgccctcctctcccattgtccctctgccccatcctccagcagggaaaatgcagcagggatgccctggaggtggctgagcccctgtctagagagggaggcaagccctgttgacacaggtctttcctaaggctgcaaggtttaggctggtggcccaggaccatcatcctactgtaataaagatgattgtgaaat

SEQ ID NO: 1197 - DNA, 2085 bp, Homo sapiens
  source 1..2085: mol_type = genomic DNA
attccacggttgctacatcgtcgcgaggggcggggcgcctgtcagggaagcggcgcgcgcgcgcgggcggcgggcgggctggggatccgccgcgcagtgccagcgccagcgccagacccgcgccccgcgctctccggcccgtcgcctgccttgggactcgcgagcccgcactcccgccctgcctgttcgctgcccgagtatggagctgctgtgttgcgaaggcacccggcacgcgccccgggccgggccggacccgcggctgctgggggaccagcgtgtcctgcagagcctgctccgcctggaggagcgctacgtaccccgcgcctcctacttccagtgcgtgcagcgggagatcaagccgcacatgcggaagatgctggcttactggatgctggaggtatgtgaggagcagcgctgtgaggaggaagtcttccccctggccatgaactacctggatcgctacctgtcttgcgtccccacccgaaaggcgcagttgcagctcctgggtgcggtctgcatgctgctggcctccaagctgcgcgagaccacgcccctgaccatcgaaaaactgtgcatctacaccgaccacgctgtctctccccgccagttgcgggactgggaggtgctggtcctagggaagctcaagtgggacctggctgctgtgattgcacatgatttcctggccttcattctgcaccggctctctctgccccgtgaccgacaggccttggtcaaaaagcatgcccagacctttttggccctctgtgctacagattatacctttgccatgtacccgccatccatgatcgccacgggcagcattggggctgcagtgcaaggcctgggtgcctgctccatgtccggggatgagctcacagagctgctggcagggatcactggcactgaagtggactgcctgcgggcctgtcaggagcagatcgaagctgcactcagggagagcctcagggaagcctctcagaccagctccagcccagcgcccaaagccccccggggctccagcagccaagggcccagccagaccagcactcctacagatgtcacagccatacacctgtagccctggagaggccctctggagtggccactaagcagaggaggggccgctgccacccacctccctgcctccaggaaccacaccacatctaagcctgaaggggcgtctgttcccccttcacaaagcccaagggatctggtcctacccatccccgcagtgtgcactaaggggcccggccagccatgtctgcatttcggtggctagtcaagctcctcctccctgcatctgaccagcagcgcctttcccaactctagctgggggtgggccaggctgatgggacagaattggatacatacaccagcattccttttgaacgcccccccccacccctgggggctctcatgttttcaactgccaaaatgctctagtgccttctaaaggtgttgtcccttctagggttattgcatttggattggggtccctctaaaatttaatgcatgatagacacatatgagggggaatagtctagatggctcctctcagtactttggaggcccctatgtagtccgtgctgacagctgctcctagagggaggggcctaggcctcagccagagaagctataaattcctctttgctttgctttctgctcagcttctcctgtgtgattgacagctttgctgctgaaggctcattttaatttattaattgctttgagcacaactttaagaggacataatggggtcctggccatcccacaagtggtggtaaccctggtggttgctgttttcctcccttctgctactggcaaaaggatctttgtggccaaggagctgctatagcctggggtggggtcatgccctcctctcccattgtccctctgccccatcctccagcagggaaaatgcagcagggatgccctggaggtggctgagcccctgtctagagagggaggcaagccctgttgacacaggtctttcctaaggctgcaaggtttaggctggtggcccaggaccatcatcctactgtaataaagatgattgtgaaataaaactggctttggcttcttgga

SEQ ID NO: 1198 - DNA, 1724 bp, Homo sapiens
  source 1..1724: mol_type = genomic DNA
gcagtgccagcgccagcgccagacccgcgccccgcgctctccggcccgtcgcctgccttgggactcgcgagcccgcactcccgccctgcctgttcgctgcccgagtatggagctgctgtgttgcgaaggcacccggcacgcgccccgggccgggccggacccgcggctgctgggggaccagcgtgtcctgcagagcctgctccgcctggaggagcgctacgtaccccgcgcctcctacttccagtgcgtgcagcgggagatcaagccgcacatgcggaagatgctggcttactggatgctggaggactgggaggtgctggtcctagggaagctcaagtgggacctggctgctgtgattgcacatgatttcctggccttcattctgcaccggctctctctgccccgtgaccgacaggccttggtcaaaaagcatgcccagacctttttggccctctgtgctacagattatacctttgccatgtacccgccatccatgatcgccacgggcagcattggggctgcagtgcaaggcctgggtgcctgctccatgtccggggatgagctcacagagctgctggcagggatcactggcactgaagtggactgcctgcgggcctgtcaggagcagatcgaagctgcactcagggagagcctcagggaagcctctcagaccagctccagcccagcgcccaaagccccccggggctccagcagccaagggcccagccagaccagcactcctacagatgtcacagccatacacctgtagccctggagaggccctctggagtggccactaagcagaggaggggccgctgccacccacctccctgcctccaggaaccacaccacatctaagcctgaaggggcgtctgttcccccttcacaaagcccaagggatctggtcctacccatccccgcagtgtgcactaaggggcccggccagccatgtctgcatttcggtggctagtcaagctcctcctccctgcatctgaccagcagcgcctttcccaactctagctgggggtgggccaggctgatgggacagaattggatacatacaccagcattccttttgaacgcccccccccacccctgggggctctcatgttttcaactgccaaaatgctctagtgccttctaaaggtgttgtcccttctagggttattgcatttggattggggtccctctaaaatttaatgcatgatagacacatatgagggggaatagtctagatggctcctctcagtactttggaggcccctatgtagtccgtgctgacagctgctcctagagggaggggcctaggcctcagccagagaagctataaattcctctttgctttgctttctgctcagcttctcctgtgtgattgacagctttgctgctgaaggctcattttaatttattaattgctttgagcacaactttaagaggacataatggggtcctggccatcccacaagtggtggtaaccctggtggttgctgttttcctcccttctgctactggcaaaaggatctttgtggccaaggagctgctatagcctggggtggggtcatgccctcctctcccattgtccctctgccccatcctccagcagggaaaatgcagcagggatgccctggaggtggctgagcccctgtctagagagggaggcaagccctgttgacacaggtctttcctaaggctgcaaggtttaggctggtggcccaggaccatca

SEQ ID NO: 1199 - DNA, 1843 bp, Homo sapiens
  source 1..1843: mol_type = genomic DNA
acctatgccgcgtggggcgggggctgcgggcgggggtgcgcggcgccggatgagcctcctggcctcgccgagggtgtacagggggtgggagagtcaggccggggaccgaaacttggctgagcagagcaccagcccctttgtctcctccgccccctcttccccacttcctgcccagctctggatcggcggcgcggcgcggactttgtaaacacttcgccactgcaggggtggagactggctctgttcggatgccggccgggggggagaggtgcaatcctctcctcgcggctggtggttgcgaccacccccactccccaaaggcaggctccggaggcggcgggacagagcgcctgcgaccccagtcggtgctccggggaggtcacctgacgaggaggactgggaggtgctggtcctagggaagctcaagtgggacctggctgctgtgattgcacatgatttcctggccttcattctgcaccggctctctctgccccgtgaccgacaggccttggtcaaaaagcatgcccagacctttttggccctctgtgctacagattatacctttgccatgtacccgccatccatgatcgccacgggcagcattggggctgcagtgcaaggcctgggtgcctgctccatgtccggggatgagctcacagagctgctggcagggatcactggcactgaagtggactgcctgcgggcctgtcaggagcagatcgaagctgcactcagggagagcctcagggaagcctctcagaccagctccagcccagcgcccaaagccccccggggctccagcagccaagggcccagccagaccagcactcctacagatgtcacagccatacacctgtagccctggagaggccctctggagtggccactaagcagaggaggggccgctgccacccacctccctgcctccaggaaccacaccacatctaagcctgaaggggcgtctgttcccccttcacaaagcccaagggatctggtcctacccatccccgcagtgtgcactaaggggcccggccagccatgtctgcatttcggtggctagtcaagctcctcctccctgcatctgaccagcagcgcctttcccaactctagctgggggtgggccaggctgatgggacagaattggatacatacaccagcattccttttgaacgcccccccccacccctgggggctctcatgttttcaactgccaaaatgctctagtgccttctaaaggtgttgtcccttctagggttattgcatttggattggggtccctctaaaatttaatgcatgatagacacatatgagggggaatagtctagatggctcctctcagtactttggaggcccctatgtagtccgtgctgacagctgctcctagagggaggggcctaggcctcagccagagaagctataaattcctctttgctttgctttctgctcagcttctcctgtgtgattgacagctttgctgctgaaggctcattttaatttattaattgctttgagcacaactttaagaggacataatggggtcctggccatcccacaagtggtggtaaccctggtggttgctgttttcctcccttctgctactggcaaaaggatctttgtggccaaggagctgctatagcctggggtggggtcatgccctcctctcccattgtccctctgccccatcctccagcagggaaaatgcagcagggatgccctggaggtggctgagcccctgtctagagagggaggcaagccctgttgacacaggtctttcctaaggctgcaaggtttaggctggtggcccaggaccatcatcctactgtaataaagatgattgtgaaat

SEQ ID NO: 1200 - DNA, 544 bp, Homo sapiens
  source 1..544: mol_type = genomic DNA
acacttcgccactgcaggggtggagactggctctgttcggatgccggccgggggggagaggtgcaatcctctcctcgcggctggtggttgcgaccacccccactccccaaaggcaggctccggaggcggcgggacagagcgcctgcgaccccagtcggtgctccggggaggtcacctgacgaggagctccaacctgagcggcaagacccagatggacatgggcacctaggggctttggggcagcactggtttaccacgtgtccctccatatcctgaagatgtaggcctccgtggacacacctgtattcctgagctgtgcatggcctctgtcctggttgcacagaggattggacccacagggcagatgggtatgtgaggagcagcgctgtgaggaggaagtcttccccctggccatgaactacctggatcgctacctgtcttgcgtccccacccgaaaggcgcagttgcagctcctgggtgcggtctgcatgctgctggcctccaagctgcgcgagaccacgcccctgaccatcgaaaaactgtg

SEQ ID NO: 1201 - DNA, 540 bp, Homo sapiens
  source 1..540: mol_type = genomic DNA
tttattggtccttgtctctctaagtagcttaccctctctgccgtttttgctccctatcccacctcacttcagcgctcccacccccccgctgctgtgttccccacgctccagacccagcagtgactgtgcgccctcccccaggtatgtgaggagcagcgctgtgaggaggaagtcttccccctggccatgaactacctggatcgctacctgtcttgcgtccccacccgaaaggcgcagttgcagctcctgggtgcggtctgcatgctgctggcctccaagctgcgcgagaccacgcccctgaccatcgaaaaactgtgcatctacaccgaccacgctgtctctccccgccagttgcgggactgggaggtgctggtcctagggaagctcaagtgggacctggctgctgtgattgcacatgatttcctggccttcattctgcaccggctctctctgccccgtgaccgacaggccttggtcaaaaagcatgcccagacctttttggccctctgtgctacagattatacctttgccatgtacccg

SEQ ID NO: 1202 - DNA, 574 bp, Homo sapiens
  source 1..574: mol_type = genomic DNA
aaacacttcgccactgcaggggtggagactggctctgttcggatgccggccgggggggagaggtgcaatcctctcctcgcggctggtggttgcgaccacccccactccccaaaggcaggctccggaggcggcgggacagagcgcctgcgaccccagtcggtgctccggggaggtcacctgacgaggagctccaacctgagcggcaagacccagatggacatgggcacctaggggctttggggcagcactggtttaccacgtgtccctccatatcctgaagatgtaggcctccgtggacacacctgtattcctgagctgtgcatggcctctgtcctggttgcacagaggattggacccacagggcagatgggactgggaggtgctggtcctagggaagctcaagtgggacctggctgctgtgattgcacatgatttcctggccttcattctgcaccggctctctctgccccgtgaccgacaggccttggtcaaaaagcatgcccagacctttttggccctctgtgctacagattatacctttgccatgtacccgccatccatgatcgccacgggc

SEQ ID NO: 1203 - DNA, 2394 bp, Homo sapiens
  source 1..2394: mol_type = genomic DNA
cacaggctagagtgcaatggcgcgatctcggttcactgcaacctccacctcccaggctcaagcgatcctcccgcctcagcctccggagtagctgggattacaggcgggcaccaccacgccccgctagtttttgtatttttagtagagaccgagtttcgccatgttggccaggctggtctcgaacacctaagctcaagcagtccgcggcctcggcctcacaaggtgctgggattacaggcgtgagctaccgcgccagcctcacgtgaccttttgagagtgaagtgttctggggccttcagtggcttggttgtgggccaggaaaacgcgcccggtttcactgagttaaaagaaacctattttaatatgaaaatcggttcttataaagagcataccaggagatcatctacactcgcagggttttccaaacttgtcttattattagtaacacctggctgggcccagcccaatcccagtgacttcactctctggaagaggggcttgggaatctttctcattaaggagctccccagatgattcttctgagcgagtaatgttgggaaaccctggagcatccagcctggtgattttgtgctgagggccgccccgcctgtcaatggcccacttggaagtagagcctggaccacctagtccaagtctatcgctgcatcctgctgccttcgcgccctcgacccgcaagtatttgcgaggtatgtgaggagcagcgctgtgaggaggaagtcttccccctggccatgaactacctggatcgctacctgtcttgcgtccccacccgaaaggcgcagttgcagctcctgggtgcggtctgcatgctgctggcctccaagctgcgcgagaccacgcccctgaccatcgaaaaactgtgcatctacaccgaccacgctgtctctccccgccagttgcgggactgggaggtgctggtcctagggaagctcaagtgggacctggctgctgtgattgcacatgatttcctggccttcattctgcaccggctctctctgccccgtgaccgacaggccttggtcaaaaagcatgcccagacctttttggccctctgtgctacagattatacctttgccatgtacccgccatccatgatcgccacgggcagcattggggctgcagtgcaaggcctgggtgcctgctccatgtccggggatgagctcacagagctgctggcagggatcactggcactgaagtggactgcctgcgggcctgtcaggagcagatcgaagctgcactcagggagagcctcagggaagcctctcagaccagctccagcccagcgcccaaagccccccggggctccagcagccaagggcccagccagaccagcactcctacagatgtcacagccatacacctgtagccctggagaggccctctggagtggccactaagcagaggaggggccgctgccacccacctccctgcctccaggaaccacaccacatctaagcctgaaggggcgtctgttcccccttcacaaagcccaagggatctggtcctacccatccccgcagtgtgcactaaggggcccggccagccatgtctgcatttcggtggctagtcaagctcctcctccctgcatctgaccagcagcgcctttcccaactctagctgggggtgggccaggctgatgggacagaattggatacatacaccagcattccttttgaacgcccccccccacccctgggggctctcatgttttcaactgccaaaatgctctagtgccttctaaaggtgttgtcccttctagggttattgcatttggattggggtccctctaaaatttaatgcatgatagacacatatgagggggaatagtctagatggctcctctcagtactttggaggcccctatgtagtccgtgctgacagctgctcctagagggaggggcctaggcctcagccagagaagctataaattcctctttgctttgctttctgctcagcttctcctgtgtgattgacagctttgctgctgaaggctcattttaatttattaattgctttgagcacaactttaagaggacataatggggtcctggccatcccacaagtggtggtaaccctggtggttgctgttttcctcccttctgctactggcaaaaggatctttgtggccaaggagctgctatagcctggggtggggtcatgccctcctctcccattgtccctctgccccatcctccagcagggaaaatgcagcagggatgccctggaggtggctgagcccctgtctagagagggaggcaagccctgttgacacaggtctttcctaaggctgcaaggtttaggctggtggcccaggaccatcatcctactgtaataaagatgattgtgaaataaaactggctttggcttcttgg

SEQ ID NO: 1204 - DNA, 1948 bp, Homo sapiens
  source 1..1948: mol_type = genomic DNA
agcagccggcgcggccgccagcgcggtgtagggggcaggcgcggatcccgccaccgccgcgcgctcggcccgccgactcccggcgccgccgccgccactgccgtcgccgccgccgcctgccgggactggagcgcgccgtccgccgcggacaagaccctggcctcaggccggagcagccccatcatgccgagggagcgcagggagcgggatgcgaaggagcgggacaccatgaaggaggacggcggcgcggagttctcggctcgctccaggaagaggaaggcaaacgtgaccgtttttttgcaggatccagatgaagaaatggccaaaatcgacaggacggcgagggaccagtgtgggagccagccttgggacaataatgcagtctgtgcagacccctgctccctgatccccacacctgacaaagaagatgatgaccgggtttacccaaactcaacgtgcaagcctcggattattgcaccatccagaggctccccgctgcctgtactgagctgggcaaatagagaggaagtctggaaaatcatgttaaacaaggaaaagacatacttaagggatcagcactttcttgagcaacaccctcttctgcagccaaaaatgcgagcaattcttctggattggttaatggaggtgtgtgaagtctataaacttcacagggagaccttttacttggcacaagatttctttgaccggtatatggcgacacaagaaaatgttgtaaaaactcttttacagcttattgggatttcatctttatttattgcagccaaacttgaggaaatctatcctccaaagttgcaccagtttgcgtatgtgacagatggagcttgttcaggagatgaaattctcaccatggaattaatgattatgaaggcccttaagtggcgtttaagtcccctgactattgtgtcctggctgaatgtatacatgcaggttgcatatctaaatgacttacatgaagtgctactgccgcagtatccccagcaaatctttatacagattgcagagctgttggatctctgtgtcctggatgttgactgccttgaatttccttatggtatacttgctgcttcggccttgtatcatttctcgtcatctgaattgatgcaaaaggtttcagggtatcagtggtgcgacatagagaactgtgtcaagtggatggttccatttgccatggttataagggagacggggagctcaaaactgaagcacttcaggggcgtcgctgatgaagatgcacacaacatacagacccacagagacagcttggatttgctggacaaagcccgagcaaagaaagccatgttgtctgaacaaaatagggcttctcctctccccagtgggctcctcaccccgccacagagcggtaagaagcagagcagcgggccggaaatggcgtgaccaccccatccttctccaccaaagacagttgcgcgcctgctccacgttctcttctgtctgttgcagcggaggcgtgcgtttgcttttacagatatctgaatggaagagtgtttcttccacaacagaagtatttctgtggatggcatcaaacagggcaaagtgttttttattgaatgcttataggttttttttaaataagtgggtcaagtacaccagccacctccagacaccagtgcgtgctcccgatgctgctatggaaggtgctacttgacctaagggactcccacaacaacaaaagcttgaagctgtggagggccacggtggcgtggctctcctcgcaggtgttctgggctccgttgtaccaagtggagcaggtggttgcgggcaagcgttgtgcagagcccatagccagctgggcagggggctgccctctccacattatcagttgacagtgtacaatgcctttgatgaactgttttgtaagtgctgctatatctatccattttttaataaagataatactgtttttgag

SEQ ID NO: 1205 - DNA, 1807 bp, Homo sapiens
  source 1..1807: mol_type = genomic DNA
gcggccgccagcgcggtgtagggggcaggcgcggatcccgccaccgccgcgcgctcggcccgccgactcccggcgccgccgccgccactgccgtcgccgccgccgcctgccgggactggagcgcgccgtccgccgcggacaagaccctggcctcaggccggagcagccccatcatgccgagggagcgcagggagcgggatgcgaaggagcgggacaccatgaaggaggacggcggcgcggagttctcggctcgctccaggaagaggaaggcaaacgtgaccgtttttttgcaggatccagatgaagaaatggccaaaatcgacaggacggcgagggaccagtgtgggagccagccttgggacaataatgcagtctgtgcagacccctgctccctgatccccacacctgacaaagaagatgatgaccgggtttacccaaactcaacgtgcaagcctcggattattgcaccatccagaggctccccgctgcctgtactgagctgggcaaatagagaggaagtctggaaaatcatgttaaacaaggaaaagacatacttaagggatcagcactttcttgagcaacaccctcttctgcagccaaaaatgcgagcaattcttctggattggttaatggaggtgagcttgagtcttcctgaaatctatcctccaaagttgcaccagtttgcgtatgtgacagatggagcttgttcaggagatgaaattctcaccatggaattaatgattatgaaggcccttaagtggcgtttaagtcccctgactattgtgtcctggctgaatgtatacatgcaggttgcatatctaaatgacttacatgaagtgctactgccgcagtatccccagcaaatctttatacagattgcagagctgttggatctctgtgtcctggatgttgactgccttgaatttccttatggtatacttgctgcttcggccttgtatcatttctcgtcatctgaattgatgcaaaaggtttcagggtatcagtggtgcgacatagagaactgtgtcaagtggatggttccatttgccatggttataagggagacggggagctcaaaactgaagcacttcaggggcgtcgctgatgaagatgcacacaacatacagacccacagagacagcttggatttgctggacaaagcccgagcaaagaaagccatgttgtctgaacaaaatagggcttctcctctccccagtgggctcctcaccccgccacagagcggtaagaagcagagcagcgggccggaaatggcgtgaccaccccatccttctccaccaaagacagttgcgcgcctgctccacgttctcttctgtctgttgcagcggaggcgtgcgtttgcttttacagatatctgaatggaagagtgtttcttccacaacagaagtatttctgtggatggcatcaaacagggcaaagtgttttttattgaatgcttataggttttttttaaataagtgggtcaagtacaccagccacctccagacaccagtgcgtgctcccgatgctgctatggaaggtgctacttgacctaagggactcccacaacaacaaaagcttgaagctgtggagggccacggtggcgtggctctcctcgcaggtgttctgggctccgttgtaccaagtggagcaggtggttgcgggcaagcgttgtgcagagcccatagccagctgggcagggggctgccctctccacattatcagttgacagtgtacaatgcctttgatgaactgttttgtaagtgctgctatatctatccattttttaataaagataatactgtttttg

SEQ ID NO: 1206 - DNA, 1777 bp, Homo sapiens
  source 1..1777: mol_type = genomic DNA
gtgctcacccggcccggtgccacccgggtccacagggatgcgaaggagcgggacaccatgaaggaggacggcggcgcggagttctcggctcgctccaggaagaggaaggcaaacgtgaccgtttttttgcaggatccagatgaagaaatggccaaaatcgacaggacggcgagggaccagtgtgggagccagccttgggacaataatgcagtctgtgcagacccctgctccctgatccccacacctgacaaagaagatgatgaccgggtttacccaaactcaacgtgcaagcctcggattattgcaccatccagaggctccccgctgcctgtactgagctgggcaaatagagaggaagtctggaaaatcatgttaaacaaggaaaagacatacttaagggatcagcactttcttgagcaacaccctcttctgcagccaaaaatgcgagcaattcttctggattggttaatggaggtgtgtgaagtctataaacttcacagggagaccttttacttggcacaagatttctttgaccggtatatggcgacacaagaaaatgttgtaaaaactcttttacagcttattgggatttcatctttatttattgcagccaaacttgaggaaatctatcctccaaagttgcaccagtttgcgtatgtgacagatggagcttgttcaggagatgaaattctcaccatggaattaatgattatgaaggcccttaagtggcgtttaagtcccctgactattgtgtcctggctgaatgtatacatgcaggttgcatatctaaatgacttacatgaagtgctactgccgcagtatccccagcaaatctttatacagattgcagagctgttggatctctgtgtcctggatgttgactgccttgaatttccttatggtatacttgctgcttcggccttgtatcatttctcgtcatctgaattgatgcaaaaggtttcagggtatcagtggtgcgacatagagaactgtgtcaagtggatggttccatttgccatggttataagggagacggggagctcaaaactgaagcacttcaggggcgtcgctgatgaagatgcacacaacatacagacccacagagacagcttggatttgctggacaaagcccgagcaaagaaagccatgttgtctgaacaaaatagggcttctcctctccccagtgggctcctcaccccgccacagagcggtaagaagcagagcagcgggccggaaatggcgtgaccaccccatccttctccaccaaagacagttgcgcgcctgctccacgttctcttctgtctgttgcagcggaggcgtgcgtttgcttttacagatatctgaatggaagagtgtttcttccacaacagaagtatttctgtggatggcatcaaacagggcaaagtgttttttattgaatgcttataggttttttttaaataagtgggtcaagtacaccagccacctccagacaccagtgcgtgctcccgatgctgctatggaaggtgctacttgacctaagggactcccacaacaacaaaagcttgaagctgtggagggccacggtggcgtggctctcctcgcaggtgttctgggctccgttgtaccaagtggagcaggtggttgcgggcaagcgttgtgcagagcccatagccagctgggcagggggctgccctctccacattatcagttgacagtgtacaatgcctttgatgaactgttttgtaagtgctgctatatctatccattttttaataaagataatactgtttttgag

SEQ ID NO: 1207 - DNA, 4087 bp, Homo sapiens
  source 1..4087: mol_type = genomic DNA
cgatggggagcggcggcgtggtccactgtaggtgtgccaagtgtttctgttatcctacaaagcgaagaataaggaggaggccccgaaacctgaccatcttgagtctccccgaagatgtgctctttcacatcctgaaatggctttctgtagaggacatcctggccgtccgagctggctgctgaaaaggggaatttcgaagctgctgtgaagctgggcatagcctacctctacaatgaaggcctgtctgtgtctgatgaggcccgcgcagaagtgaatggcctgaaggcctctcgcttcttcagtctcgctgagcggctgaatgtgggtgccgcacctttcatctggctcttcatccgccctccgtggtcggtgagcggaagctgctgcaaggccgtggttcacgagagcctcagggcagagtgccagctgcagaggactcacaaagcatccatattgcactgcttgggcagagtgctgagtctgttcgaggatgaggagaagcagcagcaggcccatgacctgtttgaggaggctgctcatcagggatgtctgaccagctcctacctcctctgggaaagcgacaggaggacagatgtgtcagatcctgggcgatgcctccacagcttccgaaaactcagggactacgctgccaaaggctgctgggaagcgcagctgtctttagccaaagcctgtgcaaatgcaaaccagcttggactggaggtgagagcttccagtgagatcgtctgccagctatttcaggcttcccaggctgtcagtaaacaacaagtcttctccgtgcagaagggactcaatgacacaatgaggtacattctgatcgactggctggtggaagttgccaccatgaaggacttcacaagcctgtgcctgcacctgaccgtggagtgtgtggaccggtacctgcggaggaggctggtgccgcggtacaggctccagctgctgggcatcgcctgcatggtcatctgcacccggtttatcagtaaagagatcctgaccatccgggaggccgtatggctcacggacaacacttacaagtacgaggacctggtgagaatgatgggcgagatcgtctccgccttggaagggaagattcgagtccccactgtggtggattacaaggaggtcctgctgacgctagtccctgtggagctgagaacccagcacctgtgcagcttcctctgcgagctctccctgctgcacaccagcctgtccgcctacgccccagcccgcctggctgccgcagccctgctcctggccagactgacgcacgggcagacacagccctggaccactcagctgtgggacctcaccggattctcctatgaagacctcattccctgcgtcttgagcctccataagaagtgcttccatgatgacgcccccaaggactacaggcaagtctctctgaccgccgtgaagcagcggtttgaggacaagcgctatggagaaatcagccaggaagaggtgctgagctacagccagttgtgtgctgcattaggagtgacacaagacagccccgaccccccgactttcctcagcacaggggagatccacgccttcctcagctctccctcggggcggagaaccaaacggaagcgggagaacagcctccaggaagacagaggcagcttcgttaccacccccactgcggagctgtccagccaggaggagacgctgctgggcagcttcctcgactggagcctggactgctgctctggctatgaaggcgaccaggagagtgagggcgagaaggagggcgacgtgacagctcccagcggcatcctcgatgtcaccgtggtctacctgaacccagaacagcattgctgccaggaatccagtgatgaggaggcttgtccagaggacaagggaccccaggacccacaggcactggcgctggacacccagatccctgcaacccctggacccaaacccctggtccgcaccagccgggagccagggaaggacgtcacgacctcagggtactcctccgtcagcaccgcaagtcccacaagctccgtggacggtggcttgggggccctgccccaacctacctcagtgctgtccctggacagtgactcgcacacacagccctgccaccatcaggccaggaagtcatgtttacagtgtcgtcccccaagtcccccggagagcagtgttccccagcaacaggtgaagcggataaacctatgcatacacagtgaggaggaggacatgaacctgggccttgtgaggctgtaagtgtgtcagcacatttgccgcagtggatgtgtactgagggggctggaggcgaagggtgggagcatagcataggaacgctgcatagaccatggaggcctttgcgcagagagcagagaggatgacttgcggccaccaagtttctgtctccgcgggagtcccgtgcaagccatcagaatgttgaaatgagggtgaagagctcagatccctctctttggaaagtttagcctggaagcagttggccacactgtgtggagggcacctctctgtcccttccgtgtctcactgtctctggaagcttcagcccatgtgtgtcctggtgttcccagccccaccagagccccgtgccgggagctgacagctttcacgcttaaggcacgtgtgacctgggtagtcagacaccacttgagcccctgcccacatctgctggtttggggcttcagtggggagctgacagctgtgagcacaccactgtcccctcatccacctcggcctgcatggggcacccacttccttctgggtggggcttccatggtaagggggcctgcgtccctgcacactgcgaggactgccttggccacaggcccactccctacgacacgtgactcgttttagagctctgtcccagaggcgttcgtatgtgacccacagatggcgtcaatgtgaacacctctctttgtgctgaatttctgggccattcttttcctgtcttatttctaaatttccttcttccaagatgaaaacaaaagaaaaacttaaaacagaaggtattaaaaaaacaagagattcccaccattatttaggttcacctgcaaaacaaaaatcttactccagcccctcaatgccatcctgacacactttatgcaaaaagaattttcccagataggctagccagaaaaaacttcaagtcctctgtaacatctgaggtgaccaagaggcagaagagcagagcagtcgggggccgtgtcctggctgatcccaactgcagctctgctgtgggggcccgtgggagggaggcagacccctgggctttcctgctggccacggagactctgctcctgcatggaaagggagcctgggagccagcagcccacgcctggggagcctgcctggggccatgtgaccatggcctctccctgggaacgggctgaccacaacacaccctgctgccatccacttctgtttactctgcaaatgtaagaaagaaccacttggccagaagtgtcccccagatgcttttttttttttttttttggagacagttttgctcttgtctccccggctggagtgcagtggcatgatctcaactctcaactcactgtaacctccgcctcccggatactcctgcctcagcctcctgggtagctgggattacaagcacccaaccacgcccagctaatttttgtattttcggtagagacgggatttcaccatgttggccaggctagtctcgaactcatgacctcaagtgatccgcccacttcggtctcccaaagtgctgggattacaggcatgagccacggcgcctggcccccaaatgctcttgaaccggaaacccagggatgggagatgctcactgagctgctgcttttatgtgtgctggtgctatgtgtgttcatgtccgcggcagctgtctttttgctactataagggaattctggccaccctgggtggggtgtggtcggggtgagaacccaagcgttggaactgtagacccgtcctgtcgactgtgtgcccctgggcatgtgtgagcctcagtttcctcatctgtaaggggggcaatgatacctacctcacaggggtgttgtgaggattaaatgtgaggaggatagtg

SEQ ID NO: 1208 - DNA, 4258 bp, Homo sapiens
  source 1..4258: mol_type = genomic DNA
gctccggccggggcgcgggcgcgctctcaggcgggctccggcggcagcgacgcgagcgcggcgatggggagcggcggcgtggtccactgtaggtgtgccaagtgtttctgttatcctacaaagcgaagaataaggaggaggccccgaaacctgaccatcttgagtctccccgaagatgtgctctttcacatcctgaaatggctttctgtagaggacatcctggccgtccgagctgtacactcccagctgaaggacctggtggacaaccacgccagtgtgtgggcatgtgccagcttccaggagctgtggccgtctccagggaacctgaagctctttgaaagggctgctgaaaaggggaatttcgaagctgctgtgaagctgggcatagcctacctctacaatgaaggcctgtctgtgtctgatgaggcccgcgcagaagtgaatggcctgaaggcctctcgcttcttcagtctcgctgagcggctgaatgtgggtgccgcacctttcatctggctcttcatccgccctccgtggtcggtgagcggaagctgctgcaaggccgtggttcacgagagcctcagggcagagtgccagctgcagaggactcacaaagcatccatattgcactgcttgggcagagtgctgagtctgttcgaggatgaggagaagcagcagcaggcccatgacctgtttgaggaggctgctcatcagggatgtctgaccagctcctacctcctctgggaaagcgacaggaggacagatgtgtcagatcctgggcgatgcctccacagcttccgaaaactcagggactacgctgccaaaggctgctgggaagcgcagctgtctttagccaaagcctgtgcaaatgcaaaccagcttggactggaggtgagagcttccagtgagatcgtctgccagctatttcaggcttcccaggctgtcagtaaacaacaagtcttctccgtgcagaagggactcaatgacacaatgaggtacattctgatcgactggctggtggaagttgccaccatgaaggacttcacaagcctgtgcctgcacctgaccgtggagtgtgtggaccggtacctgcggaggaggctggtgccgcggtacaggctccagctgctgggcatcgcctgcatggtcatctgcacccggtttatcagtaaagagatcctgaccatccgggaggccgtatggctcacggacaacacttacaagtacgaggacctggtgagaatgatgggcgagatcgtctccgccttggaagggaagattcgagtccccactgtggtggattacaaggaggtcctgctgacgctagtccctgtggagctgagaacccagcacctgtgcagcttcctctgcgagctctccctgctgcacaccagcctgtccgcctacgccccagcccgcctggctgccgcagccctgctcctggccagactgacgcacgggcagacacagccctggaccactcagctgtgggacctcaccggattctcctatgaagacctcattccctgcgtcttgagcctccataagaagtgcttccatgatgacgcccccaaggactacaggcaagtctctctgaccgccgtgaagcagcggtttgaggacaagcgctatggagaaatcagccaggaagaggtgctgagctacagccagttgtgtgctgcattaggagtgacacaagacagccccgaccccccgactttcctcagcacaggggagatccacgccttcctcagctctccctcggggcggagaaccaaacggaagcgggagaacagcctccaggaagacagaggcagcttcgttaccacccccactgcggagctgtccagccaggaggagacgctgctgggcagcttcctcgactggagcctggactgctgctctggctatgaaggcgaccaggagagtgagggcgagaaggagggcgacgtgacagctcccagcggcatcctcgatgtcaccgtggtctacctgaacccagaacagcattgctgccaggaatccagtgatgaggaggcttgtccagaggacaagggaccccaggacccacaggcactggcgctggacacccagatccctgcaacccctggacccaaacccctggtccgcaccagccgggagccagggaaggacgtcacgacctcagggtactcctccgtcagcaccgcaagtcccacaagctccgtggacggtggcttgggggccctgccccaacctacctcagtgctgtccctggacagtgactcgcacacacagccctgccaccatcaggccaggaagtcatgtttacagtgtcgtcccccaagtcccccggagagcagtgttccccagcaacaggtgaagcggataaacctatgcatacacagtgaggaggaggacatgaacctgggccttgtgaggctgtaagtgtgtcagcacatttgccgcagtggatgtgtactgagggggctggaggcgaagggtgggagcatagcataggaacgctgcatagaccatggaggcctttgcgcagagagcagagaggatgacttgcggccaccaagtttctgtctccgcgggagtcccgtgcaagccatcagaatgttgaaatgagggtgaagagctcagatccctctctttggaaagtttagcctggaagcagttggccacactgtgtggagggcacctctctgtcccttccgtgtctcactgtctctggaagcttcagcccatgtgtgtcctggtgttcccagccccaccagagccccgtgccgggagctgacagctttcacgcttaaggcacgtgtgacctgggtagtcagacaccacttgagcccctgcccacatctgctggtttggggcttcagtggggagctgacagctgtgagcacaccactgtcccctcatccacctcggcctgcatggggcacccacttccttctgggtggggcttccatggtaagggggcctgcgtccctgcacactgcgaggactgccttggccacaggcccactccctacgacacgtgactcgttttagagctctgtcccagaggcgttcgtatgtgacccacagatggcgtcaatgtgaacacctctctttgtgctgaatttctgggccattcttttcctgtcttatttctaaatttccttcttccaagatgaaaacaaaagaaaaacttaaaacagaaggtattaaaaaaacaagagattcccaccattatttaggttcacctgcaaaacaaaaatcttactccagcccctcaatgccatcctgacacactttatgcaaaaagaattttcccagataggctagccagaaaaaacttcaagtcctctgtaacatctgaggtgaccaagaggcagaagagcagagcagtcgggggccgtgtcctggctgatcccaactgcagctctgctgtgggggcccgtgggagggaggcagacccctgggctttcctgctggccacggagactctgctcctgcatggaaagggagcctgggagccagcagcccacgcctggggagcctgcctggggccatgtgaccatggcctctccctgggaacgggctgaccacaacacaccctgctgccatccacttctgtttactctgcaaatgtaagaaagaaccacttggccagaagtgtcccccagatgcttttttttttttttttttggagacagttttgctcttgtctccccggctggagtgcagtggcatgatctcaactctcaactcactgtaacctccgcctcccggatactcctgcctcagcctcctgggtagctgggattacaagcacccaaccacgcccagctaatttttgtattttcggtagagacgggatttcaccatgttggccaggctagtctcgaactcatgacctcaagtgatccgcccacttcggtctcccaaagtgctgggattacaggcatgagccacggcgcctggcccccaaatgctcttgaaccggaaacccagggatgggagatgctcactgagctgctgcttttatgtgtgctggtgctatgtgtgttcatgtccgcggcagctgtctttttgctactataagggaattctggccaccctgggtggggtgtggtcggggtgagaacccaagcgttggaactgtagacccgtcctgtcgactgtgtgcccctgggcatgtgtgagcctcagtttcctcatctgtaaggggggcaatgatacctacctcacaggggtgttgtgaggattaaatgtgaggaggatagtggca

SEQ ID NO: 1209 - DNA, 2458 bp, Homo sapiens
  source 1..2458: mol_type = genomic DNA
agggcaggcgcggccccttcggctccgagctgaccctgatcagggccgagttgtctcggcggcgctgccgaggcctccacccaggacagtccccctccccgggcctctctcctcttgcctacgagtcccctctcctcgtaggcctctcggatctgatatcgtggggtgaggtgagcaggcccggggagggtggttaccgctgaggagctgcagtctctgtcaagatgatagaggtactgacaacaactgactctcagaaactgctacaccagctgaatgccctgttggaacaggagtctagatgtcagccaaaggtctgtggtttgagactaattgagtctgcacacgataatggcctcagaatgactgcaagactaagggactttgaagtaaaagatcttcttagtctaactcagttctttggctttgacacagagacattttctctagctgtgaatttactggacagattcctgtctaaaatgaaggtacagcccaagcaccttgggtgtgttggactgagctgcttttatttggctgtaaaatcaatagaagaggaaaggaatgtcccattggcaactgacttgatccgaataagtcaatataggtttacggtttcagacttgatgagaatggaaaagattgtattggagaaggtgtgttggaaagtcaaagctactactgcctttcaatttctgcaactgtattattcactccttcaagagaacttgccacttgaaaggagaaatagcattaattttgaaagactagaagctcaactgaaggcatgtcattgcaggatcatattttctaaagcaaagccttctgtgttggcattgtctatcattgcattagagatccaagcacagaagtgtgtagagttaacagaaggaatagaatgtcttcagaaacattccaagataaatggcagagatctgaccttctggcaagagcttgtatccaaatgtttaactgaatattcatcaaataagtgttccaaaccaaatgttcagaagttgaaatggattgtttctgggcgtactgcacggcaattgaagcatagctactacagaataactcaccttccaacaattcctgaaatggtcccttaactggattattacagcaccaaaaaacttctctgaagcctttctccacaaccttgttctatggattccataatgttacaatggatttaagctatgaagcctcaaaacatcacgagataagcatgatggtctcagacttgggaaaactgcctaatattatgctgtagtggaattatgtttagatttgaattcatctgtgaagcattcaaatcaaagctaaaagcctaaatgtgaaatgctaatgacaagcctgagaaggtaaactgtgaatcttcatttctatcattgatctaactttagatattggatcaatatatttaggtggtattgaaaatgctattggaggagtcacactaatactatcaactatcagtcttcccacagcttcaatcactgtcattattctaatcctactcctacttaaattttaagttatgaggtttatgtcaaaagcaacatttcacaaatgtacttttaaggcataataagggttaacattctaggcagtataaacacaccccataatgcaagtaataggtaatctagagatgtggactttattgctatatgggaattacatttaaatttgagggcattttatataaagaaaaatacagacctataaagtttggcatattcattaagttatcttttaatatttttttctagaaaacaggtgacatttgtatctacgataaaaatttttatacagaacctactgcctcaaactgaatcccatcaagaaaactagtttctattgtattagtaactcaaaataaattatcacttcgaaaacttgctttcccacactaaggtaagttcagactagattgaacactccagaattttttactacagactgtttttaagttagaagtgatggcaattttataaatagagaatatacttccactgatgcccttactgtgccaaaacaaaaatcttaagaaaagcaagtagacaccttcataactatgaatgaagctgctgaagtagtgtttaggatcctccatggcagttagtgaatgtaagaagtacagtgttaaagtgttgtaaacagttactcagtgcaatgtatagcctgagtctatccatgatggctatatccaatttgacatcacgttatggatcagtacacaatgaaaaaccaaagaaccacagtatatcttattcttaacttttgtaaaccatgttttatgggtaactttttagttttcccaaaaggctgataaatttcaatattttgaatacatcattgttaattttgagttggcagaggtaaactaaccaactaccattatgttttagtactaagggatatacctttcaataaagttaatgaaattcaa

SEQ ID NO: 1210 - DNA, 2366 bp, Homo sapiens
  source 1..2366: mol_type = genomic DNA
attcctcgttagggcaggcgcggccccttcggctccgagctgaccctgatcagggccgagttgtctcggcggcgctgccgaggcctccacccagggagggtggttaccgctgaggagctgcagtctctgtcaagatgatagaggtactgacaacaactgactctcagaaactgctacaccagctgaatgccctgttggaacaggagtctagatgtcagccaaaggtctgtggtttgagactaattgagtctgcacacgataatggcctcagaatgactgcaagactaagggactttgaagtaaaagatcttcttagtctaactcagttctttggctttgacacagagacattttctctagctgtgaatttactggacagattcctgtctaaaatgaaggtacagcccaagcaccttgggtgtgttggactgagctgcttttatttggctgtaaaatcaatagaagaggaaaggaatgtcccattggcaactgacttgatccgaataagtcaatataggtttacggtttcagacttgatgagaatggaaaagattgtattggagaaggtgtgttggaaagtcaaagctactactgcctttcaatttctgcaactgtattattcactccttcaagagaacttgccacttgaaaggagaaatagcattaattttgaaagactagaagctcaactgaaggcatgtcattgcaggatcatattttctaaagcaaagccttctgtgttggcattgtctatcattgcattagagatccaagcacagaagtgtgtagagttaacagaaggaatagaatgtcttcagaaacattccaagataaatggcagagatctgaccttctggcaagagcttgtatccaaatgtttaactgaatattcatcaaataagtgttccaaaccaaatgttcagaagttgaaatggattgtttctgggcgtactgcacggcaattgaagcatagctactacagaataactcaccttccaacaattcctgaaatggtcccttaactggattattacagcaccaaaaaacttctctgaagcctttctccacaaccttgttctatggattccataatgttacaatggatttaagctatgaagcctcaaaacatcacgagataagcatgatggtctcagacttgggaaaactgcctaatattatgctgtagtggaattatgtttagatttgaattcatctgtgaagcattcaaatcaaagctaaaagcctaaatgtgaaatgctaatgacaagcctgagaaggtaaactgtgaatcttcatttctatcattgatctaactttagatattggatcaatatatttaggtggtattgaaaatgctattggaggagtcacactaatactatcaactatcagtcttcccacagcttcaatcactgtcattattctaatcctactcctacttaaattttaagttatgaggtttatgtcaaaagcaacatttcacaaatgtacttttaaggcataataagggttaacattctaggcagtataaacacaccccataatgcaagtaataggtaatctagagatgtggactttattgctatatgggaattacatttaaatttgagggcattttatataaagaaaaatacagacctataaagtttggcatattcattaagttatcttttaatatttttttctagaaaacaggtgacatttgtatctacgataaaaatttttatacagaacctactgcctcaaactgaatcccatcaagaaaactagtttctattgtattagtaactcaaaataaattatcacttcgaaaacttgctttcccacactaaggtaagttcagactagattgaacactccagaattttttactacagactgtttttaagttagaagtgatggcaattttataaatagagaatatacttccactgatgcccttactgtgccaaaacaaaaatcttaagaaaagcaagtagacaccttcataactatgaatgaagctgctgaagtagtgtttaggatcctccatggcagttagtgaatgtaagaagtacagtgttaaagtgttgtaaacagttactcagtgcaatgtatagcctgagtctatccatgatggctatatccaatttgacatcacgttatggatcagtacacaatgaaaaaccaaagaaccacagtatatcttattcttaacttttgtaaaccatgttttatgggtaactttttagttttcccaaaaggctgataaatttcaatattttgaatacatcattgttaattttgagttggcagaggtaaactaaccaactaccattatgttttagtactaagggatatacctttcaataaagttaatgaaattc

SEQ ID NO: 1211 - DNA, 564 bp, Homo sapiens
  source 1..564: mol_type = genomic DNA
cccttcggctccgagctgaccctgatcagggccgagttgtctcggcggcgctgccgaggcctccacccaggacagtccccctccccgggcctctctcctcttgcctacgagtcccctctcctcgtaggcctctcggatctgatatcgtggggtgagatgatagaggtactgacaacaactgactctcagaaactgctacaccagctgaatgccctgttggaacaggagtctagatgtcagccaaaggtctgtggtttgagactaattgagtctgcacacgataatggcctcagaatgactgcaagactaagggactttgaagtaaaagatcttcttagtctaactcagttctttggctttgacacagagacattttctctagctgtgaatttactggacagattcctgtctaaaatgaaggtacagcccaagcaccttgggtgtgttggactgagctgcttttatttggctgtaaaatcaatagaagaggaaaggaatgtcccattggcaactgacttgatccgaataagtcaatataggtttacggtttcagacttgatgaga

SEQ ID NO: 1212 - DNA, 564 bp, Homo sapiens; identical to SEQ ID NO: 1211
  source 1..564: mol_type = genomic DNA

SEQ ID NO: 1213 - DNA, 994 bp, Homo sapiens
  source 1..994: mol_type = genomic DNA
ccctgatcagggccgagttgtctcggcggcgctgccgaggcctccacccaggacagtccccctccccgggcctctctcctcttgcctacgagtcccctctcctcgtaggcctctcggatctgatatcgtggggtgaggtgagcaggcccggggagggtggttaccgctgaggagctgcagtctctgtcaagatgatagaggtactgacaacaactgactctcagaaactgctacaccagctgaatgccctgttggaacaggagtctagatgtcagccaaagacttgatgagaatggaaaagattgtattggagaaggtgtgttggaaagtcaaagctactactgcctttcaatttctgcaactgtattattcactccttcaagagaacttgccacttgaaaggagaaatagcattaattttgaaagactagaagctcaactgaaggcatgtcattgcaggatcatattttctaaagcaaagccttctgtgttggcattgtctatcattgcattagagatccaagcacagaagtgtgtagagttaacagaaggaatagaatgtcttcagaaacattccaagataaatggcagagatctgaccttctggcaagagcttgtatccaaatgtttaactgaatattcatcaaataagtgttccaaaccaaatgttcagaagttgaaatggattgtttctgggcgtactgcacggcaattgaagcatagctactacagaataactcaccttccaacaattcctgaaatggtcccttaactggattattacagcaccaaaaaacttctctgaagcctttctccacaaccttgttctatggattccataatgttacaatggatttaagctatgaagcctcaaaacatcacgagataagcatgatggtctcagacttgggaaaactgcctaatattatgctgtagtggaattatgtttagatttgaattcatctgtgaagcattcaaatcaaagctaaaagcc

SEQ ID NO: 1214 - DNA, 418 bp, Homo sapiens
  source 1..418: mol_type = genomic DNA
gagctgaccctgatcagggccgagttgtctcggcggcgctgccgaggcctccacccaggacagtctctgtcaagatgatagaggtactgacaacaactgactctcagaaactgctacaccagctgaatgccctgttggaacaggagtctagatgtcagccaaaggtctgtggtttgagactaattgagtctgcacacgataatggcctcagaatgactgcaagactaagggactttgaagtaaaagatcttcttagtctaactcagttctttggctttgacacagagacattttctctagctgtgaatttactggacagattcctgtctaaaatgaaggtacagcccaagcaccttgggtgtgttggactgagctgcttttatttggctgtaaaatcaatagaagaggaaaggaatgt

SEQ ID NO: 1215 - DNA, 1143 bp, Homo sapiens
  source 1..1143: mol_type = genomic DNA
ccccttcggctccgagctgaccctgatcagggccgagttgtctcggcggcgctgccgaggcctccacccagggagggtggttaccgctgaggagctgcagtctctgtcaaggtacagcccaagcaccttgggtgtgttggactgagctgcttttatttggctgtaaaatcaatagaagaggaaaggaatgtcccattggcaactgacttgatccgaataagtcaatataggtttacggtttcagacttgatgagaatggaaaagattgtattggagaaggtgtgttggaaagtcaaagctactactgcctttcaatttctgcaactgtattattcactccttcaagagaacttgccacttgaaaggagaaatagcattaattttgaaagactagaagctcaactgaaggcatgtcattgcaggatcatattttctaaagcaaagccttctgtgttggcattgtctatcattgcattagagatccaagcacagaagtgtgtagagttaacagaaggaatagaatgtcttcagaaacattccaagataaatggcagagatctgaccttctggcaagagcttgtatccaaatgtttaactgaatattcatcaaataagtgttccaaaccaaatgttcagaagttgaaatggattgtttctgggcgtactgcacggcaattgaagcatagctactacagaataactcaccttccaacaattcctgaaatggtcccttaactggattattacagcaccaaaaaacttctctgaagcctttctccacaaccttgttctatggattccataatgttacaatggatttaagctatgaagcctcaaaacatcacgagataagcatgatggtctcagacttgggaaaactgcctaatattatgctgtagtggaattatgtttagatttgaattcatctgtgaagcattcaaatcaaagctaaaagcctaaatgtgaaatgctaatgacaagcctgagaaggtaaactgtgaatcttcatttctatcattgatctaactttagatattggatcaatatatttaggtggtattgaaaatgctattggaggagtcacactaatactatcaactatcagtcttcccacagcttcaatcactgtcattattctaatcc

SEQ ID NO: 1216 - DNA, 919 bp, Homo sapiens
  source 1..919: mol_type = genomic DNA
atattcctcgttagggcaggcgcggccccttcggctccgagctgaccctgatcagggccgagttgtctcggcggcgctgccgaggcctccacccaggacagtccccctccccgggcctctctcctcttgcctacgagtcccctctcctcgtaggcctctcggatctgatatcgtggggtgaggtgagcaggcccggggagggtggttaccgctgaggagctgcagtctctgtcaaggtacagcccaagcaccttgggtgtgttggactgagctgcttttatttggctgtaaaatcaatagaagaggaaaggaatgtcccattggcaactgacttgatccgaataagtcaatataggtttacggtttcagacttgatgagaatggaaaagattgtattggagaaggtgtgttggaaagtcaaagctactactgcctttcaatttctgcaactgtattattcactccttcaagagaacttgccacttgaaaggagaaatagcattaattttgaaagactagaagctcaactgaaggcatgtcattgcaggatcatattttctaaagcaaagccttctgtgttggcattgtctatcattgcattagagatccaagcacagaagtgtgtagagttaacagaaggaatagaatgtcttcagaaacattccaagataaatggcagagatctgaccttctggcaagagcttgtatccaaatgtttaactgaatattcatcaaataagtgttccaaaccaaatgttcagaagttgaaatggattgtttctgggcgtactgcacggcaattgaagcatagctactacagaataactcaccttccaacaattcctgaaatggtcccttaactggattattacagcaccaaaaaacttctctgaagcctttctccacaaccttgttctat

SEQ ID NO: 1217 - DNA, 2796 bp, Homo sapiens
  source 1..2796: mol_type = genomic DNA
ggccccttcggctccgagctgaccctgatcagggccgagttgtctcggcggcgctgccgaggcctccacccagggagggtggttaccgctgaggagctgcagtctctgtcaagatgatagaggtactgacaacaactgactctcagaaactgctacaccagctgaatgccctgttggaacaggagtctagatgtcagccaaagagacattttctctagctgtgaatttactggacagattcctgtctaaaatgaaggtacagcccaagcaccttgggtgtgttggactgagctgcttttatttggctgtaaaatcaatagaagaggaaaggaatgtcccattggcaactgacttgatccgaataagtcaatataggtttacggtttcagacttgatgagaatggaaaagattgtattggagaaggtgtgttggaaagtcaaagctactactgcctttcaatttctgcaactgtattattcactccttcaagagaacttgccacttgaaaggagaaatagcattaattttgaaagactagaagctcaactgaaggcatgtcattgcaggatcatattttctaaagcaaagccttctgtgttggcattgtctatcattgcattagagatccaagcacagaagtgtgtagagttaacagaaggaatagaatgtcttcagaaacattccaagataaatggcagagatctgaccttctggcaagagcttgtatccaaatgtttaactgaatattcatcaaataagtgttccaaaccaaatgttcagaagttgaaatggattgtttctgggcgtactgcacggcaattgaagcatagctactacagaataactcaccttccaacaattcctgaaatggtcccttaactggattattacagcaccaaaaaacttctctgaagcctttctccacaaccttgttctatggattccataatgttacaatggatttaagctatgaagcctcaaaacatcacgagataagcatgatggtctcagacttgggaaaactgcctaatattatgctgtagtggaattatgtttagatttgaattcatctgtgaagcattcaaatcaaagctaaaagcctaaatgtgaaatgctaatgacaagcctgagaagaaaacaggtgacatttgtatctacgataaaaatttttatacagaacctactgcctcaaactgaatcccatcaagaaaactagtttctattgtattagtaactcaaaataaattatcacttcgaaaacttgctttcccacactaagaaaccaaaaaacagtaaacatgagtcaagatgaattaaaagataagccaatttttaaggccgagcgcagtggctcacacctgtaatcccagcactttgggaggccaaggtggacggatcacttgaggccaggagttcgagaccagcatggccaacatggtgaaaccccatctctactaaaaatacaaaaatcagctgggtgtggtggcgcatgcctgtagtaccagttactccagagactgaggcaggagaattgcttgaacctgtgaggcagtgagacaagatcacaccactgctctccaacctgggcaacagagtgaggctcttgtctcaaaaaataaattaaaaagccatttttatattcatcaaagtagagttaggaacaaccaaaattgccaaggataattagggacattatataatgataaaattcaccaagacagtgctaaaagtgtaagcacttattatcagatcttaaaaatacatgaagagaccaggtacagagactcattcattcctgtaattccaatgctttgggaagccaaggtgggaggattgcttgaggccaagagttcaagaccagcctactcaacatagggagaccctatctctacaaaaaatcaaaaattagctaggcatagtgatatacatctgtagtcctaggtactgaggagcctgaggtgggaagactgtctgagcccaggagtttgaggctgcagtgaagcatgacagagttgctatgctccagcctgagtgacagggtaagactcaaaaaaaaaaaaaaaaacatgaagcaaaaagtggtagcattaaaaggaggactggacaaatcttcatttacagttggaaacttaaacattcctctctcagtagtccatagaattaatagaaaattagcaaagatgtaggaaaatggaataatactaataaccagctagatttaattgacataaaacccttctacctaaaacagcagaataagcattcttttcaagtacacatggaacactcaccaagataaaccacatcatgggtcttaaaccttaacaaatttaaaagagatgaaatcatataaaatatgttttttgaccataatctagaaatcagtaacagcaagaaaatctccaaacacttggaaattaaacaacacatttctaaataactcatgatactacagggaagtcttaaaaaatattttaaaataaatgaaaatatcaccgtgcttggaatgcagccatgctggtgctgcaatttataacaatcgactgctttttactaaacaagaaaaagttctcaaattaacactctaagctcccactttaagaaagtaggaaaatctaactgggtgtggtggcacaccactatagtcccagccactcagaaggctgaggtaggaggatcatgaccccacgagtttgaggctgcagtgagctatgatcataacactactccagtctgggtgatgaagtgagacctgtctacaaaaaaaagaagcccaaactaaacctaaagcaagc

SEQ ID NO: 1218 - DNA, 5526 bp, Homo sapiens
  source 1..5526: mol_type = genomic DNA
aagtgcaggatccctccgcggggagtcacgtgccccgcccccttgggggcgtcgaaactcttaacaaaaacaaggggctcggggaggtttccgctgaggcggcgggggtgcggcggtgggctggtcttccgcggccggcgttgcgccgcggcggagggtgggcgcgcggggagcgggatggagccggggctgtgaggccgaggcggcggtgcctgggaggaagggtcggatgccggaccgggggcaccgctgaggcggtgggtccccgacctgcgagacaggtttggaagcccccgctgcgcccagtccgtgcggaccgcgaggccgcgggcgggtggaggcgcgtctccggcacgatgaaggatttgggggcagagcacttggcaggtcatgaaggggtccaacttctcgggttgttgaacgtctacctggaacaagaagagagattccaacctcgagaaaaagggctgagtttgattgaggctaccccggagaatgataacactttgtgtccaggattgagaaatgccaaagttgaagatttaaggagtttagccaacttttttggatcttgcactgaaacttttgtcctggctgtcaatattttggacaggttcttggctcttatgaaggtgaaacctaaacatttgtcttgcattggagtctgttcttttttgctggctgctagaatagttgaagaagactgcaatattccatccactcatgatgtgatccggattagtcagtgtaaatgtactgcttctgacataaaacggatggaaaaaataatttcagaaaaattgcactatgaattggaagctactactgccttaaactttttgcacttataccatactattatactttgtcatacttcagaaaggaaagaaatactgagccttgataaactagaagctcagctgaaagcttgcaactgccgactcatcttttcaaaagcaaaaccatctgtattagccttgtgccttctcaatttggaagtggaaactttgaaatctgttgaattactggaaattctcttgctagttaaaaaacattccaagattaatgacactgagttcttctactggagagagttggtttctaaatgcctagccgagtattcttctcctgaatgttgcaaaccagatcttaagaagttggtttggatcgtttcaaggcgcacagcccagaacctccacaacagctactatagtgttcctgagctgccaacgatacctgaggggggttgttttgatgaaagtgaaagtgaggactcttgtgaagatatgagttgtggagaggagagtctcagcagctctcctcccagtgatcaagagtgcaccttctttttcaacttcaaagtggcacaaacactgtgctttccatcttagaaatctgattgttctgtcagaatttatatttacaggtttcaaagcaataaatgggggaataggtagtttcctggtttagcccccatctagtcaggaattaatatactggaatacctaccttctatttgttattcagatcagatctggcctattttcatatttatcctaagccatcaaatggggtagtgcctcttaaaccattaacagtactttagacattggcactttatttttctcgtagatctttagctactttggggaggagggaaggtgctgataccttcaatttgttacttttcaagatttttaaaaataactagtgtagcttatcttaaacattttataaaaccttcagatgtctttaagcagattggaagtatgcaagtgcttccttagcagggacagtggataatccttaatggtttatcatagatttcaccctccccccttctcagaagagtgagtatgctcttaaatgtcaaacacatttttgttgttttgttttttaaatgatcagtgtctatttgatgtgatgcagatcttataaatttgggaattataatattgacatttctgtgatttttatatatgtaatgtcttaattgagatttctgttaaggcagaaataattaggctagggctcttagttttcattcctattgcccaagtattgtcaaactatggtattattttaatgttactttaaaaatccataatctgctagttttgcatgtacttatatgaaaacagtgcagtaagttgaaaactcagtatctatggaattgataaatgttgatctggtgtagtatattttatcgcattttcttatattaaaaaatgtctgcatgattacattttatttcctttgtaatttacatttcagaatagtgtattgctatatgggtgccaagattgaatatgaagaacccgagtgtttgtagtattatagttttaagcaaatctgtgtggtgatacagccataagaatggggcttatataaactctgtacatgtaagattttgtacagagaatttttaactttataaattgtatatgaacatgtaaatcttttaaaatgtacataaaatactgtatttttttaccttgtgtgtgatagtctagtcattgcatgtaaatataatttattatgtattctgtagtataaatcatacattgatgacttacatttttactggtaagtcaacatccgttggatgttttctgaagtggctctttttgaagtgataatagattgtaattcaaaataaaattattaatgaattctccttgtttgggatcacatcttaatttttaatctgttaaaagttcttgatgtattttaatgagaagactttaggtgaggctacagtgattccagagtgagccttctaactggctagcagaagttctctaggtttggcatctgtgccttggagatactgaaagagaatctgtcatttgacaattgacctctttgtgggatggactcattaagtatgctctcagagactggtatattaccagaatgcctattaattttcagtgagaggcaacaggtattaagtagaacagaatgctcaggttggcagattagaacgatctttcaggagacaaagcaagttttaatcagttgtttggttaataagtatggggtgttcgctgtgatagggccccgccagcttctggctcttgtggacctcaaaagtatcaggtggttttgcaagtggtggtcctttcccctgccccaccccaataggttccccatctgtctagtttgatttttgtagacctttgttttctctagttagaaaatcaggtacactgaatatggttttcatgtaacacctcttctctggagataggggtatgttttcctacccttctagtggagaatcctacttgaggatgacctttcctctcttactaaataatattagtaaatagtgggcaatatattctgctttcagattttgatttgttgagatgtaaaagttgtttggggcttaccaaatctcaagactctctttagctcctgcaggattgtattgcttttcttactggatatttttcctgggtaagcatctttgtggcttcatctcttccccctgtggttttcagtgtatttagtcgagacctctctgctgagcttgcaacctgtttattcacatggcctgccatgccacttggaggtttctgattactcccaaacctgctggttctttatgtctttctcagcgaataattccatctattcatgttggaaacttaggtgatatgctcatctccttttgcctgtttatggaggtcaccagcctctatcatttgtatgatttcgtttacactgtttatatctctctgtcccccctttttctgccattggcatggtttagacctgtactctttatcagcagaggtactgtaatatatttgtgatccctcagcttccaggcttactcctggtctctgccttcctatctacatatccttttaaaataaaattttaactatctcctgaaaaattgttgagtaggtcacgcacaatcaggagaaaaatctattcatgacatacaagtctctgtctaatctgaacactgcacctgtctctggcctttttttcttgtcatttcctagaccttaaaaaatgtgtattgagaaagaactctgttagctatacagaagatgaactgggcaatatagagtagcagcatggagaccagtctgactgaactaaggcagtggaagtgtggatgaggaagagaggtgaaaattgagaagcgctatcctttctctttgggcattattaggaggctcacagacaagtccaggagcctggttataccctcctgtgccattcaaccaggtggctttcccatgactgtgatgaataaaattgagaagcccctgcccttttcagagcagagggtgaggagaaagctaccattttgtcctcatccttacccccgttgacttggcgagagatttgacctttcaggttttgatcctgtcattttctaggatgtggtgcacgcactttgctgttgcgcatggtgaagtattgtgcctaggtcctgggtcttcatctgtttggctctgctactgtttcctcctcccaggaagtgtggttagacaaataatgtgttttaattacctgtcacactcaggattaatacatactcaggttaactgtagagaggcattggcttcagaacactcctcgtgacaattttaaccattttctttgtctagagtctgcctttttcttttttacaatttcttttatttcaacactaggtttcaatatggtgttcctgctacctcccacctccctcctccctcatcacacatgcaaattgtcagcttattgagacaacccacttagattcatatatggacaaggacaaggtattttgcatttgttactggaattcagttttcctaactatttactaccagaaatggtcaataacttactttgtgtttagcaaatcaaattgtgtgatagatagtttcccagtatgatggccagtcagtctttccatccctgtgcctacatgctgctcttcccgtccacaagtggagtctgtttctcttgagttttggctggccttatgaatggctttgcttactgaagtgcagcagaagaaatttagtatatgtccaagcctaggctttaagagactggcagctttccttttatcctttttggaagctagccaccatgctgcaaagaagctcagctggattactgaaagatgagaggccatgtggagagagactcttgaggatgagagattatcttggatgttccagccttaagctcccagctgaatgtgggtgtatcctcagctacaccacagaaaacagaggaactactcagtcgatcccaatcaacccacagactcactagaaataacaaattattgttttaagccacgaggttttgggggagggttgttaaacagtaatagataagtgagacagattgcttgttatttatggtcaaatggtgattatctctggtgagattacaggtgatgttttttttaagttatgcctatctgtagtttcctttttttcctaaaattgatttgaattattagtgtattaacagaataaagaatgaactttaaaacac

SEQ ID NO: 1219 - DNA, 1338 bp, Homo sapiens
  source 1..1338: mol_type = genomic DNA
gaaactcttaacaaaaacaaggggctcggggaggtttccgctgaggcggcgggggtgcggcggtgggctggtcttccgcggccggcgttgcgccgcggcggagggtgggcgcgcggggagcgggatggagccggggctgtgaggccgaggcggcggtgcctgggaggaagggtcggatgccggaccgggggcaccgctgaggcggtgggtccccgacctgcgagacaggtttggaagcccccgctgcgcccagtccgtgcggaccgcgaggccgcgggcgggtggaggcgcgtctccggcacgatgaaggatttgggggcagagcacttggcaggtcatgaaggggtccaacttctcgggttgttgaacgtctacctggaacaagaagagagattccaacctcgagaaaaagggctgagtttgattgaggctaccccggagaatgataacactttgtgtccaggattgagaaatgccaaagttgaagatttaaggagtttagccaacttttttggatcttgcactgaaacttttgtcctggctgtcaatattttggacaggttcttggctcttatgaaggtgaaacctaaacatttgtcttgcattggagtctgttcttttttgctggctgctagaatagttgaagaagactgcaatattccatccactcatgatgtgatccggattagtcagtgtaaatgtactgcttctgacataaaacggatggaaaaaataatttcagaaaaattgcactatgaattggaagctactactgccttaaactttttgcacttataccatactattatactttgtcatacttcagaaaggaaagaaatactgagccttgataaactagaagctcagctgaaagcttgcaactgccgactcatcttttcaaaagcaaaaccatctgtattagccttgtgccttctcaatttggaagtggaaactttgaaatctgttgaattactggaaattctcttgctagttaaaaaacattccaagattaatgacactgagttcttctactggagagagttggtttctaaatgcctagccgagtattcttctcctgaatgttgcaaaccagatcttaagaagttggtttggatcgtttcaaggcgcacagcccagaacctccacaacagctactatagtgttcctgagctgccaacgatacctgaggggggttgttttgatgaaagtgaaagctctgttgcccaggctggagtgcagtggcccgatctcagctcattccaacctccacctaccaggttcaagcgattctcatgcctcagcctccggagtagctgggattacagctcctggacctga

SEQ ID NO: 1220 - DNA, 1410 bp, Homo sapiens
  source 1..1410: mol_type = genomic DNA
ggtcttacccagcgctggccggcggacctgaccacggctcctccccctgccacacctccctggccgtggtggggattgccctggggctctggcggacgtgactggtcccttcacccgctccttgtcggggtgtgctggggcgacccttgctggaggtactggcctcagccctttctcccgcttccccacccctcttacccccagattacattctctgtgtggtgtctttactgcagatgaaggatttgggggcagagcacttggcaggtcatgaaggggtccaacttctcgggttgttgaacgtctacctggaacaagaagagagattccaacctcgagaaaaagggctgagtttgattgaggctaccccggagaatgataacactttgtgtccaggattgagaaatgccaaagttgaagatttaaggagtttagccaacttttttggatcttgcactgaaacttttgtcctggctgtcaatattttggacaggttcttggctcttatgaaggtgaaacctaaacatttgtcttgcattggagtctgttcttttttgctggctgctagaatagttgaagaagactgcaatattccatccactcatgatgtgatccggattagtcagtgtaaatgtactgcttctgacataaaacggatggaaaaaataatttcagaaaaattgcactatgaattggaagctactactgccttaaactttttgcacttataccatactattatactttgtcatacttcagaaaggaaagaaatactgagccttgataaactagaagctcagctgaaagcttgcaactgccgactcatcttttcaaaagcaaaaccatctgtattagccttgtgccttctcaatttggaagtggaaactttgaaatctgttgaattactggaaattctcttgctagttaaaaaacattccaagattaatgacactgagttcttctactggagagagttggtttctaaatgcctagccgagtattcttctcctgaatgttgcaaaccagatcttaagaagttggtttggatcgtttcaaggcgcacagcccagaacctccacaacagctactatagtgttcctgagctgccaacgatacctgaggggggttgttttgatgaaagtgaaagtgaggactcttgtgaagatatgagttgtggagaggagagtctcagcagctctcctcccagtgatcaagagtgcaccttctttttcaacttcaaagtggcacaaacactgtgctttccatcttagaaatctgattgttctgtcagaatttatatttacaggtttcaaagcaataaatgggggaataggtagtttcctggtttagcccccatctagtcaggaattaatatactggaatacctaccttctatttgttattcagatc

SEQ ID NO: 1221 - DNA, 1459 bp, Homo sapiens
  source 1..1459: mol_type = genomic DNA
cttaacaaaaacaaggggctcggggaggaagggtcggatgccggaccgggggcaccgctgaggcggtgggtccccgacctgcgagacaggtttggaagcccccgctgcgcccagtccgtgcggaccgcgaggccgcgggcgggtggaggcgcgtctccggcacgatgaaggatttgggggcagagcacttggcaggtcatgaaggggtccaacttctcgggttgttgaacgtctacctggaacaagaagagagattccaacctcgagaaaaagggctgagtttgattgaggctaccccggagaatgataacactttgtgtccaggattgagaaatgccaaagttgaagatttaaggagtttagccaacttttttggatcttgcactgaaacttttgtcctggctgtcaatattttggacaggttcttggctcttatgaaggtgaaacctaaacatttgtcttgcattggagtctgttcttttttgctggctgctagaatagttgaagaagactgcaatattccatccactcatgatgtgatccggattagtcagtgtaaatgtactgcttctgacataaaacggatggaaaaaataatttcagaaaaattgcactatgaattggaagctactactgccttaaactttttgcacttataccatactattatactttgtcatacttcagaaaggaaagaaatactgagccttgataaactagaagctcagctgaaagcttgcaactgccgactcatcttttcaaaagcaaaaccatctgtattagccttgtgccttctcaatttggaagtggaaactttgaaatctgttgaattactggaaattctcttgctagttaaaaaacattccaagattaatgacactgagttcttctactggagagagttggtttctaaatgcctagccgagtattcttctcctgaatgttgcaaaccagatcttaagaagttggtttggatcgtttcaaggcgcacagcccagaacctccacaacagctactatagtgttcctgagctgccaacgatacctgaggggggttgttttgatgaaagtgaaagtgaggactcttgtgaagatatgagttgtggagaggagagtctcagcagctctcctcccagtgatcaagagtgcaccttctttttcaacttcaaagtggcacaaacactgtgctttccatcttagaaatctgattgttctgtcagaatttatatttacaggtttcaaagcaataaatgggggaataggtagtttcctggtttagcccccatctagtcaggaattaatatactggaatacctaccttctatttgttattcagatcagatctggcctattttcatatttatcctaagccatcaaatggggtagtgcctcttaaaccattaacagtactttagacattggcactttatttttctcgtagatctttagctactttgggg

SEQ ID NO: 1222 - DNA, 578 bp, Homo sapiens
  source 1..578: mol_type = genomic DNA
ctggccgtggtggggattgccctggggctctggcggacgtgactggtcccttcacccgctccttgtcggggtgtgctggggcgacccttgctggagatgaaggatttgggggcagagcacttggcaggtcatgaaggggtccaacttctcgggttgttgaacgtctacctggaacaagaagagagattccaacctcgagaaaaagggctgagtttgattgaggctaccccggagaatgataacactttgtgtccaggattgagaaatgccaaagttgaagatttaaggagtttagccaacttttttggatcttgcactgaaacttttgtcctggctgtcaatattttggacaggttcttggctcttatgaaggtgaaacctaaacatttgtcttgcattggagtctgttcttttttgctggctgctagaatagttgaagaagactgcaatattccatccactcatgatgtgatccggattagtcagtgtaaatgtactgcttctgacataaaacggatggaaaaaataatttcagaaaaattgcactatgaattggaagctactactgccttaaactt

SEQ ID NO: 1223 - DNA, 1378 bp, Homo sapiens
  source 1..1378: mol_type = genomic DNA
gggcgccctaacgaacccgggatacggtctgttcctagtccgctccggaaatgcaactgcgtacgggctggccgcgtaatcgtgacgacagcgcgccagcgccggctagccggacgccctaggcttccgcgagatcttcggtgggggtacgggtgttttacgccaggacgctgatgcgtttgggttctcgtctgcagaccctctggacctggtcacgattccataatgtaccacaacagtagtcagaagcggcactggaccttctccagcgaggagcagctggcaagactgcgggctgacgccaaccgcaaattcagatgcaaagccgtggccaacgggaaggttcttccgaatgatccagtctttcttgagcctcatgaagaaatgacactctgcaaatactatgagaaaaggttattggaattctgttcggtgtttaagccagcaatgccaagatctgttgtgggtacggcttgtatgtatttcaaacgtttttatcttaataactcagtaatggaatatcaccccaggataataatgctcacttgtgcatttttggcctgcaaagtagatgaattcaatgtatctagtcctcagtttgttggaaacctccgggagagtcctcttggacaggagaaggcacttgaacagatactggaatatgaactacttcttatacagcaacttaatttccaccttattgtccacaatccttacagaccatttgagggcttcctcatcgacttaaagacccgctatcccatattggagaatccagagattttgaggaaaacagctgatgactttcttaatagaattgcattgacggatgcttaccttttatacacaccttcccaaattgccctgactgccattttatctagtgcctccagggctggaattactatggaaagttatttatcagagagtctgatgctgaaagagaacagaacttgcctgtcacagttactagatataatgaaaagcatgagaaacttagtaaagaagtatgaaccacccagatctgaagaagttgctgttctgaaacagaagttggagcgatgtcattctgctgagcttgcacttaacgtaatcacgaagaagaggaaaggctatgaagatgatgattacgtctcaaagaaatccaaacatgaggaggaagaatggactgatgacgacctggtagaatctctctaaccatttgaagttgatttctcaatgctaactaatcaagagaagtaggaagcatatcaaacgtttaactttatttaaaaagtataatgtgaaaacataaaatatattaaaacttttctattgttttctttccctttcacagtaactttatgtaaaataaaccatcttcaaaagagctagaata

SEQ ID NO: 1224 - DNA, 2391 bp, Homo sapiens
  source 1..2391: mol_type = genomic DNA
gcaaatactatgagaaaaggttattggaattctgttcggtgtttaagccagcaatgccaagatctgttgtgggtacggcttgtatgtatttcaaacgtttttatcttaataactcagtaatggaatatcaccccaggataataatgctcacttgtgcatttttggcctgcaaagtagatgaattcaatgtatctagtcctcagtttgttggaaacctccgggagagtcctcttggacaggagaaggcacttgaacagatactggaatatgaactacttcttatacagcaacttaatttccaccttattgtccacaatccttacagaccatttgagggcttcctcatcgacttaaagacccgctatcccatattggagaatccagagattttgaggaaaacagctgatgactttcttaatagaattgcattgacggatgcttaccttttatacacaccttcccaaattgccctgactgccattttatctagtgcctccagggctggaattactatggaaagttatttatcagagagtctgatgctgaaagagaacagaacttgcctgtcacagttactagatataatgaaaagcatgagaaacttagtaaagaagtatgaaccacccagatctgaagaagttgctgttctgaaacagaagttggagcgatgtcattctgctgagcttgcacttaacgtaatcacgaagaagaggaaaggctatgaagatgatgattacgtctcaaagaaatccaaacatgaggaggtatgttttactccaaagatgaactctaagttatttttgttatacattctggtgtgactatactgttaagatttattctccaagagtacaggcattatagagttgtgggttttttcattttttgcatacttccttacgtacagtactgttgtccattattaaagggatttttctctcttctgtctttatttaatgaagaatccttcctgtgttcatagaaagcagaagcaatatgtatacatactacatttttgctttttttcttattctccaaggatttttcccttacccccttttaaaaaaaattttctatctgtcaagtcaaataagtgaataatcagaggcaaaaggtcacagccataacctttattcctcactggaggagtctggtgagaccatgccaacattactaacagtgaactattacaaaatttcctggtttatcttttgtaatccacatgggtaaaaggaggagaacattttcttaaagggaggtaagaggtaaacaatactggttatgcttcagtgttatccttaccacactttttttccttcttaggaagaatggactgatgacgacctggtagaatctctctaaccatttgaagttgatttctcaatgctaactaatcaagagaagtaggaagcatatcaaacgtttaactttatttaaaaagtataatgtgaaaacataaaatatattaaaacttttctattgttttctttccctttcacagtaactttatgtaaaataaaccatcttcaaaagagctagaatagcacctgttttgaatattcttattccatcgtgactaatatcaaattaaagctgcaactcatttgcctaattttttaagcaaaatatgataggcaaacctatgctttttttaaaaaaggcaccacaaaaaacaaaacttagtagccagctttaaaagtgttaaggaatgtgttttgccctctagaaacctttataaatggctttttgaatgccatcctgatatatttagctatttgtccattactattaaactgcagaaggtatttcaactgttacatggtactgaaagccagtcgtctgggtaatgaatattatttttctttagttacccgaaaacatttccaaatgggtttttaaaaaaaaccagatatatgattttgaatagctgtctacatcaaactcttacgctagtatagataagtaggtagcagcaaattgtatattcagttgtggttgttttttaattttgttttgatgtaaggtcttgctatgttgcccaggctgtctcagactcctaggctctagtgatcctctgcctcagttttctgagtaattgggactacaggcacacatcaccacagccttataattaacctattagatcctataagtgaatccgtgtaagtagattataacagttactaggaattttgcagattaaatatgttagagaaatgtaattcaaattgaaatgagtcaatataaaaatatgaaagcacagactattacagcaaattacttacatatgaatcatggccagctgtatttcactatgtgaccttggtaagttattaaacctctaagtgccagtttcccacactgaaaatggggaagataaaaatgcctact

SEQ ID NO: 1225 - DNA, 1497 bp, Homo sapiens
  source 1..1497: mol_type = genomic DNA
gccctaggcttccgcgagatcttcggtgggggtacgggtgttttacgccaggacgctgatgcgtttgggttctcgtctgcagaccctctggacctggtcacgattccataatgtaccacaacagtagtcagaagcggcactggaccttctccagcgaggagcagctggcaagactgcgggctgacgccaaccgcaaattcagatgcaaagccgtggccaacgggaaggtgaggttttcccaacggttgcccagttgcccggtcactaaattctgagcagctgcgggagctcttctggctcccaggacaatctcgctccgtcgtttctctgcctctgcggcgcggagtgcgtttttctatcaaaataagcgagcaccttgccaggttccgtgggtacaaagacgaacaacgccatccccgtcgtcgaatggcagacaagtaaccagtctttgtaacgtagtgaagaagagagttcttccgaatgatccagtctttcttgagcctcatgaagaaatgacactctgcaaatactatgagaaaaggttattggaattctgttcggtgtttaagccagcaatgccaagatctgttgtgggtacggcttgtatgtatttcaaacgtttttatcttaataactcagtaatggaatatcaccccaggataataatgctcacttgtgcatttttggcctgcaaagtagatgaattcaatgtatctagtcctcagtttgttggaaacctccgggagagtcctcttggacaggagaaggcacttgaacagatactggaatatgaactacttcttatacagcaacttaatttccaccttattgtccacaatccttacagaccatttgagggcttcctcatcgacttaaagacccgctatcccatattggagaatccagagattttgaggaaaacagctgatgactttcttaatagaattgcattgacggatgcttaccttttatacacaccttcccaaattgccctgactgccattttatctagtgcctccagggctggaattactatggaaagttatttatcagagagtctgatgctgaaagagaacagaacttgcctgtcacagttactagatataatgaaaagcatgagaaacttagtaaagaagtatgaaccacccagatctgaagaagttgctgttctgaaacagaagttggagcgatgtcattctgctgagcttgcacttaacgtaatcacgaagaagaggaaaggctatgaagatgatgattacgtctcaaagaaatccaaacatgaggaggaagaatggactgatgacgacctggtagaatctctctaaccatttgaagttgatttctcaatgctaactaatcaagagaagtaggaagcatatcaaacgtttaactttatttaaaaagtataatgtgaaaacataaaatatattaaaacttttctattgttttctttccctttcacagtaactttatgtaaaataaaccatcttcaaaaga

SEQ ID NO: 1226 - DNA, 1433 bp, Homo sapiens
  source 1..1433: mol_type = genomic DNA
agtgagaggccgggggtgtggtagagagaaggagccggccgggtacttaggaccgcgccagcctctgagcccggcctccttcgcactttcgagtgcgcgtttgctgcccgccgcagcccgggcgttgaaggtagtaaagcggccacccggccgcatcatggtgaccccctgtcccaccagcccctcgagccccgccgcccgagcggggaggcgggacaacgaccagaaccttcgcgccccggtgaagaagagcaggcgtccgcgcctccggaggaagcagccgctgcatcccctgaacccgtgcccgctcccgggagactccggcatttgcgacctgttcgagtcccccagctccggctcagacggcgcagagagcccctctgcggcgcggggtggtagccccctgcccggcccggcccagcccgtggcgcagctagatctacagaccttccgcgactacggccagagctgctacgccttccgcaaggcgcaggagagccacttccacccgcgggaggcgctggcacggcagccacaagtgacggcggaatcccgctgtaagctgctcagctggctgatcccggtgcaccgccaattcggcctctccttcgagtcgctgtgcctgacggtgaacactctggaccgcttcctcaccaccacgccggtggctgcagactgcttccagctgcttggggtcacctccttgctcatcgcttgcaaacaggtggaggtgcacccgccgcgcgtgaagcagcttctggccctctgctgcggcgccttctcccggcagcagctctgcaacctcgagtgcatcgtgctgcacaagctgcacttcaccctgggtgcgcccaccattagcttcttcctggagcatttcacgcacgctcgcgtggaggcggggcaggctgaggcctccgaagctctggaagcgcaagccctggcgcggggggtggcagagctgagtctggccgactatgccttcaccagctactccccttccctcctggcgatctgctgcctggcgctggcggaccgcatgctgcgggtctcgcggcccgtggacttgcgactgggagaccacccggaggcggcgctggaggactgtatgggcaagttgcagctgctggtggccataaacagtacttccttgactcacatgctgcccgttcagatctgcgagaagtgcagcctgcccccgagctcgaaataaaacagatccttcgtttccttttagtccctggcccggctgctggacctctcccgtagcctcagaagagtgcagtactggtccacagagaaggcttcaggacctgcttggtcagctgcaggttgtaaatagtgtacgatactagcatctggtattttatttattttgcagcgagcacatgaggaagctgagtctttcaccaataaacagttgtggtttgtctaaa

SEQ ID NO: 1227 - DNA, 6973 bp, Homo sapiens
  source 1..6973: mol_type = genomic DNA
gcatattggctgttaactcggctacggggtgtagcgaggtgcattccggaagtaggtcctttgacttttgcttcctctacggaggcaagtaacaacccggcggtcgacgcttagcggaagttcgtcaagtcgcagttgcccccgcacagcggatgtgggtcgcctcttaggtgacgctgggaagtgcctgcagccttcgccgctgccttctggttgaagcactatggagggagagaggaagaacaacaacaaacggtggtatttcactcgagaacagctggaaaatagcccatcccgtcgttttggcgtggacccagataaagaactttcttatcgccagcaggcggccaatctgcttcaggacatggggcagcgtcttaacgtctcacaattgactatcaacactgctatagtatacatgcatcgattctacatgattcagtccttcacacagttccctggaaattctgtggctccagcagccttgtttctagcagctaaagtggaggagcagcccaaaaaattggaacatgtcatcaaggtagcacatacttgtctccatcctcaggaatcccttcctgatactagaagtgaggcttatttgcaacaagttcaagatctggtcattttagaaagcataattttgcagactttaggctttgaactaacaattgatcacccacatactcatgtagtaaagtgcactcaacttgttcgagcaagcaaggacttagcacagacttcttacttcatggcaaccaacagcctgcatttgaccacatttagcctgcagtacacacctcctgtggtggcctgtgtctgcattcacctggcttgcaagtggtccaattgggagatcccagtctcaactgacgggaagcactggtgggagtatgttgacgccactgtgaccttggaacttttagatgaactgacacatgagtttctacagattttggagaaaactcccaacaggctcaaacgcatttggaattggagggcatgcgaggctgccaagaaaacaaaagcagatgaccgaggaacagatgaaaagacttcagagcagacaatcctcaatatgatttcccagagctcttcagacacaaccattgcaggtttaatgagcatgtcaacttctaccacaagtgcagtgccttccctgccagtctccgaagagtcatccagcaacttaaccagtgtggagatgttgccgggcaagcgttggctgtcctcccaaccttctttcaaactagaacctactcagggtcatcggactagtgagaatttagcacttacaggagttgatcattccttaccacaggatggttcaaatgcatttatttcccagaagcagaatagtaagagtgtgccatcagctaaagtgtcactgaaagaataccgcgcgaagcatgcagaagaattggctgcccagaagaggcaactggagaacatggaagccaatgtgaagtcacaatatgcatatgctgcccagaatctcctttctcatcatgatagccattcttcagtcattctaaaaatgcccatagagggttcagaaaaccccgagcggccttttctggaaaaggctgacaaaacagctctcaaaatgagaatcccagtggcaggtggagataaagctgcgtcttcaaaaccagaggagataaaaatgcgcataaaagtccatgctgcagctgataagcacaattctgtagaggacagtgttacaaagagccgagagcacaaagaaaagcacaagactcacccatctaatcatcatcatcatcataatcaccactcacacaagcactctcattcccaacttccagttggtactgggaacaaacgtcctggtgatccaaaacatagtagccagacaagcaacttagcacataaaacctatagcttgtctagttctttttcctcttccagttctactcgtaaaaggggaccctctgaagagactggaggggctgtgtttgatcatccagccaagattgccaagagtactaaatcctcttccctaaatttctccttcccttcacttcctacaatgggtcagatgcctgggcatagctcagacacaagtggcctttccttttcacagcccagctgtaaaactcgtgtccctcattcgaaactggataaagggcccactggggccaatggtcacaacacgacccagacaatagactatcaagacactgtgaatatgcttcactccctgctcagtgcccagggtgttcagcccactcagcccactgcatttgaatttgttcgtccttatagtgactatctgaatcctcggtctggtggaatctcctcgagatctggcaatacagacaaaccccggccaccacctctgccatcagaacctcctccaccacttccaccccttcctaagtaaaaaaagaaaaagaagaggagaaaaaaacttctttaaaaaaacacataatttttcttttttttttttggactaagaaaattacttatgaaatatgtcatccttggactagggaataaattgatattgagacatagttaggagggtggtagaaggccttggctatatatctgctgtctcatgcatttaactattttcttacagtttttactggtattagagaggtgttgaagctgtgaaggattaaggacacattctgaattcttggcctctccaccatctaattaggttgattggagttgatatcttccctcttcttgccagagctgaaaaatggagggtttcttgtatcagacaattgtggatcctttcggtgtttaatatatcagaagagaggaagtatttaaacgtcaaatcttttaatagacttaataatttaaagaaagtaagttatctgtttagtttttttatataattgggaaggggatagggattttgctgtgtgtatatgatacatagcagtaactcctggtgggtgggattggagggtgggaatgtgtgagggtgggtgggaggctaggtttttggctaggagttctgaaataggctcaggccacttttttcagacttttaagtgtgtatgtaagtgtgggtatgtgtgtttttaagtgtgtgtgtttaaaaataatgttttatcttccctccctgttccttaccgttttcattttccaacagtctactagagaaaaacatggttggccttgagaacataaaggaagaggcatgtatttgacatggtatttttccctttctttatgttataattgagtagtagccctctaatttgtagtttgggcaagtacagccaacaccctgactcttaaccttattatgagaacttcctttttacccctttttttgtttttgtgcaaaacagagatggggttgaggaaggagggttggcgagcaaggccagcttctgccctacagaattgggtgtgtcttttttttcaagtgaggctttgggaaagtgttcaaatgagagcagtcttaaggtctctaagagatggggaatgtgctatgtatatcctgcctgtgaaagcccaaaccatatgggagaagctagaggatactaaaaacaatgaaattgtgatttggaagtttagaacattgttttaaaaattacattataaatgtaagacatgctttttatgtgtatatccgaagggaaacagctacatcctcaagtttttgcagcctatatgacttgagattggagcttgtgaatttaacagtactggtgccatgagaatgagcaaagcctagccaatggatactattgtgtttagattgttcatctttggtagctttaggttcttgatcgaggttcttaagatttctaagtcctttataaaaataggtcaagagtcctgttgttatggaggcttgattatcccagatattaggagtgaacatttttaataaatctttcagaaaatcttggctagaaagaattctaagttagttgtctaaccactgaaaactacctagccagagatcatttaatgagatattctttgatcttcattgcattttttttgctctggaaaaggtggttcaatttgagtttgttttcatgatttgattgcagcttacttcatgccaaggattttttagggagaggtcgaattatttttcatttggaagtcatagggagacaggagttgtacttatgctgctacttgccaggaacaggttgggaagaaaattgtggctgttggaattgatgatgtactggcctaatatagaaaggaatttgtaggcaggagtaaacgttaactgacggtgggttagtgccctgcatcttgcatatttgaactgtctagagttcctgccattgctgggtataaaacgaggagctctctgttgacctgtaaatcattaatacttcttgacttagagtgtcacttcactttatagatgacattttcctctttccccttgatattttctatgttgtgttagataattggtagatatatagttgtggtttagtacatttagggcttctatttatttagattttgtttgttggagtctgtttccaaaagggaatgtgccatttagtctgcatctgtatctttgtggacttgatgatcactggtttgattttgaaaaatgtcttttccagcttttagttactctcatcaaatgtcacatattttctaatcacatgcactcctttaccacagaggcacataatcatttggcctcatagcagttatccatggccgtactgtagtaaagttccttagaactttgccaggagtgaactagaaaaaagtgcttactagggcctaagagttgctttgtgccgtgtagtccggcctttgcactagtagatcattgctgacataggtcagtttagagacctttctgtgttaatgcctcctggtactgtcttaagatacgtacagtgtctgtttttagatctatgcatatgtcatgaagctccttgtgggctctgcatgaagctgctgctttgtttttgggttaacagatgtgcctgtcaactagcatgtgtattgtccaaattccataaacttaaggtttttaagggctgtgtggtttctgagctctatgtgtctttcctatccttgtaccttcaaagggtgagaaatgagatttatacatccaaagttagtctgataaatatggctttttgtttctccatgtaacctagactgtcaaaaataagtgatggtgataagtaggcctggagcctcagcttctgtaaatctcattcctaaaattttgctagactcgtgttggcaaaaacaaatacctgtggattgtccttaaggcttttaatcagatacctgtgttgctgttagctgaactgtagtgaagcatcgatccaaatcggtcttctgaagtatcagttatgcttttgagtttagaaaatacttaggtgttagtctagtcttcccattcatgaatcagtgtatgtccatatcagagagcctcaacttcttttttcttcctttttaaaaatgattttagtgttttgatttagtgtatactacatagttcagtattattggctttaccagtgttgacagaaaaattttaaatctccagttgcaaacagcaatggattaggatatggaaataaaatcatggtgacatcactgctgagttatcttaaacctctgctacttaattctccatattgaaatgcatactcctccacatacatggcttccaagtaaaggcaattgtagaggggccctgtctatcccagtatggttggattttaaacatatctgtgtttccgttattttgggaactgattaatatttacaattttttttgtttatgagttattttgatactaagaaaagagagaatctagaacatcttgcagttgaaatacaaattttattcttttggtcttgggagaatttaagcagtctatgcaactcatcaaatggtgagaaatagccctccgaggttccagtaagctttcagtgactttgatacctccccaagtttcttgagttgctgcttgttaacacccagcttttaactgagtgtttgctcctgatggtttaggagattttcatgttgtatcacactgtcaagttttattttgtctttttatccctccgtggatgtgagtttgaaacaagcacggtacagtaatcctgcctgatagagtagtctggaatgagaattactttttgggtgagagagttctccattttaatgtttctaaagtttttcatatgaacttggcattggaaaagggaggtaaagaaaaaggacgtttactaaaagcagtgtctactcttcccctttgtgagtgtttattcatggctaatgaaaaaaagagaaggactcttgggttttgtgttgccatgttaagcatggagagggatgcttgacagcatgctaattgaagccagagcaagtatgtccttcatcaggtaatcaggaactcttcagttgaagctgaggaactaactgattagttgttgatcataatataattggttacaaagtggaagtgccagctggcttaagtacccaaagaaaagaatgcagcagcctaacttagtgttaccatatgttactgaatttgaaactgaccttttttcccaccctacttcacacacctaaaactcttttcttgtcagaccaaagagcgaaaagaaaaaaaaaagtaaaacactttaccaatctgtcactcaggtacaattttgtggtgagatttttgtctgttctctttgtattgctcttaagagtcctttctcagcatattattctgccattgcctctgtcttccttggggcacctcagctctggatgctacccctgggatatctactgctgttatgtgaatgataggaggtaagtgaccattatagtaagggctctttgtaaaaaaattcaaaaaatttaaaaaggatgtatacattttatagtctggctatcagtttgatatcttgctgtcaagtatgtttctcaatctgtatttatccatcccatcaataaatgttaatggtaaaa

SEQ ID NO: 1228 - DNA, 1733 bp, Homo sapiens
  source 1..1733: mol_type = genomic DNA
agcgcggtgagtttgaaactgctcgcacttggcttcaaagctggctcttggaaattgagcggagagcgacgcggttgttgtagctgccgctgcggccgccgcggaataataagccgggatctaccatacccattgactaactatggaagattataccaaaatagagaaaattggagaaggtacctatggagttgtgtataagggtagacacaaaactacaggtcaagtggtagccatgaaaaaaatcagactagaaagtgaagaggaaggggttcctagtactgcaattcgggaaatttctctattaaaggaacttcgtcatccaaatatagtcagtcttcaggatgtgcttatgcaggattccaggttatatctcatctttgagtttctttccatggatctgaagaaatacttggattctatccctcctggtcagtacatggattcttcacttgttaaggtagtaacactctggtacagatctccagaagtattgctggggtcagctcgttactcaactccagttgacatttggagtataggcaccatatttgctgaactagcaactaagaaaccacttttccatggggattcagaaattgatcaactcttcaggattttcagagctttgggcactcccaataatgaagtgtggccagaagtggaatctttacaggactataagaatacatttcccaaatggaaaccaggaagcctagcatcccatgtcaaaaacttggatgaaaatggcttggatttgctctcgaaaatgttaatctatgatccagccaaacgaatttctggcaaaatggcactgaatcatccatattttaatgatttggacaatcagattaagaagatgtagctttctgacaaaaagtttccatatgttatatcaacagatagttgtgtttttattgttaactcttgtctatttttgtcttatatatatttctttgttatcaaacttcagctgtacttcgtcttctaatttcaaaaatataacttaaaaatgtaaatattctatatgaatttaaatataattctgtaaatgtgtgtaggtctcactgtaacaactatttgttactataataaaactataatattgatgtcaggaatcaggaaaaaatttgagttggcttaaatcatctcagtccttatggcagttttattttcctgtagttggaactactaaaatttaggaaaatgctaagttcaagtttcgtaatgctttgaagtatttttatgctctgaatgtttaaatgttctcatcagtttcttgccatgttgttaactatacaacctggctaaagatgaatatttttctactggtattttaatttttgacctaaatgtttaagcattcggaatgagaaaactatacagatttgagaaatgatgctaaatttataggagttttcagtaacttaaaaagctaacatgagagcatgccaaaatttgctaagtcttacaaagatcaagggctgtccgcaacagggaagaacagttttgaaaatttatgaactatcttatttttaggtaggttttgaaagctttttgtctaagtgaattcttatgccttggtcagagtaataactgaaggagttgcttatcttggctttcgagtctgagtttaaaactacacattttgacatagtgtttattagcagccatctaaaaaggctctaatgtatatttaactaaaattactagctttgggaattaaactgttt

SEQ ID NO: 1229 - DNA, 1613 bp, Homo sapiens
  source 1..1613: mol_type = genomic DNA
ccattgactaactatggaagattataccaaaatagagaaaattggagaaggtacctatggagttgtgtataagggtagacacaaaactacaggtcaagtggtagccatgaaaaaaatcagactagaaagtgaagaggaaggggttcctagtactgcaattcgggaaatttctctattaaaggaacttcgtcatccaaatatagtcagtcttcaggatgtgcttatgcaggattccaggttatatctcatctttgagtttctttccatggatctgaagaaatacttggattctatccctcctggtcagtacatggattcttcacttgttaaggtagtaacactctggtacagatctccagaagtattgctggggtcagctcgttactcaactccagttgacatttggagtataggcaccatatttgctgaactagcaactaagaaaccacttttccatggggattcagaaattgatcaactcttcaggattttcagagctttgggcactcccaataatgaagtgtggccagaagtggaatctttacaggactataagaatacatttcccaaatggaaaccaggaagcctagcatcccatgtcaaaaacttggatgaaaatggcttggatttgctctcgaaaatgttaatctatgatccagccaaacgaatttctggcaaaatggcactgaatcatccatattttaatgatttggacaatcagattaagaagatgtagctttctgacaaaaagtttccatatgttatatcaacagatagttgtgtttttattgttaactcttgtctatttttgtcttatatatatttctttgttatcaaacttcagctgtacttcgtcttctaatttcaaaaatataacttaaaaatgtaaatattctatatgaatttaaatataattctgtaaatgtgtgtaggtctcactgtaacaactatttgttactataataaaactataatattgatgtcaggaatcaggaaaaaatttgagttggcttaaatcatctcagtccttatggcagttttattttcctgtagttggaactactaaaatttaggaaaatgctaagttcaagtttcgtaatgctttgaagtatttttatgctctgaatgtttaaatgttctcatcagtttcttgccatgttgttaactatacaacctggctaaagatgaatatttttctactggtattttaatttttgacctaaatgtttaagcattcggaatgagaaaactatacagatttgagaaatgatgctaaatttataggagttttcagtaacttaaaaagctaacatgagagcatgccaaaatttgctaagtcttacaaagatcaagggctgtccgcaacagggaagaacagttttgaaaatttatgaactatcttatttttaggtaggttttgaaagctttttgtctaagtgaattcttatgccttggtcagagtaataactgaaggagttgcttatcttggctttcgagtctgagtttaaaactacacattttgacatagtgtttattagcagccatctaaaaaggctctaatgtatatttaactaaaattactagctttgggaattaaactgtttaacaaataa

SEQ ID NO: 1230 - DNA, 1913 bp, Homo sapiens
  source 1..1913: mol_type = genomic DNA
agcgcggtgagtttgaaactgctcgcacttggcttcaaagctggctcttggaaattgagcggagagcgacgcggttgttgtagctgccgctgcggccgccgcggaataataagccgggatctaccatacccattgactaactatggaagattataccaaaatagagaaaattggagaaggtacctatggagttgtgtataagggtagacacaaaactacaggtcaagtggtagccatgaaaaaaatcagactagaaagtgaagaggaaggggttcctagtactgcaattcgggaaatttctctattaaaggaacttcgtcatccaaatatagtcagtcttcaggatgtgcttatgcaggattccaggttatatctcatctttgagtttctttccatggatctgaagaaatacttggattctatccctcctggtcagtacatggattcttcacttgttaagagttatttataccaaatcctacaggggattgtgttttgtcactctagaagagttcttcacagagacttaaaacctcaaaatctcttgattgatgacaaaggaacaattaaactggctgattttggccttgccagagcttttggaatacctatcagagtatatacacatgaggtagtaacactctggtacagatctccagaagtattgctggggtcagctcgttactcaactccagttgacatttggagtataggcaccatatttgctgaactagcaactaagaaaccacttttccatggggattcagaaattgatcaactcttcaggattttcagagctttgggcactcccaataatgaagtgtggccagaagtggaatctttacaggactataagaatacatttcccaaatggaaaccaggaagcctagcatcccatgtcaaaaacttggatgaaaatggcttggatttgctctcgaaaatgttaatctatgatccagccaaacgaatttctggcaaaatggcactgaatcatccatattttaatgatttggacaatcagattaagaagatgtagctttctgacaaaaagtttccatatgttatatcaacagatagttgtgtttttattgttaactcttgtctatttttgtcttatatatatttctttgttatcaaacttcagctgtacttcgtcttctaatttcaaaaatataacttaaaaatgtaaatattctatatgaatttaaatataattctgtaaatgtgtgtaggtctcactgtaacaactatttgttactataataaaactataatattgatgtcaggaatcaggaaaaaatttgagttggcttaaatcatctcagtccttatggcagttttattttcctgtagttggaactactaaaatttaggaaaatgctaagttcaagtttcgtaatgctttgaagtatttttatgctctgaatgtttaaatgttctcatcagtttcttgccatgttgttaactatacaacctggctaaagatgaatatttttctactggtattttaatttttgacctaaatgtttaagcattcggaatgagaaaactatacagatttgagaaatgatgctaaatttataggagttttcagtaacttaaaaagctaacatgagagcatgccaaaatttgctaagtcttacaaagatcaagggctgtccgcaacagggaagaacagttttgaaaatttatgaactatcttatttttaggtaggttttgaaagctttttgtctaagtgaattcttatgccttggtcagagtaataactgaaggagttgcttatcttggctttcgagtctgagtttaaaactacacattttgacatagtgtttattagcagccatctaaaaaggctctaatgtatatttaactaaaattactagctttgggaattaaactgtttaacaaataa

SEQ ID NO: 1231 - DNA, 1948 bp, Homo sapiens
  source 1..1948: mol_type = genomic DNA
gctggctcttggaaattgagcggagagcgacgcggttgttgtagctgccgctgcggccgccgcggaataataagccgggtacagtggctggggtcagggtcgtgtctaggggacggccgagggcctcggagggcgagtattgaggaacggggtcctctaagaaggccggactggaggatctaccatacccattgactaactatggaagattataccaaaatagagaaaattggagaaggtacctatggagttgtgtataagggtagacacaaaactacaggtcaagtggtagccatgaaaaaaatcagactagaaagtgaagaggaaggggttcctagtactgcaattcgggaaatttctctattaaaggaacttcgtcatccaaatatagtcagtcttcaggatgtgcttatgcaggattccaggttatatctcatctttgagtttctttccatggatctgaagaaatacttggattctatccctcctggtcagtacatggattcttcacttgttaagagttatttataccaaatcctacaggggattgtgttttgtcactctagaagagttcttcacagagacttaaaacctcaaaatctcttgattgatgacaaaggaacaattaaactggctgattttggccttgccagagcttttggaatacctatcagagtatatacacatgaggcaataacactctggtacagatctccagaagtattgctggggtcagctcgttactcaactccagttgacatttggagtataggcaccatatttgctgaactagcaactaagaaaccacttttccatggggattcagaaattgatcaactcttcaggattttcagagctttgggcactcccaataatgaagtgtggccagaagtggaatctttacaggactataagaatacatttcccaaatggaaaccaggaagcctagcatcccatgtcaaaaacttggatgaaaatggcttggatttgctctcgaaaatgttaatctatgatccagccaaacgaatttctggcaaaatggcactgaatcatccatattttaatgatttggacaatcagattaagaagatgtagctttctgacaaaaagtttccatatgttatatcaacagatagttgtgtttttattgttaactcttgtctatttttgtcttatatatatttctttgttatcaaacttcagctgtacttcgtcttctaatttcaaaaatataacttaaaaatgtaaatattctatatgaatttaaatataattctgtaaatgtgtgtaggtctcactgtaacaactatttgttactataataaaactataatattgatgtcaggaatcaggaaaaaatttgagttggcttaaatcatctcagtccttatggcagttttattttcctgtagttggaactactaaaatttaggaaaatgctaagttcaagtttcgtaatgctttgaagtatttttatgctctgaatgtttaaatgttctcatcagtttcttgccatgttgttaactatacaacctggctaaagatgaatatttttctactggtattttaatttttgacctaaatgtttaagcattcggaatgagaaaactatacagatttgagaaatgatgctaaatttataggagttttcagtaacttaaaaagctaacatgagagcatgccaaaatttgctaagtcttacaaagatcaagggctgtccgcaacagggaagaacagttttgaaaatttatgaactatcttatttttaggtaggttttgaaagctttttgtctaagtgaattcttatgccttggtcagagtaataactgaaggagttgcttatcttggctttcgagtctgagtttaaaactacacattttgacatagtgtttattagcagccatctaaaaaggctctaatgtatatttaactaaaattactagctttg

SEQ ID NO: 1232 - DNA, 723 bp, Homo sapiens
  source 1..723: mol_type = genomic DNA
agccgccctttcctctttctttcgcgctctagccacccgggaaggcctgcccagcgtagctgggctctgattggctgctttgaaagtctacgggctacccgattggtgaatccggggccctttagcgcggatctaccatacccattgactaactatggaagattataccaaaatagagaaaattggagaaggtacctatggagttgtgtataagggtagacacaaaactacaggtcaagtggtagccatgaaaaaaatcagactagaaagtgaagaggaaggggttcctagtactgcaattcgggaaatttctctattaaaggaacttcgtcatccaaatatagtcagtcttcaggatgtgcttatgcaggattccaggttatatctcatctttgagtttctttccatggatctgaagaaatacttggattctatccctcctggtcagtacatggattcttcacttgttaagagttatttataccaaatcctacaggggattgtgttttgtcactctagaagagttcttcacagagacttaaaacctcaaaatctcttgattgatgacaaaggaacaattaaactggctgattttggccttgccagagcttttggaatacctatcagagtatatacacatgaggcaataacactctggtacagatctccagaagtattgctggggtcagctcgttactcaactccagttgacatttggagtat

SEQ ID NO: 1233 - DNA, 2296 bp, Homo sapiens
  source 1..2296: mol_type = genomic DNA
aacgcgggaagcaggggcggggcctctggtggcggtcgggaactcggtgggaggcggcaacattgtttcaagttggccaaattgacaagagcgagaggtatactgcgttccatcccgacccggggccacggtactgggccctgtttccccctcctcggcccccgagagccagggtccgccttctgcagggttcccaggcccccgctccagggccgggctgacccgactcgctggcgcttcatggagaacttccaaaaggtggaaaagatcggagagggcacgtacggagttgtgtacaaagccagaaacaagttgacgggagaggtggtggcgcttaagaaaatccgcctggacactgagactgagggtgtgcccagtactgccatccgagagatctctctgcttaaggagcttaaccatcctaatattgtcaagctgctggatgtcattcacacagaaaataaactctacctggtttttgaatttctgcaccaagatctcaagaaattcatggatgcctctgctctcactggcattcctcttcccctcatcaagagctatctgttccagctgctccagggcctagctttctgccattctcatcgggtcctccaccgagaccttaaacctcagaatctgcttattaacacagagggggccatcaagctagcagactttggactagccagagcttttggagtccctgttcgtacttacacccatgaggtggtgaccctgtggtaccgagctcctgaaatcctcctgggctgcaaatattattccacagctgtggacatctggagcctgggctgcatctttgctgagatggtgactcgccgggccctattccctggagattctgagattgaccagctcttccggatctttcggactctggggaccccagatgaggtggtgtggccaggagttacttctatgcctgattacaagccaagtttccccaagtgggcccggcaagattttagtaaagttgtacctcccctggatgaagatggacggagcttgttatcgcaaatgctgcactacgaccctaacaagcggatttcggccaaggcagccctggctcaccctttcttccaggatgtgaccaagccagtaccccatcttcgactctgatagccttcttgaagcccccagccctaatctcaccctctcctccagtgtgggcttgaccaggcttggccttgggctatttggactcaggtgggccctctgaacttgccttaaacactcaccttctagtcttggccagccaactctgggaatacaggggtgaaaggggggaaccagtgaaaatgaaaggaagtttcagtattagatgcacttaagttagcctccaccaccctttcccccttctcttagttattgctgaagagggttggtataaaaataattttaaaaaagccttcctacacgttagatttgccgtaccaatctctgaatgccccataattattatttccagtgtttgggatgaccaggatcccaagcctcctgctgccacaatgtttataaaggccaaatgatagcgggggctaagttggtgcttttgagaaccaagtaaaacaaaaccactgggaggagtctattttaaagaattcggttgaaaaaatagatccaatcagtttataccctagttagtgttttgcctcacctaataggctgggagactgaagactcagcccgggtggggctgcagaaaaatgattggccccagtccccttgtttgtcccttctacaggcatgaggaatctgggaggccctgagacagggattgtgcttcattccaatctattgcttcaccatggccttatgaggcaggtgagagatgtttgaatttttctcttccttttagtattcttagttgttcagttgccaaggatccctgatcccattttcctctgacgtccacctcctaccccataggagttagaagttagggtttaggcatcattttgagaatgctgacactttttcagggctgtgattgagtgagggcatgggtaaaaatatttctttaaaagaaggatgaacaattatatttatatttcaggttatatccaatagtagagttggctttttttttttttttttggtcatagtgggtggatttgttgccatgtgcaccttggggttttgtaatgacagtgctaaaaaaaaaaagcattttttttttatgatttgtctctgtcacccttgtccttgagtgctcttgctattaacgttatttgtaatttagtttgtagctcattaaaaaaatgtgcctagttttata

SEQ ID NO: 1234 - DNA, 1260 bp, Homo sapiens
  source 1..1260: mol_type = genomic DNA
ttgtttcaagttggccaaattgacaagagcgagaggtatactgcgttccatcccgacccggggccacggtactgggccctgtttccccctcctcggcccccgagagccagggtccgccttctgcagggttcccaggcccccgctccagggccgggctgacccgactcgctggcgcttcatggagaacttccaaaaggtggaaaagatcggagagggcacgtacggagttgtgtacaaagccagaaacaagttgacgggagaggtggtggcgcttaagaaaatccgcctggacactgagactgagggtgtgcccagtactgccatccgagagatctctctgcttaaggagcttaaccatcctaatattgtcaagctgctggatgtcattcacacagaaaataaactctacctggtttttgaatttctgcaccaagatctcaagaaattcatggatgcctctgctctcactggcattcctcttcccctcatcaagagctatctgttccagctgctccagggcctagctttctgccattctcatcgggtcctccaccgagaccttaaacctcagaatctgcttattaacacagagggggccatcaagctagcagactttggactagccagagcttttggagtccctgttcgtacttacacccatgaggtgactcgccgggccctattccctggagattctgagattgaccagctcttccggatctttcggactctggggaccccagatgaggtggtgtggccaggagttacttctatgcctgattacaagccaagtttccccaagtgggcccggcaagattttagtaaagttgtacctcccctggatgaagatggacggagcttgttatcgcaaatgctgcactacgaccctaacaagcggatttcggccaaggcagccctggctcaccctttcttccaggatgtgaccaagccagtaccccatcttcgactctgatagccttcttgaagcccccagccctaatctcaccctctcctccagtgtgggcttgaccaggcttggccttgggctatttggactcaggtgggccctctgaacttgccttaaacactcaccttctagtcttggccagccaactctgggaatacaggggtgaaaggggggaaccagtgaaaatgaaaggaagtttcagtattagatgcacttaagttagcctccaccaccctttcccccttctcttagttattgctgaagagggttggtataaaaataattttaaaaaa

SEQ ID NO: 1235 - DNA, 1625 bp, Homo sapiens
  source 1..1625: mol_type = genomic DNA
gcccccaccatcaaggggaagaaagtgctcttcggattccggttcgccctggcctcccgcagccgccgcgggaccggcccccagcacacccccggggcgccgggcgcggggcagccgcccggacgcgcgcgggcctcaggcgccgccgggaccccagccccccaaactttggcaagttgcgggcgccgagcgcacccggaggcgcggggcgcggccgcaggcggagccgccccctgacgccgggccgccccctcccggccccggccgccccgccggctccgcggaaagtttgcggccgcccctgcgccgcacccggggcctgggtgagactgcggcggcggcagggcgcggacggccatatttgccggcgcggcccgagccgccgacaacaaaaagtgcgcgggcgctcggcgggcgctcggacgggcgcggggctgcagcgctaccgcccggcctcgccgccgccgccgccgccctcgcggcctggccccgccgcgcccggcgcgcccgccgcccggggggatgtcttacaaaccgaacttggccgcgcacatgcccgccgccgccctcaacgccgctgggagtgtccactcgccttccaccagcatggcaacgtcttcacagtaccgccagctgctcagtgactacgggccaccgtccctaggctacacccagggaactgggaacagccaggtgccccaaagcaaatacgcggagctgctggccatcattgaagagctggggaaggagatcagacccacgtacgcagggagcaagagtgccatggagaggctgaagcgcggcatcattcacgctagaggactggttcgggagtgcttggcagaaacggaacggaatgccagatcctagctgccttgttggttttgaaggatttccatctttttacaagatgagaagttacagttcatctcccctgttcagatgaaacccttgttttcaaaatggttacagtttcgtttttcctcccatggttcacttggctctgaacctacagtctcaaagattgagaaaagattttgcagttaattaggatttgcattttaagtagttaggaactgcccaggttttttttgttttttaagcattgatttaaaagatgcacggaaagttatcttacagcaaactgtagtttgcctccaagacaccattgtctccctttaatcttctcttttgtatacatttgttacccatggtgttctttgttccttttcataagctaataccactgtagggattttgttttgaacgcatattgacagcacgctttacttagtagccggttcccatttgccatacaatgtaggttctgcttaatgtaacttcttttttgcttaagcatttgcatgactattagtgcttcaaagtcaatttttaaaaatgcacaagttataaatacagaagaaagagcaacccaccaaacctaacaaggacccccgaacactttcatactaagactgtaagtagatctcagttctgcgtttattgtaagttgataaaaacatctggaagaaaatgactaaaactgtttgcatctttgtatgtatttattacttgatgtaataaagcttattttcattaacaatttgtattaaaatgtgggttcc

SEQ ID NO: 1236 - DNA, 1552 bp, Homo sapiens
  source 1..1552: mol_type = genomic DNA
gtgatagcaacagatcacgtggctgccatcgcccctccgcccccttacactcttcgccctcctcccagtcgaagcacctcctgtccgcccctcagcgcatgggtggcggtcacgtgcccagaacgtccggcgttcgccccgccctcccagtttccgcgcgcctctttggcagctggtcacatggtgagggtgggggtgagggggcctctctagcttgcggcctgtgtctatggtcgggccctctgcgtccagctgctccggaccgagctcgggtgtatggggccgtaggaaccggctccggggccccgataacgggccgcccccacagcaccccgggctggcgtgagggtctcccttgatctgagaatggctacctctcgatatgagccagtggctgaaattggtgtcggtgcctatgggacagtgtacaaggcccgtgatccccacagtggccactttgtggccctcaagagtgtgagagtccccaatggaggaggaggtggaggaggccttcccatcagcacagttcgtgaggtggctttactgaggcgactggaggcttttgagcatcccaatgttgtccggctgatggacgtctgtgccacatcccgaactgaccgggagatcaaggtaaccctggtgtttgagcatgtagaccaggacctaaggacatatctggacaaggcacccccaccaggcttgccagccgaaacgatcaaggatctgatgcgccagtttctaagaggcctagatttccttcatgccaattgcatcgttcaccgagatctgaagccagagaacattctggtgacaagtggtggaacagtcaagctggctgactttggcctggccagaatctacagctaccagatggcacttacacccgtggttgttacactctggtaccgagctcccgaagttcttctgcagtccacatatgcaacacctgtggacatgtggagtgttggctgtatctttgcagagatgtttcgtcgaaagcctctcttctgtggaaactctgaagccgaccagttgggcaaaatctttgacctgattgggctgcctccagaggatgactggcctcgagatgtatccctgccccgtggagcctttccccccagagggccccgcccagtgcagtcggtggtacctgagatggaggagtcgggagcacagctgctgctggaaatgctgacttttaacccacacaagcgaatctctgcctttcgagctctgcagcactcttatctacataaggatgaaggtaatccggagtgagcaatggagtggctgccatggaaggaagaaaagctgccatttcccttctggacactgagagggcaatctttgcctttatctctgaggctatggagggtcctcctccatctttctacagagattactttgctgccttaatgacattcccctcccacctctccttttgaggcttctccttctccttcccatttctctacactaaggggtatgttccctcttgtccctttccctacctttatatttggggtccttttttatacaggaaaaacaaaac

SEQ ID NO: 1237 - DNA, 1000 bp, Homo sapiens
  source 1..1000: mol_type = genomic DNA
gtgggggtgagggggcctctctagcttgcggcctgtgtctatggtcgggccctctgcgtccagctgctccggaccgagctcgggtgtatggggccgtaggaaccggctccggggccccgataacgggccgcccccacagcaccccgggctggcgtgagggtctcccttgatctgagaatggctacctctcgatatgagccagtggctgaaattggtgtcggtgcctatgggacagtgtacaaggcccgtgatccccacagtggccactttgtggccctcaagagtgtgagagtccccaatggaggaggaggtggaggaggccttcccatcagcacagttcgtgaggtggctttactgaggcgactggaggcttttgagcatcccaatgttgtccggctgatggacgtctgtgccacatcccgaactgaccgggagatcaagagatgtttcgtcgaaagcctctcttctgtggaaactctgaagccgaccagttgggcaaaatctttgacctgattgggctgcctccagaggatgactggcctcgagatgtatccctgccccgtggagcctttccccccagagggccccgcccagtgcagtcggtggtacctgagatggaggagtcgggagcacagctgctgctggaaatgctgacttttaacccacacaagcgaatctctgcctttcgagctctgcagcactcttatctacataaggatgaaggtaatccggagtgagcaatggagtggctgccatggaaggaagaaaagctgccatttcccttctggacactgagagggcaatctttgcctttatctctgaggctatggagggtcctcctccatctttctacagagattactttgctgccttaatgacattcccctcccacctctccttttgaggcttctccttctccttcccatttctctacactaaggggtatgttccctcttgtccctttccctacctttatatttggggtccttttttatacagg

SEQ ID NO: 1238 - DNA, 952 bp, Homo sapiens
  source 1..952: mol_type = genomic DNA
gtgagggggcctctctagcttgcggcctgtgtctatggtcgggccctctgcgtccagctgctccggaccgagctcgggtgtatggggccgtaggaaccggctccggggccccgataacgggccgcccccacagcaccccgggctggcgtgagggtctcccttgatctgagaatggctacctctcgatatgagccagtggctgaaattggtgtcggtgcctatgggacagtgtacaaggcccgtgatccccacagtggccactttgtggccctcaagagtgtgagagtccccaatggaggaggaggtggaggaggccttcccatcagcacagttcgtgaggtggctttactgaggcgactggaggcttttgagcatcccaatgttgtccggatctgatgcgccagtttctaagaggcctagatttccttcatgccaattgcatcgttcaccgagatctgaagccagagaacattctggtgacaagtggtggaacagtcaagctggctgactttggcctggccagaatctacagctaccagatggcacttacacccgtggttgttacactctggtaccgagctcccgaagttcttctgcagtccacatatgcaacacctgtggacatgtggagtgttggctgtatctttgcagagatgtttcgtcgaaagcctctcttctgtggaaactctgaagccgaccagttgggcaaaatctttgacctgattgggctgcctccagaggatgactggcctcgagatgtatccctgccccgtggagcctttccccccagagggccccgcccagtgcagtcggtggtacctgagatggaggagtcgggagcacagctgctgctggaaatgctgacttttaacccacacaagcgaatctctgcctttcgagctctgcagcactcttatctacataaggatgaaggtaatccggagtgagcaat

SEQ ID NO: 1239 - DNA, 228 bp, Homo sapiens
  source 1..228: mol_type = genomic DNA
cgcgttcgtttcgcgagctggttatggaagggtcgctcaagggcgggaagtggggcctttgtggtcatgggaaagtataattttagggactgaggtgtaggatcttcgatgcaaggcatgtgtcatgtgtgatctttgtgcggggcgcgattgtcccaaaggaaaaagcgttttctattgcagggcctcacgtggctggagggggtctcccttgatctgagaatggct

SEQ ID NO: 1240 - DNA, 769 bp, Homo sapiens
  source 1..769: mol_type = genomic DNA
gccccaaggaagactgggagcgggggatgggatgctggtggtgttctttgcgctttttttttgggagtccctttgttgctgcaggctcataccatcctaactctgtaagcgacttttggtgataggagtctgtgattgtagggtctcccttgatctgagaatggctacctctcgatatgagccagtggctgaaattggtgtcggtgcctatgggacagtgtacaaggcccgtgatccccacagtggccactttgtggccctcaagagtgtgagagtccccaatggaggaggaggtggaggaggccttcccatcagcacagttcgtgaggtggctttactgaggcgactggaggcttttgagcatcccaatgttgtccggctgatggacgtctgtgccacatcccgaactgaccgggagatcaaggtaaccctggtgtttgagcatgtagaccaggacctaaggacatatctggacaaggcacccccaccaggcttgccagccgaaacgatcaaggatctgatgcgccagtttctaagaggcctagatttccttcatgccaattgcatcgttcaccgagatctgaagccagagaacattctggtgacaagtggtggaacagtcaagctggctgactttggcctggccagaatctacagctaccagatggcacttacacccgtggttgttacactctggtaccgagctcccgaagttcttctgcagtccacatatgcaacacctgtggacatgtggagtgttggctgtatc

SEQ ID NO: 1241 - DNA, 694 bp, Homo sapiens
  source 1..694: mol_type = genomic DNA
gggggcctctctagcttgcggcctgtgtctatggtcgggccctctgcgtccagctgctccggaccgagctcgggtgtatggggccgtaggaaccggctccggggccccgataacgggccgcccccacagcaccccgggctggcgtgaggagtctgtgattgtagggtctcccttgatctgagaatggctacctctcgatatgagccagtggctgaaattggtgtcggtgcctatgggacagtgtacaaggcccgtgatccccacagtggccactttgtggccctcaagagtgtgagagtccccaatggaggaggaggtggaggaggccttcccatcagcacagttcgtgaggtggctttactgaggcgactggaggcttttgagcatcccaatgttgtccggctgatggacgtctgtgccacatcccgaactgaccgggagatcaaggtaaccctggtgtttgagcatgtagaccaggacctaaggacatatctggacaaggcacccccaccaggcttgccagccgaaacgatcaaggatctgatgcgccagtttctaagaggcctagatttccttcatgccaattgcatcgttcaccgagatctgaagccagagaacattctggtgacaagtggtggaacagtcaagctggctgactttggcctggccagaatctacagctaccagatggcac

SEQ ID NO: 1242 - DNA, 447 bp, Homo sapiens
  source 1..447: mol_type = genomic DNA
accccattcccactccgtgtcctggggcccgcccagcctccttaggcgccgcgcctgctcgcggtctccgctgacaccccagggtctcccttgatctgagaatggctacctctcgatatgagccagtggctgaaattggtgtcggtgcctatgggacagtgtacaaggcccgtgatccccacagtggccactttgtggccctcaagagtgtgagagtccccaatggaggaggaggtggaggaggccttcccatcagcacagttcgtgaggtggctttactgaggcgactggaggcttttgagcatcccaatgttgtccggctgatggacgtctgtgccacatcccgaactgaccgggagatcaaggtaaccctggtgtttgagcatgtagaccaggacctaaggacatatctggacaaggcacccccaccaggcttgccagccgaaa

SEQ ID NO: 1243 - DNA, 4325 bp, Homo sapiens
  source 1..4325: mol_type = genomic DNA
ggctgctgttgggcggcggcgcggagcgggcggcgagctgtgcgggaggggcggccccgaggggcggggcgggccgacgccgcgtgtcccgccgcagccgcggagtccggctcctagatggggcccggcgcgtagaggtgcctcccgctcgttgccgcgtcctacccgcaccgtgcgcggctcgagctgaggacaccaacggccgcgactccccggcgagaccaggccggagcgtggacggcgcgcgcgccccgcgagggagggcgctgaggcgcgcgccggaagcgggagcgggagcgggagcgcggcggcggcggcgaaggtgcgggcggccgagcggggggcggggctgcggtgcctgcagaaccttggacagaagctccctagctgccgccgccgccgccgccgccgtcgccgccgccgagcgcgagcccagccgatccccgccgagcgcccccgagcgccgccgagcgccgggaccgcggcggcggggccgcggcgcgcattgcggagggcgcggagcgcaggagctgccgcctgccgggcagatccaagggggcagcacgcttcccgggagcgcccccgcctcctctccggggccgccgcaggctcggtgagcggttttatccctccggccggcaggctgggcgcgcaggggcgcgagcccccgcccggcgcgcagcagcaccatgggcacggtgctgtccctgtctcccagctaccggaaggccacgctgtttgaggatggcgcggccaccgtgggccactatacggccgtacagaacagcaagaacgccaaggacaagaacctgaagcgccactccatcatctccgtgctgccttggaagagaatcgtggccgtgtcggccaagaagaagaactccaagaaggtgcagcccaacagcagctaccagaacaacatcacgcacctcaacaatgagaacctgaagaagtcgctgtcgtgcgccaacctgtccacattcgcccagcccccaccggcccagccgcctgcacccccggccagccagctctcgggttcccagaccgggggctcctcctcagtcaagaaagcccctcaccctgccgtcacctccgcagggacgcccaaacgggtcatcgtccaggcgtccaccagtgagctgcttcgctgcctgggtgagtttctctgccgccggtgctaccgcctgaagcacctgtcccccacggaccccgtgctctggctgcgcagcgtggaccgctcgctgcttctgcagggctggcaggaccagggcttcatcacgccggccaacgtggtcttcctctacatgctctgcagggatgttatctcctccgaggtgggctcggatcacgagctccaggccgtcctgctgacatgcctgtacctctcctactcctacatgggcaacgagatctcctacccgctcaagcccttcctggtggagagctgcaaggaggccttttgggaccgttgcctctctgtcatcaacctcatgagctcaaagatgctgcagataaatgccgacccacactacttcacacaggtcttctccgacctgaagaacgagagcggccaggaggacaagaagcggctcctcctaggcctggatcggtgagcactgtagcctgcgtcatggctcaaggattcaatgcatttttaagaatttattattaaatcagttttgtgtacagtatgtgtctagcaaagccaccaagggcctcacctttcccacagtctctccctggggtttttttcatccctgccaagaactctgggcacttttgaactcacgagccttgcgcaaaacccagaagatgtattcagagccacccaggccactgacctcccactttggggaactcaaaggactgacctgcccctgccgcctgtgcccttgctgggtccagggtaggcaaggctgccggctgcaccctgtatggagctagagaggggcctctggctgcctggcccagggaggaattggggtttctggttggaggcccttttctggctcctgtgtggagttattcactctcccagaggctcctggagccagccaccctaactgagctgccagtggggtcgtgaggcaagatccccgccacccggggacatcttcaatctaggcgaggcgaagctgagcgggtctagtggaaagattgtgtctggtcgtttgaccacacaccgccctgatttgctgttttctttttttagggagaagggcttttctttagtggagaaatggaactcgcccccctacccccttgtctgctgctcccagccacgttggtggtattggccgatgagctggtttgactcattaatttctctcaatttgggtcccagctaaagaggtggggtgaagctggggacagctttcctgggtgagtttttcttttgaataatgtagtgcagtcaccctgtggcaaatgccaggacagctgcaggtgcccattagcaacgcctgccttctgggcaaggtgagggatgccataccttgagaccaagccggtgcccacctaagggctaaggcctcttgctggtgcacatgacatttgtcctgcagagctggggggaaggcgatgtggtgaccccacccccacccgttaatttaaagctgtttctaaacagttgagtttcttctaaagaggaagccttgcccagcaaggaccagtgagacagccggatcttggagacaattacaagacggggagtgagactcctgattgctctggaagcctgctgatttctacaactgatcatttgcagctgctggttttggtttccaccttaccctactggctgtaaaaacacaaatgtgtactttattgattttctttctaattctcccgcattggtggcttgggacttgggagagggagcaagccttcctccatggcccatcactcggctgtggagaacaaagaccaatgtgaagacactacagaggattctgtcttccaggcccagtccactggggagtgctggaatggggacctggggtggggaggcagagggtcactttacataggattaagttcgaggtggctaccgatttcagcacatgcactactgaaatttacacaaaaagaaagctgtgaaattgaagtcccaatttaagagtcctgaggcagaacctggtggctggaggcattcccagaggtggggaagagagcctgcccggccggagaacatctgccttgctgcacctgaggcccagcagagccgttcctgggactgtcagataatcggtgcagcggtggaaggagcctgcggctgctggcacagacttcacacagcacctcctctctgctgggtttccacacagcctgtcttcagatcctgctgccgcgtgcgaccagaggtgggaggcccctggtggcatggaagagggagggtcagtgccaagtctcaggaggagggcgcatgtgtgtatcaccctcagctggcggaacctggctgcgaactgtgcagttacgttgcatccacaggattccagttgcgtgtctgtttccttctctttctccgtatttatttttttattcttcggaggaggtggacatttcggaagtggtggggactaagggaagaactctctagttccctcagtgtgaagcctgtcgtgttctctccccttgcactggtcatcagtattgtgtaaaggaacaactgatatacttgagtgtgcaagcaaagaacccatttgccatgctgctatgaagactacttttagatcaacaataaaaaaaaacctacaaaaaaacctttattctttaattgttgcttttacggtgatattgtgcatgcaaaccaggagcattttgtgtcttaagaaaaataatcttagaacagatggctgtgaaaattacacccatgcacagaacaagccacaggaataatagttcaggatttggtttttctctttttcttgtaaacctggagggttgatatattctttccatgcagttattagaacttagttttgttccaacagttaaacttgcaatgaaaagaaaatgtgccatttttttcactcagaattattcatagctgtatatttgaaactgctaattacacacgtgtgatgtatgttggttttttagtgcaatttcttctgtagctattctttgaccaaactgtgggtattgttaatattaatttatatttgtctcattttgtatgtatgtgtagtgtgtttgtgagtatgtgtggtttataatctgacaaagtcatgaagctcagtttggctgtaatttaattccccttcccttatttttatttatttttgtactgtgctgattcaataaaatgcactgaccatccatta

SEQ ID NO: 1244 - DNA, 11612 bp, Homo sapiens
  source 1..11612: mol_type = genomic DNA
aacctctccgcgcgaagacggcttcagccctgcagggaaagaaaagtgcaatgattctggactgagacgcgcttgggcagaggctatgtaatcgtgtctgtgttgaggacttcgcttcgaggagggaagaggagggatcggctcgctcctccggcggcggcggcggcggcgactctgcaggcggagtttcgcggcggcggcaccagggttacgccagccccgcggggaggtctctccatccagcttctgcagcggcgaaagccccagcgcccgagcgcctgagccggcggggagcaagtaaagctagaccgatctccggggagccccggagtaggcgagcggcggccgccagctagttgagcgcaccccccgcccgccccagcggcgccgcggcgggcggcgtccaggcggcatggagaaggacggcctgtgccgcgctgaccagcagtacgaatgcgtggcggagatcggggagggcgcctatgggaaggtgttcaaggcccgcgacttgaagaacggaggccgtttcgtggcgttgaagcgcgtgcgggtgcagaccggcgaggagggcatgccgctctccaccatccgcgaggtggcggtgctgaggcacctggagaccttcgagcaccccaacgtggtcaggttgtttgatgtgtgcacagtgtcacgaacagacagagaaaccaaactaactttagtgtttgaacatgtcgatcaagacttgaccacttacttggataaagttccagagcctggagtgcccactgaaaccataaaggatatgatgtttcagcttctccgaggtctggactttcttcattcacaccgagtagtgcatcgcgatctaaaaccacagaacattctggtgaccagcagcggacaaataaaactcgctgacttcggccttgcccgcatctatagtttccagatggctctaacctcagtggtcgtcacgctgtggtacagagcacccgaagtcttgctccagtccagctacgccacccccgtggatctctggagtgttggctgcatatttgcagaaatgtttcgtagaaagcctctttttcgtggaagttcagatgttgatcaactaggaaaaatcttggacgtgattggactcccaggagaagaagactggcctagagatgttgcccttcccaggcaggcttttcattcaaaatctgcccaaccaattgagaagtttgtaacagatatcgatgaactaggcaaagacctacttctgaagtgtttgacatttaacccagccaaaagaatatctgcctacagtgccctgtctcacccatacttccaggacctggaaaggtgcaaagaaaacctggattcccacctgccgcccagccagaacacctcggagctgaatacagcctgaggcctcagcagccgccttaagctgatcctgcggagaacacccttggtggcttatgggtccccctcagcaagccctacagagctgtggaggattgctatctggaggccttccagctgctgtcttctggacaggctctgcttctccaaggaaaccgcctagtttactgttttgaaatcaatgcaagagtgattgcagctttatgttcatttgtttgtttgtttgtctgtttgtttcaagaacctggaaaaattccagaagaagagaagctgctgaccaattgtgctgccatttgatttttctaaccttgaatgctgccagtgtggagtgggtaatccaggcacagctgagttatgatgtaatctctctgcagctgccgggcctgatttggtacttttgagtgtgtgtgtgcatgtgtgtgtgtgtgtgtgtgtgtgtgtgtgtgtatgtgagagattctgtgatcttttaaagtgttactttttgtaaacgacaagaataattcaattttaaagactcaaggtggtcagtaaataacaggcatttgttcactgaaggtgattcaccaaaatagtcttctcaaattagaaagttaaccccatgtcctcagcatttcttttctggccaaaagcagtaaatttgctagcagtaaaagatgaagttttatacacacagcaaaaaggagaaaaaattctagtatattttaagagatgtgcatgcattctatttagtcttcagaatgctgaatttacttgttgtaagtctattttaaccttctgtatgacatcatgctttatcatttcttttggaaaatagcctgtaagctttttattacttgctataggtttagggagtgtacctcagatagattttaaaaaaaagaatagaaagcctttatttcctggtttgaaattcctttcttccctttttttgttgttgttattgttgtttgttgttgttattttgtttttgtttttaggaatttgtcagaaactctttcctgttttggtttggagagtagttctctctaactagagacaggagtggccttgaaattttcctcatctattacactgtactttctgccacacactgccttgttggcaaagtatccatcttgtctatctcccggcacttctgaaatatattgctaccattgtataactaataacagattgcttaagctgttcccatgcaccacctgtttgcttgctttcaatgaacctttcataaattcgcagtctcagcttatggtttatggcctcgattctgcaaacctaacagggtcacatatgttctctaatgcagtccttctacctggtgtttacttttgttacctaaataatgagtaggatcttgttttgttttatcaccagcacacagattgctataaactgttactttgtgaattacatttttatagaagatattttcagtgtctttacctgagggtatgtctttagctatgttttagggccatacatttactctatcaaatgatcttttctccatcccccaggctgtgcttatttctagtgccttgtgctcactcctgctctctacagagccagcctggcctgggcattgtaaacagcttttcctttttctcttactgttttctctacagtcctttatatttcataccatctctgccttataagtggtttagtgctcagttggctctagtaaccagaggacacagaaagtatcttttggaaagtttagccacctgtgctttctgactcagagtgcatgcaacagttagatcatgcaacagttagattatgtttagggttaggattttcaaagaatggaggttgctgcactcagaaaataattcagatcatgtttatgcattattaagttgtactgaattctttgcagcttaatgtgatatatgactatcttgaacaagagaaaaaactaggagatgtttctcctgaagagcttttggggttgggaactattcttttttaattgctgtactacttaacattgttctaattcagtagcttgaggaacaggaacattgttttctagagcaagataataaaggagatgggccatacaaatgttttctactttcgttgtgacaacattgattaggtgttgtcagtactataaatgcttgagatataatgaatccacagcattcaaggtcaggtctactcaaagtctcacatggaaaagtgagttctgcctttcctttgatcgagggtcaaaatacaaagacatttttgctagggcctacaaattgaatttaaaaactcactgcactgattcatctgagctttttggttagtattcatggctagagtgaacatagctttagtttttgctgttgtaaaagtgttttcataagttcactcaagaaaaatgcagctgttctgaactggaatttttcagcattctttagaattttaaatgagtagagagctcaacttttattcctagcatctgcttttgactcatttctaggcagtgcttatgaagaaaaattaaagcacaaacattctggcattcaatcgttggcagattatcttctgatgacacagaatgaaagggcatctcagcctctctgaactttgtaaaaatctgtccccagttcttccatcggtgtagttgttgcatttgagtgaatactctcttgatttatgtattttatgtccagattcgccatttctgaaatccagatccaacacaagcagtcttgccgttagggcattttgaagcagatagtagagtaagaacttagtgactacagcttattcttctgtaacatatggtttcaaacatctttgccaaaagctaagcagtggtgaactgaaaagggcatattgccccaaggttacactgaagcagctcatagcaagttaaaatattgtgacagatttgaaatcatgtttgaatttcatagtaggaccagtacaagaatgtccctgctagtttctgtttgatgtttggttctggcggctcaggcattttgggaactgttgcacagggtggagtcaaaacaacctacatataaaaagagaaaaagagaaacttgtccatttagctttcataagaaatcccatggcaaagggtaataaaaaggacctaatcttaaaaatacaatttctaagcacttgtaagaacccagtgggttggagcctcccactttgtccctcctttgaagtggatgggaactcaaggtgcaaagaacctgttttggaagaaagcttggggccatttcagccccctgtattctcatgattttctctcaggaagcacacactgtgaatggcagacttttcatttagccccaggtgacttactaaaaatagttgaaaattattcacctaagaatagaatctcagcattgtgttaaataaaaatgaaagctttagaaggcatgagatgttcctatcttaaataaagcatgtttcttttctatagagaaatgtatagtttgactctccagaatgtactatccatcttgatgagaaaactcttaaatagtaccaaacattttgaactttaaattatgtatttaaagtgagtgtttaagaaactgtagctgcttcttttacaagtggtgcctattaaagtcagtaatggccattattgttccattgtggaaattaaattatgtaagcttcctaatatcataaacatattaaaattcttctaaaatattgcttttcttttaagtgacaatttgactattcttatgataagcacatgagagtgtcttacattttccaaaagcaggctttaattgcatagttgagtctaggaaaaaataatgttaaaagtgaatatgccaccataattacttaattatgttagtatagaaactacagaatatttaccctggaaagaaaatattggaatgttattataaactcttagatatttatataattcaaaagaatgcatgtttcacattgtgacagataaagatgtatgatttctaaggctttaaaaattattcataaaacagtgggcaatagataaaggaaattctggagaaaatgaaggtatttaaagggtagtttcaaagctatatatattttgaaggatatattctttatgaacaaatatattgtaaaaatttatactaaggtcatctggtaactgtgggattaatatggtcgaaaacaaatgttatggagaagctgtcccaagcaaactaaattacctgtacttttttcccatttcaagggaagaggcaaccacatgaagcaatacttcttacacatgcctaagaacgttcattgaaaaaataaatttttaaaaggcatgtgtttcctatgccaccaatacttttgaaaaattgtgaaccttacccaaaaccatttatcatgtccattaagtatatttgggtatataattaggaagatatttacatgttccatctccacagtggaaaaacttattgaggctaccaaagtgtgccaagaaatgtaagtccttagagtaattagaaatgctgttttcctcaaaagcatgagaaactagcattttcatttcttatttactccctttctatatcaatgcaattcacaacccaattttaatacatccctatatctcaagcatttctatcttgtactttttcagaaaataaaccaaaaataatcctttggtctctctatcttctgacctttgtaagcaacagaaatgtaaaaacagaaggggtccaatttttacacgtttttttctcaagtagcctttctggggatttttattttcttaatgaagtgccaatcagcttttcaaaatgttttctatttctcagcatttccaggaagtgataacgtttagctaaatgagtagaagtggacttccttcaacatattgttaccttgtctagccttaggaagaaaacaagagccacctgaaaataaatacaggctcttttcgagcatctgctgaaatactgttacagcaatttgaagttgatgtggtaggaaaggaaggtgacttttcttgcaaaagtctttctaaacattcacactgtcctaagagatgagctttcttgttttattccggtatattccacaaggtggcacttttagagaaaaacaaatctgatgaagactaaagaggtacttctaaaagagatttcattctaactttatttttctgcgcatatttaactctttcctagcacttgttttttgggatgattaatagtctctataatgttctgtaacttcaatattttacttgttacctaggttctgaacaattgtctgcaaataaattgttcttaaggatggataatacacccattttgatcatttaagtaaagaaagcctagtcattcattcagtcaagaaaaaatttttgaagtacccagttaccttacttttctagattaaaacaggcttagttactaaaaaggcagtcctcatctgtgaacaggatagtttcgttagaagtataaaactcctttagtggccccagttaaaacacacataccctctctgctgctttcaaattccctagcatggtggcctttcaacattgattaaattttaaaatcctaatttaaagatcaggtgagcaaaatgagtagcacatcagtaattcagtagacaaaacttttgtctgaaaaattgctgtattgaaacagagccctaaaataccaaaagaccaggtaattttaacatttgtggaatcacaaatgtaaattcataagaagctctaattaaaaaaaaaaagtctgaagtatatgagcataacaacttaggagtgtgtctacatacttaacttttgaagttttttggcaactttatatactttttttaaatttacaagtctacttaaagacttcttataccccaaatgattaagttaattttagaggtcacctttctcacagcagtgtcacttgaaatttagtagggaaggatattgcagtatttttcagtttccttagcacagcaccacagaaagcagcttattccttttgagtggcagacactcgacggtgcctgcccaactttcctcctgagtggcaagcagatgagtctcagtaattcatactgaaccaaaatgccacatacactaggggcagtcagaaactggctgagaaatcccccgcctcattcgcccctctgctcccaggaactagagtccagttaaagcccctatgcgaaaggccgaattccaccccagggtttgttataacagtggccagtctgaaccccatttgctcgtgctcaaaacttgattcccacttgaaagccttccgggcgcgctgcctcgttgccccgcccctttggcaggagagaggcagtgggcgaggccgggctggggccccgcctcccactcacctgccggtgcctgaaattatgtgcggccccgcgggctgctttccgaggtcagagtgccctgctgctgtctcagaggcatctgttctgcaaatcttaggaagaaaaatgtccctagtagcaaacgggtgtcttctgtgcataaataagtacaacacaattctccgaaagttcgggtaaaaagagatgcggtagcagctgccctgtgtgaagctgtctaccccgcatctctcaggcgctaagctcagtttttgtttttgtttttgtttttttaaagaaaagatgtataattgcaggaatttttttttatttttttattttccatcattctatatatgtgatggtgaaagatatgcctggaaaagttttgttttgaaaagtttattttctgcttcgtcttcagttggcaaaagctctcaattctttagcttccagtttcttttctctctttttctttgttaggtaattaaaggtatgtaaacaaattatctcatgtagcaggggattttcatgttgagaggaatcttccgtgtgagttgtttggtcacacaaataaccctttctcaattttaggagtttggattgtcaaatgtaggtttttctcaaagggggcatataactacatattgactgccaagaactatgactgtagcactaatcagcacacatagagccacacaattatttaatttctaactctctgtggtccctagaaaaattccgttgatgtgcttaggttaaagttctgaagatacccgttgtacccttacttgaaagtttctaatcttaagttttatgaaatgcaataatatgtatcagctagcaatatttctgtgatcaccaacaactctcagtttgatcttaaagtctgaataataaaacaaatcccagcagtaatacatttcttaaacctcacagtgcatgatatatcttttcattctgatcctgtgtttgcaaaaatatacacatgtatatcatagttcctcactttttattcatttgttttcctattacctgtagtaaatatattagttagtacatggaatttatagcatcagctacccccaggaacagcacctgacaggcgggggattttttttcaagttgttctacatttgcataaattatttctattattattcatgtatgttatttatttctgaatcacactagtcctgtgaaagtacaactgaaggcagaaagtgttaggattttgcatctaatgttcattatcatggtattgatggacctaagaaaataaaaattagactaagcccccaaataagctgcatgcatttgtaacatgattagtagatttgaatatatagatgtagtattttgggtatctaggtgttttatcattatgtaaaggaattaaagtaaaggactttgtagttgtttttattaaatatgcatatagtagagtgcaaaaatatagcaaaaataaaaactaaaggtagaaaagcattttagatatgccttaatttagaaactgtgccaggtggccctcggaatagatgccaggcagagaccagtgcctgggtggtgcctcctcttgtctgccctcatgaagaagcttccctcacgtgatgtagtgccctcgtaggtgtcatgtggagtagtgggaacaggcagtactgttgagaggagagcagtgtgagagtttttctgtagaagcagaactgtcagcttgtgccttgaggcttccagaacgtgtcagatggagaagtccaagtttccatgcttcaggcaacttagctgtgtacagaagcaatccagtgtggtaataaaaagcaaggattgcctgtataatttattataaaataaaagggattttaacaaccaacaattcccaacacctcaaaagcttgttgcattttttggtatttgaggtttttatctgaaggttaaagggcaagtgtttggtatagaagagcagtatgtgttaagaaaagaaaaatattggttcacgtagagtgcaaattagaactagaaagttttatacgattatcattttgagatgtgttaaagtaggttttcactgtaaaatgtattagtgtttctgcattgccatagggcctggttaaaactttctcttaggtttcaggaagactgtcacatacagtaagcttttttccttctgacttataatagaaaatgttttgaaagtaaaaaaaaaaaatctaatttggaaatttgacttgttagtttctgtgtttgaaatcatggttctagaaatgtagaaattgtgtatatcagatactcatctaggctgtgtgaaccagcccaagatgaccaacatccccacacctctacatctctgtcccctgtatctcttcctttctaccactaaagtgttccctgctaccatcctggcttgtccacatggtgctctccatcttcctccacatcatggaccacaggtgtgcctgtctaggcctggccaccactcccaacttgacctagccacattcatctagagatggttcctgatgctgggcacagactgtgctcatggcacccattagaaatgcctctagcatctttgtatgcatcttgatttttaaaccaagtcattgtacagagcattcagttttggctgtggtaccaagagaaaaactaatcaagaatataaaccacattccaggctgctgttttctctccatctacaggccacacttttactgtatttcttcatacttgaaattcattctgctattttcatatcagggtacagacttataagggtgcatgttccttaaaggtgcataattattcttattccgtttgcttatattgctacagaatgctctgttttggtgctttgagttctgcagacccaagaagcagtgtggaaattcactgcctgggacacagtcttataagaatgttggcaggtgactttgtatcagatgttgcttctcttttctctgtacacagattgagagttaccacagtggcctgtcgggtccaccctgtgggtgcagcacagctctctgaaagcaagaaccttcctacctattctaacgtttttgccctctaagaaaaatggcctcaggtatggtatagacatagcaagaggggaagggctgtctcactctagcaaccatccctccattacacacagaaagccctcttgaagcaaaagaagaagaaagaaagaaagcttatctctaaggctactgtcttcagaatgctctgagctgaatgctcttgctcctttcccaagaggcagatgaaaatatagccagtttatctatacccttcctatctgaggaggagaatagaaaagtagggtaaatatgtaacgtaaaatatgtcattcaaggaccaccaaaactttaagtaccctatcattaaaaatctggttttaaaagtagctcaagtaagggatgctttgtgacccagggtttctgaagtcagatagccattcttacctgccccttactctgacttattgggaaagggagaactgcagtggtgtttctgttgcagtggcaaaggtaacatgtcagaaaattcagagggttgcataccaataatcctttggaaactggatgtcttactgggtgctagaatgaaaatgtaggtatttattgtcagatgatgaagttcattgtttttttcaaaattggtgttgaaatatcactgtccaatgtgttcacttatgtgaaagctaaattgaatgaggcaaaaagagcaaatagtttgtatatttgtaataccttttgtatttcttacaataaaaatattggtagcaaataaaaataataaaaacaataactttaaactgctttctggagatgaattactctcctggctattttcttttttactttaatgtaaaatgagtataactgtagtgagtaaaattcattaaattccaagttttagcagaa

SEQ ID NO: 1245 - DNA, 1465 bp, Homo sapiens
  source 1..1465: mol_type = genomic DNA
gctggtaactccttccccagagtctgattacctgctccgcgaggccgcggacacgtgcggagagccgactgacactcgcagccccctcgggaggcccgacgcgactgggcccctcaggtgcaatgattctggactgagacgcgcttgggcagaggctatgtaatcgtgtctgtgttgaggacttcgcttcgaggagggaagaggagggatcggctcgctcctccggcggcggcggcggcggcgactctgcaggcggagtttcgcggcggcggcaccagggttacgccagccccgcggggaggtctctccatccagcttctgcagcggcgaaagccccagcgcccgagcgcctgagccggcggggagcaagtaaagctagaccgatctccggggagccccggagtaggcgagcggcggccgccagctagttgagcgcaccccccgcccgccccagcggcgccgcggcgggcggcgtccaggcggcatggagaaggacggcctgtgccgcgctgaccagcagtacgaatgcgtggcggagatcggggagggcgcctatgggaaggtgttcaaggcccgcgacttgaagaacggaggccgtttcgtggcgttgaagcgcgtgcgggtgcagaccggcgaggagggcatgccgctctccaccatccgcgaggtggcggtgctgaggcacctggagaccttcgagcaccccaacgtggtcaggttgtttgatgtgtgcacagtgtcacgaacagacagagaaaccaaactaactttagtgtttgaacatgtcgatcaagacttgaccacttacttggataaagttccagagcctggagtgcccactgaaaccataaaggatatgatgtttcagcttctccgaggtctggactttcttcattcacaccgagtagtgcatcgcgatctaaaaccacagaacattctggtgaccagcagcggacaaataaaactcgctgacttcggccttgcccgcatctatagtttccagatggctctaacctcagtggtcgtcacgctgtggtacagagcacccgaagtcttgctccagtccagctacgccacccccgtggatctctggagtgttggctgcatatttgcagaaatgtttcgtagaaagcctctttttcgtggaagttcagatgttgatcaactaggaaaaatcttggacgtgattggactcccaggagaagaagactggcctagagatgttgcccttcccaggcaggcttttcattcaaaatctgcccaaccaattgagaagtttgtaacagatatcgatgaactaggcaaagacctacttctgaagtgtttgacatttaacccagccaaaagaatatctgcctacagtgccctgtctcacccatacttccaggacctggaaaggtgcaaagaaaacctggattcccacctgccgcccagccagaacacctcggagctgaatacagcctga

SEQ ID NO: 1246 - DNA, 1432 bp, Homo sapiens
  source 1..1432: mol_type = genomic DNA
cccggtggacggaagtgggtgttggaggctttaaggtagctttaaattcgtgttgtcctgggagctcgcccttttcggctggagtcgggctttacggcgccggatggctctggacgtgaagtctcgggcaaagcgttatgagaagctggacttccttggggagggacagtttgccaccgtttacaaggccagagataagaacaccaaccaaattgtcgccattaagaaaatcaaacttggacatagatcagaagctaaagatggtataaatagaaccgccttaagagagataaaattattacaggagctaagtcatccaaatataattggtctccttgatgcttttggacataaatctaatattagccttgtctttgattttatggaaactgatctagaggttataataaaggataatagtcttgtgctgacaccatcacacatcaaagcctacatgttgatgactcttcaaggattagaatatttacatcaacattggatcctacatagggatctgaaaccaaacaacttgttgctagatgaaaatggagttctaaaactggcagattttggcctggccaaatcttttgggagccccaatagagcttatacacatcaggttgtaaccaggtggtatcgggcccccgagttactatttggagctaggatgtatggtgtaggtgtggacatgtgggctgttggctgtatattagcagagttacttctaagggttccttttttgccaggagattcagaccttgatcagctaacaagaatatttgaaactttgggcacaccaactgaggaacagtggccggacatgtgtagtcttccagattatgtgacatttaagagtttccctggaatacctttgcatcacatcttcagtgcagcaggagacgacttactagatctcatacaaggcttattcttatttaatccatgtgctcgaattacggccacacaggcactgaaaatgaagtatttcagtaatcggccagggccaacacctggatgtcagctgccaagaccaaactgtccagtggaaaccttaaaggagcaatcaaatccagctttggcaataaaaaggaaaagaacagaggccttagaacaaggaggattgcccaagaaactaattttttaaagagaacactggacaacattttactactgagggaaatagccaaaaaggcaaataatggaaaaatagtaaacattaagtaaatgctgtagaagtgagtttgtaaatattctacacatgtaaaatatgtaaaactatgggttatttttattaaatgtattttaaaataaaaatttaattctggtttttctgattagagtgcaaaagtgagaaaagttcaatactcttgaaatgtagaattgaaaatgcattagggaaaacttaataaaaattattaccagttatttggaa

SEQ ID NO: 1247 - DNA, 3055 bp, Homo sapiens
  source 1..3055: mol_type = genomic DNA
cggctgttgtgcggctctgcccttctgtttgagtgtatgggagagtgagtgagtgagtgagtgtgagcgtgtgtgtgagagcgtgaggcgtgagtgcgcgtgtgagaggacgagagcccgcctggccgccccgccgctcccgccgcagcaggagcagaacgcgcggccggagagagcggcggagccggcgcccagggagcccgcggggacaagggcagagacaccgctccccacccccagccctcgtccctcggctctccttcgccgggggatcctccccgttcctccacccccggccggcctctgccccgccgtccccctggatgtccctggcgctttcgcggggcctcctcctgctcttgccgcatcagtcgggctggtgctgcggccggcgggcgtagagcgggcgggttcccgggggctgcggctgcccgtgcttccccggtccccacccctgccccccggccccccgacccagctctccggcctcagaggctgtgacaatggactatgactttaaagtgaagctgagcagcgagcgggagcgggtcgaggacctgtttgaatacgagggctgcaaagttggccgaggcacttatggtcacgtctacaaagccaagaggaaagatgggaaggatgataaagactatgctttaaaacaaatagaaggaactgggatctctatgtcggcatgtagagaaatagcattacttcgagagcttaagcatccaaacgtcatttctcttcaaaaggtgtttctgtctcatgctgataggaaggtgtggcttctgtttgactatgctgaacatgacctctggcatataatcaagtttcacagagcttctaaagcaaacaagaagccagttcagttacctcggggaatggtgaagtcactattatatcagatcctagatggtattcactacctgcatgctaactgggtgttgcacagagatttgaaacctgctaatattttagttatgggtgaaggtcctgagcgaggaagagtaaaaattgctgacatgggctttgcccgattatttaattcacctttgaagcctttagcagatttggatccagtggttgttacattctggtaccgagcccctgaactacttcttggagcaaggcattataccaaagctattgatatttgggctatagggtgtatatttgcagaactactaacgtcagaaccaatatttcactgtcgacaagaggacatcaaaactagtaatccttatcaccatgaccagctggacagaatattcaatgtaatgggatttcctgcagataaagattgggaagatataaaaaagatgcctgaacattcaacattaatgaaagatttcagaagaaatacgtataccaactgcagccttatcaagtatatggaaaaacataaagttaaaccagatagtaaagcattccacttgcttcagaagctgcttaccatggacccaataaagcgaattacctcagaacaggctatgcaggacccctatttcttagaagacccacttcctacatcagacgtttttgccggttgtcaaatcccttacccaaaacgagaatttttaacggaagaagaacctgatgacaaaggagacaaaaagaaccagcagcagcagcagggcaataaccacactaatggaactggccacccagggaatcaagacagcagtcacacacagggacccccgttgaagaaagtgagagttgttcctcctaccactacctcaggtggacttatcatgacctcagactatcagcgttccaatccacatgctgcctatcccaaccctggaccaagcacatcacagccgcagagcagcatgggatactcagctacctcccagcagcctccacagtactcacatcagacacatcggtactgagctgcatcggaatcttgtccatgcactgttgcgaatgctgcagggctgactgtgcagctctctgcgggaacctggtatgggccatgagaatgtactgtacaaccacatcttcaaaatgtccagtagccaagttccaccacttttcacagattggggtagtggcttccaagttgtacctattttggagttagacttgaaaagaaagtgctagcacagtttgtgttgtggatttgctacttccatagtttacttgacatggttcagactgaccaatgcatttttttcagtgacagtctgtagcagttgaagctgtgaatgtgctaggggcaagcatttgtctttgtatgtggtgaattttttcagtgtaacaacattatctgaccaatagtacacacacagacacaaagtttaactggtacttgaaacatacagtatatgttaacgaaataaccaagactcgaaatgagattattttggtacacctttctttttagtgtcttatcagtgggctgattcattttctacattaatcagtgttttctgaccaagaatattgcttggatttttttgaaagtacaaaaagccacatagtttttccagaaaggtttcaaaactcccaaagattaacttccaacttataagtttgtttttattttcaatctatgacttgactggtattaaagctgctatttgatagtaattaaatatgttgtcattgatataaacctgtttggttcagcaaacaaactaaaatgattgtcatagacagtgttttatttttcctgttggtgttgctgatttgtgagcatgctttaagatgaaaaaagcatgaatgataacttccttaaaaaggtgcggcatccaattcaaatattttcgtcctgattttaaagctggttggtgtagtgctattaaaatttcgttcagttaattttccttttgaaaacttgttcgcacgttgtttagggtgcccttacttcagcaaaggagaaggagtaggagagccttagaatttttgaggaaaaaaaaacctataacatacaatgtactgtatcaaactattttacatgaatgacacaagtattctgaataaaaaataattgaacattgttaaaaacaaggtgttatgtaataaatttatttttcataaatcaaaa

SEQ ID NO: 1248 - DNA, 1337 bp, Homo sapiens
  source 1..1337: mol_type = genomic DNA
atggactatgactttaaagtgaagctgagcagcgagcgggagcgggtcgaggacctgtttgaatacgagggctgcaaagttggccgaggcacttatggtcacgtctacaaagccaagaggaaagatgggaaggatgataaagactatgctttaaaacaaatagaaggaactgggatctctatgtcggcatgtagagaaatagcattacttcgagagcttaagcatccaaacgtcatttctcttcaaaaggtgtttctgtctcatgctgataggaaggtgtggcttctgtttgactatgctgaacatgacctctggcatataatcaagtttcacagagcttctaaagcaaacaagaagccagttcagttacctcggggaatggtgaagtcactattatatcagatcctagatggtattcactacctgcatgctaactgggtgttgcacagagatttgctgacatgggctttgcccgattatttaattcacctttgaagcctttagcagatttggatccagtggttgttacattctggtaccgagcccctgaactacttcttggagcaaggcattataccaaagctattgatatttgggctatagggtgtatatttgcagaactactaacgtcagaaccaatatttcactgtcgacaagaggacatcaaaactagtaatccttatcaccatgaccagctggacagaatattcaatgtaatgggatttcctgcagataaagattgggaagatataaaaaagatgcctgaacattcaacattaatgaaagatttcagaagaaatacgtataccaactgcagccttatcaagtatatggaaaaacataaagttaaaccagatagtaaagcattccacttgcttcagaagctgcttaccatggacccaataaagcgaattacctcagaacaggctatgcaggacccctatttcttagaagacccacttcctacatcagacgtttttgccggttgtcaaatcccttacccaaaacgagaatttttaacggaagaagaacctgatgacaaaggagacaaaaagaaccagcagcagcagcagggcaataaccacactaatggaactggccacccagggaatcaagacagcagtcacacacagggacccccgttgaagaaagtgagagttgttcctcctaccactacctcaggtggacttatcatgacctcagactatcagcgttccaatccacatgctgcctatcccaaccctggaccaagcacatcacagccgcagagcagcatgggatactcagctacctcccagcagcctccacagtactcacatcagacacatcggtactga

SEQ ID NO: 1249 - DNA, 2463 bp, Homo sapiens
  source 1..2463: mol_type = genomic DNA
gcgcggccgcggaggggcctggagtgcggcggcggcgggacccggagcaggagcggcggcagcagcgactgggggcggcggcggcgcgttggaggcggccatggcaaagcagtacgactcggtggagtgccctttttgtgatgaagtttccaaatacgagaagctcgccaagatcggccaaggcaccttcggggaggtgttcaaggccaggcaccgcaagaccggccagaaggtggctctgaagaaggtgctgatggaaaacgagaaggaggggttccccattacagccttgcgggagatcaagatccttcagcttctaaaacacgagaatgtggtcaacttgattgagatttgtcgaaccaaagcttccccctataaccgctgcaagggtagtatatacctggtgttcgacttctgcgagcatgaccttgctgggctgttgagcaatgttttggtcaagttcacgctgtctgagatcaagagggtgatgcagatgctgcttaacggcctctactacatccacagaaacaagatcctgcatagggacatgaaggctgctaatgtgcttatcactcgtgatggggtcctgaagctggcagactttgggctggcccgggccttcagcctggccaagaacagccagcccaaccgctacaccaaccgtgtggtgacactctggtaccggcccccggagctgttgctcggggagcgggactacggcccccccattgacctgtggggtgctgggtgcatcatggcagagatgtggacccgcagccccatcatgcagggcaacacggagcagcaccaactcgccctcatcagtcagctctgcggctccatcacccctgaggtgtggccaaacgtggacaactatgagctgtacgaaaagctggagctggtcaagggccagaagcggaaggtgaaggacaggctgaaggcctatgtgcgtgacccatacgcactggacctcatcgacaagctgctggtgctggaccctgcccagcgcatcgacagcgatgacgccctcaaccacgacttcttctggtccgaccccatgccctccgacctcaagggcatgctctccacccacctgacgtccatgttcgagtacttggcaccaccgcgccggaagggcagccagatcacccagcagtccaccaaccagagtcgcaatcccgccaccaccaaccagacggagtttgagcgcgtcttctgagggccggcgcttgccactagggctcttgtgttttttttcttctgctatgtgacttgcatcgtggagacagggcatttgagtttatatctctcatgcatattttatttaatccccaccctgggctctgggagcagcccgctgagtggactggagtggagcattggctgagagaccaggagggcactggagctgtcttgtccttgctggttttctggatggttcccagagggtttccatggggtaggaggatgggctcgcccaccagtgactttttctaagagctcccggcgtggtggaagaggggacaggtccctcacccacccacaatcctattctcgggctgagaaccctgcgtggggacagggctcgcctcaggaatgggctgtttttggcctaaccctcagaaacactggggctggcacaaactcttggtttcttcaacaggagaattttactgtgtttcttttggttccattgtttggagacattcctgggcacagtttggtccgttagaattaaaagttgaattttttttttttttaaatttttttttttcctccaggacttgtgtgttttgttctgcgcacacaccgccaactgttcccccacagtcagcagcaggttgggcctgaccattgggacttgattgtcaagtcactggaggtcttgacttttttatctcagttcatgttctcttccataattggaaaggacctttgtctgtttttcctcttgggtgccttccagaacgcatctcatgtccctggtgagggaattggtgagggcctgctgtgagctgctgtggctgcgatggtcacccagctgggcaaatcactggagtgacaatttgacctgtcacctgagaaggatggtccctcagactgctgggtagagggcctggggcaggctggagagagaaagtgggcagagggtgaagggatcacaggggtcttggaaggtggcagtagtttggacgggggtggggagtatgtgggagaaaaaaacagactgaaggtagaatccttgggaacctttgaggagcggcacattctggcaggcacgttttctgtgagcctgaagttaggaagagacattctggaggtcaatttcctacatcctcttacaggcggagaccttgaagtggggccaggaaggaaggttggcaaaacctttgaccagaactgtccttcatttacagaaactgacccagaccacaacacaaaaggccagtaaaagtaagaaaa

SEQ ID NO: 1250 - DNA, 2700 bp, Homo sapiens
  source 1..2700: mol_type = genomic DNA
atgcagcgggacgcgccaccccgagccccagctccggcgccccggctccccgcgcccccgatcggggccgccgctagtagtggcggcggcggaggcgggggcagcggcggcggcggcggaggcgcctctgcagctccggctccccctggcctctcgggaactacaagtcccagggggcctggcggtgggcggcgggcggaagaggcggggtcggcgccgcgaggccggaagtggccgtggaggcggaagtggcgcggccgcggaggggcctggagtgcggcggcggcgggacccggagcaggagcggcggcagcagcgactgggggcggcggcggcgcgttggaggcggccatggcaaagcagtacgactcggtggagtgccctttttgtgatgaagtttccaaatacgagaagctcgccaagatcggccaaggcaccttcggggaggtgttcaaggccaggcaccgcaagaccggccagaaggtggctctgaagaaggtgctgatggaaaacgagaaggaggggttccccattacagccttgcgggagatcaagatccttcagcttctaaaacacgagaatgtggtcaacttgattgagatttgtcgaaccaaagcttccccctataaccgctgcaagggtagtatatacctggtgttcgacttctgcgagcatgaccttgctgggctgttgagcaatgttttggtcaagttcacgctgtctgagatcaagagggtgatgcagatgctgcttaacggcctctactacatccacagaaacaagatcctgcatagggacatgaaggctgctaatgtgcttatcactcgtgatggggtcctgaagctggcagactttgggctggcccgggccttcagcctggccaagaacagccagcccaaccgctacaccaaccgtgtggtgacactctggtaccggcccccggagctgttgctcggggagcgggactacggcccccccattgacctgtggggtgctgggtgcatcatggcagagatgtggacccgcagccccatcatgcagggcaacacggagcagcaccaactcgccctcatcagtcagctctgcggctccatcacccctgaggtgtggccaaacgtggacaactatgagctgtacgaaaagctggagctggtcaagggccagaagcggaaggtgaaggacaggctgaaggcctatgtgcgtgacccatacgcactggacctcatcgacaagctgctggtgctggaccctgcccagcgcatcgacagcgatgacgccctcaaccacgacttcttctggtccgaccccatgccctccgacctcaagggcatgctctccacccacctgacgtccatgttcgagtacttggcaccaccgcgccggaagggcagccagatcacccagcagtccaccaaccagagtcgcaatcccgccaccaccaaccagacggagtttgagcgcgtcttctgagggccggcgcttgccactagggctcttgtgttttttttcttctgctatgtgacttgcatcgtggagacagggcatttgagtttatatctctcatgcatattttatttaatccccaccctgggctctgggagcagcccgctgagtggactggagtggagcattggctgagagaccaggagggcactggagctgtcttgtccttgctggttttctggatggttcccagagggtttccatggggtaggaggatgggctcgcccaccagtgactttttctaagagctcccggcgtggtggaagaggggacaggtccctcacccacccacaatcctattctcgggctgagaaccctgcgtggggacagggctcgcctcaggaatgggctgtttttggcctaaccctcagaaacactggggctggcacaaactcttggtttcttcaacaggagaattttactgtgtttcttttggttccattgtttggagacattcctgggcacagtttggtccgttagaattaaaagttgaattttttttttttttaaatttttttttttcctccaggacttgtgtgttttgttctgcgcacacaccgccaactgttcccccacagtcagcagcaggttgggcctgaccattgggacttgattgtcaagtcactggaggtcttgacttttttatctcagttcatgttctcttccataattggaaaggacctttgtctgtttttcctcttgggtgccttccagaacgcatctcatgtccctggtgagggaattggtgagggcctgctgtgagctgctgtggctgcgatggtcacccagctgggcaaatcactggagtgacaatttgacctgtcacctgagaaggatggtccctcagactgctgggtagagggcctggggcaggctggagagagaaagtgggcagagggtgaagggatcacaggggtcttggaaggtggcagtagtttggacgggggtggggagtatgtgggagaaaaaaacagactgaaggtagaatccttgggaacctttgaggagcggcacattctggcaggcacgttttctgtgagcctgaagttaggaagagacattctggaggtcaatttcctacatcctcttacaggcggagaccttgaagtggggccaggaaggaaggttggcaaaacctttgaccagaactgtccttcatttacagaaactgacccagaccacaacacaaaaggccag

SEQ ID NO: 1251 - DNA, 702 bp, Homo sapiens
  source 1..702: mol_type = genomic DNA
cgccccgcgcagcccggcggaggcggcgccgtcggaggaggaggagcagggcactgcggctggccccggatcgggcgccagagcggcagcagcttcggcagcagcggcggcccgggcccatgcagcgggacgcgccaccccgagccccagctccggcgccccggctccccgcgcccccgatcggggccgccgctagtagtggcggcggcggaggcgggggcagcggcggcggcggcggaggcgcctctgcagctccggctccccctggcctctcgggaactacaagtcccagggggcctggcggtgggcggcgggcggaagaggcggggtcggcgccgcgaggccggaagtggccgtggaggcggaagtggcgcggccgcggaggggcctggagtgcggcggcggcgggacccggagcaggagcggcggcagcagcgactgggggcggcggcggcgcgttggaggcggccatggcaaagcagtacgactcggtggagtgccctttttgtgatgaagtttccaaatacgagaagctcgccaagatcggccaaggcaccttcggggaggtgttcaaggccaggcaccgcaagaccggccagaaggtggctctgaagaaggtgctgatggaaaacgagaaggaggggttccccattacagccttgcgggagatcaagatccttcagcttctaaaacacgagaatg

SEQ ID NO: 1252 - DNA, 2180 bp, Homo sapiens
  source 1..2180: mol_type = genomic DNA
gaggcgggcccgggcggggcggttgtatatcagggccgcgctgagctgcgccagctgaggtgtgagcagctgccgaagtcagttccttgtggagccggagctgggcgcggattcgccgaggcaccgaggcactcagaggaggcgccatgtcagaaccggctggggatgtccgtcagaacccatgcggcagcaaggcctgccgccgcctcttcggcccagtggacagcgagcagctgagccgcgactgtgatgcgctaatggcgggctgcatccaggaggcccgtgagcgatggaacttcgactttgtcaccgagacaccactggagggtgacttcgcctgggagcgtgtgcggggccttggcctgcccaagctctaccttcccacggggccccggcgaggccgggatgagttgggaggaggcaggcggcctggcacctcacctgctctgctgcaggggacagcagaggaagaccatgtggacctgtcactgtcttgtacccttgtgcctcgctcaggggagcaggctgaagggtccccaggtggacctggagactctcagggtcgaaaacggcggcagaccagcatgacagatttctaccactccaaacgccggctgatcttctccaagaggaagccctaatccgcccacaggaagcctgcagtcctggaagcgcgagggcctcaaaggcccgctctacatcttctgccttagtctcagtttgtgtgtcttaattattatttgtgttttaatttaaacacctcctcatgtacataccctggccgccccctgccccccagcctctggcattagaattatttaaacaaaaactaggcggttgaatgagaggttcctaagagtgctgggcatttttattttatgaaatactatttaaagcctcctcatcccgtgttctccttttcctctctcccggaggttgggtgggccggcttcatgccagctacttcctcctccccacttgtccgctgggtggtaccctctggaggggtgtggctccttcccatcgctgtcacaggcggttatgaaattcaccccctttcctggacactcagacctgaattctttttcatttgagaagtaaacagatggcactttgaaggggcctcaccgagtgggggcatcatcaaaaactttggagtcccctcacctcctctaaggttgggcagggtgaccctgaagtgagcacagcctagggctgagctggggacctggtaccctcctggctcttgatacccccctctgtcttgtgaaggcagggggaaggtggggtcctggagcagaccaccccgcctgccctcatggcccctctgacctgcactggggagcccgtctcagtgttgagccttttccctctttggctcccctgtaccttttgaggagccccagctaccctttttctccagctgggctctgcaattcccctctgctgctgtccctcccccttgtcctttcccttcagtaccctctcagctccaggtggctctgaggtgcctgtcccacccccacccccagctcaatggactggaaggggaagggacacacaagaagaagggcaccctagttctacctcaggcagctcaagcagcgaccgccccctcctctagctgtgggggtgagggtcccatgtggtggcacaggcccccttgagtggggttatctctgtgttaggggtatatgatgggggagtagatctttctaggagggagacactggcccctcaaatcgtccagcgaccttcctcatccaccccatccctccccagttcattgcactttgattagcagcggaacaaggagtcagacattttaagatggtggcagtagaggctatggacagggcatgccacgtgggctcatatggggctgggagtagttgtctttcctggcactaacgttgagcccctggaggcactgaagtgcttagtgtacttggagtattggggtctgaccccaaacaccttccagctcctgtaacatactggcctggactgttttctctcggctccccatgtgtcctggttcccgtttctccacctagactgtaaacctctcgagggcagggaccacaccctgtactgttctgtgtctttcacagctcctcccacaatgctgaatatacagcaggtgctcaataaatgattcttagtgactttacttgtaa

SEQ ID NO: 1253 - DNA, 766 bp, Homo sapiens
  source 1..766: mol_type = genomic DNA
gagcagctgccgaagtcagttccttgtggagccggagctgggcgcggattcgccgaggcaccgaggcactcagaggaggaaaatccagttgctgccaaggtcgtgcagtcactcagccctggagtcaagccagagcaggcaggcgccatgtcagaaccggctggggatgtccgtcagaacccatgcggcagcaaggcctgccgccgcctcttcggcccagtggacagcgagcagctgagccgcgactgtgatgcgctaatggcgggctgcatccaggaggcccgtgagcgatggaacttcgactttgtcaccgagacaccactggagggtgacttcgcctgggagcgtgtgcggggccttggcctgcccaagctctaccttcccacggggccccggcgaggccgggatgagttgggaggaggcaggcggcctggcacctcacctgctctgctgcaggggacagcagaggaagaccatgtggacctgtcactgtcttgtacccttgtgcctcgctcaggggagcaggctgaagggtccccaggtggacctggagactctcagggtcgaaaacggcggcagaccagcatgacagatttctaccactccaaacgccggctgatcttctccaagaggaagccctaatccgcccacaggaagcctgcagtcctggaagcgcgagggcctcaaaggcccgctctacatcttctgccttagtctcagtttgtgtgtcttaattattatttgtgttttaatttaaacacctcct

SEQ ID NO: 1254 - DNA, 2261 bp, Homo sapiens
  source 1..2261: mol_type = genomic DNA
agctgaggtgtgagcagctgccgaagtcagttccttgtggagccggagctgggcgcggattcgccgaggcaccgaggcactcagaggaggtgagagagcggcggcagacaacaggggaccccgggccggcggcccagagccgagccaagcgtgcccgcgtgtgtccctgcgtgtccgcgaggatgcgtgttcgcgggtgtgtgctgcgttcacaggtgtttctgcggcaggcgccatgtcagaaccggctggggatgtccgtcagaacccatgcggcagcaaggcctgccgccgcctcttcggcccagtggacagcgagcagctgagccgcgactgtgatgcgctaatggcgggctgcatccaggaggcccgtgagcgatggaacttcgactttgtcaccgagacaccactggagggtgacttcgcctgggagcgtgtgcggggccttggcctgcccaagctctaccttcccacggggccccggcgaggccgggatgagttgggaggaggcaggcggcctggcacctcacctgctctgctgcaggggacagcagaggaagaccatgtggacctgtcactgtcttgtacccttgtgcctcgctcaggggagcaggctgaagggtccccaggtggacctggagactctcagggtcgaaaacggcggcagaccagcatgacagatttctaccactccaaacgccggctgatcttctccaagaggaagccctaatccgcccacaggaagcctgcagtcctggaagcgcgagggcctcaaaggcccgctctacatcttctgccttagtctcagtttgtgtgtcttaattattatttgtgttttaatttaaacacctcctcatgtacataccctggccgccccctgccccccagcctctggcattagaattatttaaacaaaaactaggcggttgaatgagaggttcctaagagtgctgggcatttttattttatgaaatactatttaaagcctcctcatcccgtgttctccttttcctctctcccggaggttgggtgggccggcttcatgccagctacttcctcctccccacttgtccgctgggtggtaccctctggaggggtgtggctccttcccatcgctgtcacaggcggttatgaaattcaccccctttcctggacactcagacctgaattctttttcatttgagaagtaaacagatggcactttgaaggggcctcaccgagtgggggcatcatcaaaaactttggagtcccctcacctcctctaaggttgggcagggtgaccctgaagtgagcacagcctagggctgagctggggacctggtaccctcctggctcttgatacccccctctgtcttgtgaaggcagggggaaggtggggtcctggagcagaccaccccgcctgccctcatggcccctctgacctgcactggggagcccgtctcagtgttgagccttttccctctttggctcccctgtaccttttgaggagccccagctaccctttttctccagctgggctctgcaattcccctctgctgctgtccctcccccttgtcctttcccttcagtaccctctcagctccaggtggctctgaggtgcctgtcccacccccacccccagctcaatggactggaaggggaagggacacacaagaagaagggcaccctagttctacctcaggcagctcaagcagcgaccgccccctcctctagctgtgggggtgagggtcccatgtggtggcacaggcccccttgagtggggttatctctgtgttaggggtatatgatgggggagtagatctttctaggagggagacactggcccctcaaatcgtccagcgaccttcctcatccaccccatccctccccagttcattgcactttgattagcagcggaacaaggagtcagacattttaagatggtggcagtagaggctatggacagggcatgccacgtgggctcatatggggctgggagtagttgtctttcctggcactaacgttgagcccctggaggcactgaagtgcttagtgtacttggagtattggggtctgaccccaaacaccttccagctcctgtaacatactggcctggactgttttctctcggctccccatgtgtcctggttcccgtttctccacctagactgtaaacctctcgagggcagggaccacaccctgtactgttctgtgtctttcacagctcctcccacaatgctgaatatacagcaggtgctcaataaatgattcttagtgacttt

SEQ ID NO: 1255 - DNA, 1157 bp, Homo sapiens
  source 1..1157: mol_type = genomic DNA
agtttccccagcagtgtatacgggctatgtggggagtattcaggagacagacaactcactcgtcaaatcctccccttcctggccaacaaagctgctgcaaccacagggatttcttctgttcaggcgccatgtcagaaccggctggggatgtccgtcagaacccatgcggcagcaaggcctgccgccgcctcttcggcccagtggacagcgagcagctgagccgcgactgtgatgcgctaatggcgggctgcatccaggaggcccgtgagcgatggaacttcgactttgtcaccgagacaccactggagggtgacttcgcctgggagcgtgtgcggggccttggcctgcccaagctctaccttcccacggggccccggcgaggccgggatgagttgggaggaggcaggcggcctggcacctcacctgctctgctgcaggggacagcagaggaagaccatgtggacctgtcactgtcttgtacccttgtgcctcgctcaggggagcaggctgaagggtccccaggtggacctggagactctcagggtcgaaaacggcggcagaccagcatgacagatttctaccactccaaacgccggctgatcttctccaagaggaagccctaatccgcccacaggaagcctgcagtcctggaagcgcgagggcctcaaaggcccgctctacatcttctgccttagtctcagtttgtgtgtcttaattattatttgtgttttaatttaaacacctcctcatgtacataccctggccgccccctgccccccagcctctggcattagaattatttaaacaaaaactaggcggttgaatgagaggttcctaagagtgctgggcatttttattttatgaaatactatttaaagcctcctcatcccgtgttctccttttcctctctcccggaggttgggtgggccggcttcatgccagctacttcctcctccccacttgtccgctgggtggtaccctctggaggggtgtggctccttcccatcgctgtcacaggcggttatgaaattcaccccctttcctggacactcagacctgaattctttttcatttgagaagtaaacagatggcactttgaaggggcctcaccgagtgggggcatcatcaaaaactttggagtcccctcacctcctcta

SEQ ID NO: 1256 - DNA, 2657 bp, Homo sapiens
  source 1..2657: mol_type = genomic DNA
tttaatttctccgaggccagccagagcaggtttgttggcagcagtacccctccagcagtcacgcgaccagccaatctcccggcggcgctcggggaggcggcgcgctcgggaacgaggggaggtggcggaaccgcgccggggccaccttaaggccgcgctcgccagcctcggcggggcggctcccgccgccgcaaccaatggatctcctcctctgtttaaatagactcgccgtgtcaatcattttcttcttcgtcagcctcccttccaccgccatattgggccactaaaaaaagggggctcgtcttttcggggtgtttttctccccctcccctgtccccgcttgctcacggctctgcgactccgacgccggcaaggtttggagagcggctgggttcgcgggacccgcgggcttgcacccgcccagactcggacgggctttgccaccctctccgcttgcctggtcccctctcctctccgccctcccgctcgccagtccatttgatcagcggagactcggcggccgggccggggcttccccgcagcccctgcgcgctcctagagctcgggccgtggctcgtcggggtctgtgtcttttggctccgagggcagtcgctgggcttccgagaggggttcgggctgcgtaggggcgctttgttttgttcggttttgtttttttgagagtgcgagagaggcggtcgtgcagacccgggagaaagatgtcaaacgtgcgagtgtctaacgggagccctagcctggagcggatggacgccaggcaggcggagcaccccaagccctcggcctgcaggaacctcttcggcccggtggaccacgaagagttaacccgggacttggagaagcactgcagagacatggaagaggcgagccagcgcaagtggaatttcgattttcagaatcacaaacccctagagggcaagtacgagtggcaagaggtggagaagggcagcttgcccgagttctactacagacccccgcggccccccaaaggtgcctgcaaggtgccggcgcaggagagccaggatgtcagcgggagccgcccggcggcgcctttaattggggctccggctaactctgaggacacgcatttggtggacccaaagactgatccgtcggacagccagacggggttagcggagcaatgcgcaggaataaggaagcgacctgcaaccgacgattcttctactcaaaacaaaagagccaacagaacagaagaaaatgtttcagacggttccccaaatgccggttctgtggagcagacgcccaagaagcctggcctcagaagacgtcaaacgtaaacagctcgaattaagaatatgtttccttgtttatcagatacatcactgcttgatgaagcaaggaagatatacatgaaaattttaaaaatacatatcgctgacttcatggaatggacatcctgtataagcactgaaaaacaacaacacaataacactaaaattttaggcactcttaaatgatctgcctctaaaagcgttggatgtagcattatgcaattaggtttttccttatttgcttcattgtactacctgtgtatatagtttttaccttttatgtagcacataaactttggggaagggagggcagggtggggctgaggaactgacgtggagcggggtatgaagagcttgctttgatttacagcaagtagataaatatttgacttgcatgaagagaagcaattttggggaagggtttgaattgttttctttaaagatgtaatgtccctttcagagacagctgatacttcatttaaaaaaatcacaaaaatttgaacactggctaaagataattgctatttatttttacaagaagtttattctcatttgggagatctggtgatctcccaagctatctaaagtttgttagatagctgcatgtggcttttttaaaaaagcaacagaaacctatcctcactgccctccccagtctctcttaaagttggaatttaccagttaattactcagcagaatggtgatcactccaggtagtttggggcaaaaatccgaggtgcttgggagttttgaatgttaagaattgaccatctgcttttattaaatttgttgacaaaattttctcattttcttttcacttcgggctgtgtaaacacagtcaaaataattctaaatccctcgatatttttaaagatctgtaagtaacttcacattaaaaaatgaaatattttttaatttaaagcttactctgtccatttatccacaggaaagtgttatttttcaaggaaggttcatgtagagaaaagcacacttgtaggataagtgaaatggatactacatctttaaacagtatttcattgcctgtgtatggaaaaaccatttgaagtgtacctgtgtacataactctgtaaaaacactgaaaaattatactaacttatttatgttaaaagattttttttaatctagacaatatacaagccaaagtggcatgttttgtgcatttgtaaatgctgtgttgggtagaataggttttcccctcttttgttaaataatatggctatgcttaaaaggttgcatactgagccaagtataattttttgtaatgtgtgaaaaagatgccaattattgttacacattaagtaatcaataaagaaaacttccatagctatt

SEQ ID NO: 1257 - DNA, 1405 bp, Homo sapiens
  source 1..1405: mol_type = genomic DNA
acggctctgcgactccgacgccggcaaggtttggagagcggctgggttcgcgggacccgcgggcttgcacccgcccagactcggacgggctttgccaccctctccgcttgcctggtcccctctcctctccgccctcccgctcgccagtccatttgatcagcggagactcggcctgcaggaacctcttcggcccggtggaccacgaagagttaacccgggacttggagaagcactgcagagacatggaagaggcgagccagcgcaagtggaatttcgattttcagaatcacaaacccctagagggcaagtacgagtggcaagaggtggagaagggcagcttgcccgagttctactacagacccccgcggccccccaaaggtgcctgcaaggtgccggcgcaggagagccaggatgtcagcgggagccgcccggcggcgcctttaattggggctccggctaactctgaggacacgcatttggtggacccaaagactgatccgtcggacagccagacggggttagcggagcaatgcgcaggaataaggaagcgacctgcaaccgacgattcttctactcaaaacaaaagagccaacagaacagaagaaaatgtttcagacggttccccaaatgccggttctgtggagcagacgcccaagaagcctggcctcagaagacgtcaaacgtaaacagctcgaattaagaatatgtttccttgtttatcagatacatcactgcttgatgaagcaaggaagatatacatgaaaattttaaaaatacatatcgctgacttcatggaatggacatcctgtataagcactgaaaaacaacaacacaataacactaaaattttaggcactcttaaatgatctgcctctaaaagcgttggatgtagcattatgcaattaggtttttccttatttgcttcattgtactacctgtgtatatagtttttaccttttatgtagcacataaactttggggaagggagggcagggtggggctgaggaactgacgtggagcggggtatgaagagcttgctttgatttacagcaagtagataaatatttgacttgcatgaagagaagcaattttggggaagggtttgaattgttttctttaaagatgtaatgtccctttcagagacagctgatacttcatttaaaaaaatcacaaaaatttgaacactggctaaagataattgctatttatttttacaagaagtttattctcatttgggagatctggtgatctcccaagctatctaaagtttgttagatagctgcatgtggcttttttaaaaaagcaacagaaacctatcctcactgccctccccagtctctcttaaagttggaatttaccagttaattactcagcagaatggtgatcactccaggtagtttggggc

SEQ ID NO: 1258 - DNA, 1745 bp, Homo sapiens
  source 1..1745: mol_type = genomic DNA
agtgcgctgtgctcgaggggtgccggccaggcctgagcgagcgagctagccagcaggcatcgagggggcgcggctgccgtccggacgagacaggcgaacccgacgcagaagagtccaccaccggacagccagcacatccacgatggagcgtcttgtcgcccgtgggaccttcccagtactagtgcgcaccagcgcctgccgcagcctcttcgggccggtggaccacgaggagctgagccgcgagctgcaggcccgcctggccgagctgaacgccgaggaccagaaccgctgggattacgacttccagcaggacatgccgctgcggggccctggacgcctgcagtggaccgaagtggacagcgactcggtgcccgcgttctaccgcgagacggtgcaggtggggcgctgccgcctgctgctggcgccgcggcccgtcgcggtcgcggtggctgtcagcccgcccctcgagccggccgctgagtccctcgacggcctcgaggaggcgccggagcagctgcctagtgtcccggtcccggccccggcgtccaccccgcccccagtcccggtcctggctccagccccggccccggctccggctccggtcgcggctccggtcgcggctccggtcgcggtcgcggtcctggccccggccccggccccggctccggctccggctccggccccggctccagtcgcggccccggccccagccccggccccggccccggccccggcccccgccccggccccggccccggacgcggcgcctcaagagagcgccgagcagggcgcgaaccaggggcagcgcggccaggagcctctcgctgaccagctgcactcggggatttcgggacgtcccgcggccggcaccgcggccgccagcgccaacggcgcggcgatcaagaagctgtccgggcctctgatctccgatttcttcgccaagcgcaagagatcagcgcctgagaagtcgtcgggcgatgtccccgcgccgtgtccctctccaagcgccgcccctggcgtgggctcggtggagcagaccccgcgcaagaggctgcggtgagccaaagcccaaagagccccgagggaacctgccggggcagcggacgttggaagggcgctgggcctcggctgggaccgttcatgtagcagcaaccggcggcggctgccgcagagcagcgttcggttttgtttttaaattttgaaaactgtgcaatgtattaataacgtctttttatatctaaatgtattctgcacgagaaggtacactggtcccaaggtgtaaagctttaagagtcatttatataaaatgtttaatctctgctgaaactcagtgcaaaaaaaagaaaaaagaaaaaaaaaaggaaaaaataaaaaaaccatgtatatttgtacaaaaagtttttaaagttatactaacttatattttctatttatgtccaggcgtggaccgctctgccacgcactagctcggttattggttatgccaaaggcactctccatctcccacatctggttattgacaagtgtaactttattttcatcgcggactctggggaagggggtcactcacaagctgtagctgccatacatgcccatctagcttgcagtctcttcgcgctttcgctgtctctcttattatgactgtgtttatctgaaacttgaagacaagtctgttaaaatggttcctgagccgtctgtaccactgccccggcccctcgtccgccgggttctaaataaagaggccg

SEQ ID NO: 1259 - DNA, 2051 bp, Homo sapiens
  source 1..2051: mol_type = genomic DNA
ggtgttgttgaaactgaaaatactacattatgctaatcgcggccgggcccgcgcgcacgggggtggggcccgcgcgtataaagggggcgcaggcgggctgggcgttccacaggccaagtgcgctgtgctcgaggggtgccggccaggcctgagcgagcgagctagccagcaggcatcgagggggcgcggctgccgtccggacgagacaggcgaacccgacgcagaagagtccaccaccggacagccaggtagccgccgcgtccctcgcacacgcagagtcgggcggcgcggggtctcccttgcgcccggcctccgccctctcctcctctcctttccccttcttctcgctgtcctctcctctctcgctgcccgcgtttgcgcagccccgggccatgtccgacgcgtccctccgcagcacatccacgatggagcgtcttgtcgcccgtgggaccttcccagtactagtgcgcaccagcgcctgccgcagcctcttcgggccggtggaccacgaggagctgagccgcgagctgcaggcccgcctggccgagctgaacgccgaggaccagaaccgctgggattacgacttccagcaggacatgccgctgcggggccctggacgcctgcagtggaccgaagtggacagcgactcggtgcccgcgttctaccgcgagacggtgcaggtggggcgctgccgcctgctgctggcgccgcggcccgtcgcggtcgcggtggctgtcagcccgcccctcgagccggccgctgagtccctcgacggcctcgaggaggcgccggagcagctgcctagtgtcccggtcccggccccggcgtccaccccgcccccagtcccggtcctggctccagccccggccccggctccggctccggtcgcggctccggtcgcggctccggtcgcggtcgcggtcctggccccggccccggccccggctccggctccggctccggccccggctccagtcgcggccccggccccagccccggccccggccccggccccggcccccgccccggccccggccccggacgcggcgcctcaagagagcgccgagcagggcgcgaaccaggggcagcgcggccaggagcctctcgctgaccagctgcactcggggatttcgggacgtcccgcggccggcaccgcggccgccagcgccaacggcgcggcgatcaagaagctgtccgggcctctgatctccgatttcttcgccaagcgcaagagatcagcgcctgagaagtcgtcgggcgatgtccccgcgccgtgtccctctccaagcgccgcccctggcgtgggctcggtggagcagaccccgcgcaagaggctgcggtgagccaatttagagcccaaagagccccgagggaacctgccggggcagcggacgttggaagggcgctgggcctcggctgggaccgttcatgtagcagcaaccggcggcggctgccgcagagcagcgttcggttttgtttttaaattttgaaaactgtgcaatgtattaataacgtctttttatatctaaatgtattctgcacgagaaggtacactggtcccaaggtgtaaagctttaagagtcatttatataaaatgtttaatctctgctgaaactcagtgcaaaaaaaagaaaaaagaaaaaaaaaaggaaaaaataaaaaaaccatgtatatttgtacaaaaagtttttaaagttatactaacttatattttctatttatgtccaggcgtggaccgctctgccacgcactagctcggttattggttatgccaaaggcactctccatctcccacatctggttattgacaagtgtaactttattttcatcgcggactctggggaagggggtcactcacaagctgtagctgccatacatgcccatctagcttgcagtctcttcgcgctttcgctgtctctcttattatgactgtgtttatctgaaacttgaagacaagtctgttaaaatggttcctgagccgtctgtaccactgccccggcccctcgtccgccgggttctaaataaagaggccgaaaaatgctgcaactcca

SEQ ID NO: 1260 - DNA, 1570 bp, Homo sapiens
  source 1..1570: mol_type = genomic DNA
aggccaagtgcgctgtgctcgaggggtgccggccaggcctgagcgagcgagctagccagcaggcatcgagggggcgcggctgccgtccggacgagacaggcgaacccgacgcagaagagtccaccaccggacagccaggtagccgccgcgtccctcgcacacgcagagtcgggcggcgcggggtctcccttgcgcccggcctccgccctctcctcctctcctttccccttcttctcgctgtcctctcctctctcgctgcccgcgtttgcgcagccccgggccatgtccgacgcgtccctccgcagcacatccacgatggagcgtcttgtcgcccgtgggaccttcccagtactagtgcgcaccagcgcctgccgcagcctcttcgggccggtggaccacgaggagctgagccgcgagctgcaggcccgcctggccgagctgaacgccgaggaccagaaccgctgggattacgacttccagcaggacatgccgctgcggggccctggacgcctgcagtggaccgaagtggacagcgactcggtgcccgcgttctaccgcgagacggtgcaggtggggcgctgccgcctgctgctggcgccgcggcccgtcgcggtcgcggtggctgtcagcccgcccctcgagccggccgctgagtccctcgacggcctcgaggaggcgccggagcagctgcctagtgtcccggtcccggccccggcgtccaccccgcccccagtcccggtcctggctccagccccggccccggctccggctccggtcgcggctccggtcgcggctccggtcgcggtcgcggtcctggccccggccccggccccggctccggctccggctccggccccggctccagtcgcggccccggccccagccccggccccggccccggccccggcccccgccccggccccggccccggacgcggcgcctcaagagagcgccgagcagggcgcgaaccaggggcagcgcggccaggagcctctcgctgaccagctgcactcggggatttcgggacgtcccgcggccggcaccgcggccgccagcgccaacggcgcggcgatcaagaagctgtccgggcctctgatctccgatttcttcgccaagcgcaagagatcagcgcctgagaagtcgtcgggcgatgtccccgcgccgtgtccctctccaagcgccgcccctggcgtgggctcggtggagcagaccccgcgcaagaggctgcggtgagccaaagcccaaagagccccgagggaacctgccggggcagcggacgttggaagggcgctgggcctcggctgggaccgttcatgtagcagcaaccggcggcggctgccgcagagcagcgttcggttttgtttttaaattttgaaaactgtgcaatgtattaataacgtctttttatatctaaatgtattctgcacgagaaggtacactggtcccaaggtgtaaagctttaagagtcatttatataaaatgtttaatctctgctgaaactcagtgcaaaaaaaagaaaaaagaaaaaaaaaaggaaaaaataaaaaaaccatgtatatttgtacaaaaa

SEQ ID NO: 1261 - DNA, 1811 bp, Homo sapiens
  source 1..1811: mol_type = genomic DNA
cccgcgcgtataaagggggcgcaggcgggctgggcgttccacaggccaagtgcgctgtgctcgaggggtgccggccaggcctgagcgagcgagctagccagcaggcatcgagggggcgcggctgccgtccggacgagacaggcgaacccgacgcagaagagtccaccaccggacagccagcacatccacgatggagcgtcttgtcgcccgtgggaccttcccagtactagtgcgcaccagcgcctgccgcagcctcttcgggccggtggaccacgaggagctgagccgcgagctgcaggcccgcctggccgagctgaacgccgaggaccagaaccgctgggattacgacttccagcaggacatgccgctgcggggccctggacgcctgcagtggaccgaagtggacagcgactcggtgcccgcgttctaccgcgagacggtgcaggtggggcgctgccgcctgctgctggcgccgcggcccgtcgcggtcgcggtggctgtcagcccgcccctcgagccggccgctgagtccctcgacggcctcgaggaggcgccggagcagctgcctagtgtcccggtcccggccccggcgtccaccccgcccccagtcccggtcctggctccagccccggccccggctccggctccggtcgcggctccggtcgcggctccggtcgcggtcgcggtcctggccccggccccggccccggctccggctccggctccggccccggctccagtcgcggccccggccccagccccggccccggccccggccccggcccccgccccggccccggccccggacgcggcgcctcaagagagcgccgagcagggcgcgaaccaggggcagcgcggccaggagcctctcgctgaccagctgcactcggggatttcgggacgtcccgcggccggcaccgcggccgccagcgccaacggcgcggcgatcaagaagctgtccgggcctctgatctccgatttcttcgccaagcgcaagagatcagcgcctgagaagtcgtcgggcgatgtccccgcgccgtgtccctctccaagcgccgcccctggcgtgggctcggtggagcagaccccgcgcaagaggctgcggtgagccaatttagagcccaaagagccccgagggaacctgccggggcagcggacgttggaagggcgctgggcctcggctgggaccgttcatgtagcagcaaccggcggcggctgccgcagagcagcgttcggttttgtttttaaattttgaaaactgtgcaatgtattaataacgtctttttatatctaaatgtattctgcacgagaaggtacactggtcccaaggtgtaaagctttaagagtcatttatataaaatgtttaatctctgctgaaactcagtgcaaaaaaaagaaaaaagaaaaaaaaaaggaaaaaataaaaaaaccatgtatatttgtacaaaaagtttttaaagttatactaacttatattttctatttatgtccaggcgtggaccgctctgccacgcactagctcggttattggttatgccaaaggcactctccatctcccacatctggttattgacaagtgtaactttattttcatcgcggactctggggaagggggtcactcacaagctgtagctgccatacatgcccatctagcttgcagtctcttcgcgctttcgctgtctctcttattatgactgtgtttatctgaaacttgaagacaagtctgttaaaatggttcctgagccgtctgtaccactgccccggcccctcgtccgccgggttctaaataaagaggccgaaaaatgctgcaa

SEQ ID NO: 1262 - DNA, 880 bp, Homo sapiens
  source 1..880: mol_type = genomic DNA
ggagagggggagagcaggcagcgggcggcggggagcagcatggagccggcggcggggagcagcatggagccttcggctgactggctggccacggccgcggcccggggtcgggtagaggaggtgcgggcgctgctggaggcgggggcgctgcccaacgcaccgaatagttacggtcggaggccgatccaggtcatgatgatgggcagcgcccgagtggcggagctgctgctgctccacggcgcggagcccaactgcgccgaccccgccactctcacccgacccgtgcacgacgctgcccgggagggcttcctggacacgctggtggtgctgcaccgggccggggcgcggctggacgtgcgcgatgcctggggccgtctgcccgtggacctggctgaggagctgggccatcgcgatgtcgcacggtacctgcgcgcggctgcggggggcaccagaggcagtaaccatgcccgcatagatgccgcggaaggtccctcagaaatgatcggaaaccatttgtgggtttgtagaagcaggcatgcgtagggaagctacgggattccgccgaggagcgccagagcctgaggcgccctttggttatcgcaagctggctggctcactccgcaccaggtgcaaaagatgcctggggatgcgggaagggaaaggccacatcttcacgccttcgcgcctggcattacatccccgattgaaagaaccagagaggctctgagaaacctcgggaaacttagatcatcagtcaccgaaggtcctacagggccacaactgcccccgccacaacccaccccgctttcgtagttttcatttagaaaatagagcttttaaaaatgtcctgccttttaacgtagatatatgccttccccca

SEQ ID NO: 1263 - DNA, 1218 bp, Homo sapiens
  source 1..1218: mol_type = genomic DNA
cccaacctggggcgacttcaggggtgccacattcgctaagtgctcggagttaatagcacctcctccgagcactcgctcacggcgtccccttgcctggaaagataccgcggtccctccagaggatttgagggacagggtcggagggggctcttccgccagcaccggaggaagaaagaggaggggctggctggtcaccagagggtggggcggaccgcgtgcgctcggcggctgcggagagggggagagcaggcagcgggcggcggggagcagcatggagccggcggcggggagcagcatggagccttcggctgactggctggccacggccgcggcccggggtcgggtagaggaggtgcgggcgctgctggaggcgggggcgctgcccaacgcaccgaatagttacggtcggaggccgatccaggtcatgatgatgggcagcgcccgagtggcggagctgctgctgctccacggcgcggagcccaactgcgccgaccccgccactctcacccgacccgtgcacgacgctgcccgggagggcttcctggacacgctggtggtgctgcaccgggccggggcgcggctggacgtgcgcgatgcctggggccgtctgcccgtggacctggctgaggagctgggccatcgcgatgtcgcacggtacctgcgcgcggctgcggggggcaccagaggcagtaaccatgcccgcatagatgccgcggaaggtccctcagacatccccgattgaaagaaccagagaggctctgagaaacctcgggaaacttagatcatcagtcaccgaaggtcctacagggccacaactgcccccgccacaacccaccccgctttcgtagttttcatttagaaaatagagcttttaaaaatgtcctgccttttaacgtagatatatgccttcccccactaccgtaaatgtccatttatatcattttttatatattcttataaaaatgtaaaaaagaaaaacaccgcttctgccttttcactgtgttggagttttctggagtgagcactcacgccctaagcgcacattcatgtgggcatttcttgcgagcctcgcagcctccggaagctgtcgacttcatgacaagcattttgtgaactagggaagctcaggggggttactggcttctcttgagtcacactgctagcaaatggcagaaccaaagctcaaataaaaataaaataattttcattcattcactc

SEQ ID NO: 1264 - DNA, 1151 bp, Homo sapiens
  source 1..1151: mol_type = genomic DNA
cgctcagggaaggcgggtgcgcgcctgcggggcggagatgggcagggggcggtgcgtgggtcccagtctgcagttaagggggcaggagtggcgctgctcacctctggtgccaaagggcggcgcagcggctgccgagctcggccctggaggcggcgagaacatggtgcgcaggttcttggtgaccctccggattcggcgcgcgtgcggcccgccgcgagtgagggttttcgtggttcacatcccgcggctcacgggggagtgggcagcgccaggggcgcccgccgctgtggccctcgtgctgatgctactgaggagccagcgtctagggcagcagccgcttcctagaagaccaggtcatgatgatgggcagcgcccgagtggcggagctgctgctgctccacggcgcggagcccaactgcgccgaccccgccactctcacccgacccgtgcacgacgctgcccgggagggcttcctggacacgctggtggtgctgcaccgggccggggcgcggctggacgtgcgcgatgcctggggccgtctgcccgtggacctggctgaggagctgggccatcgcgatgtcgcacggtacctgcgcgcggctgcggggggcaccagaggcagtaaccatgcccgcatagatgccgcggaaggtccctcagacatccccgattgaaagaaccagagaggctctgagaaacctcgggaaacttagatcatcagtcaccgaaggtcctacagggccacaactgcccccgccacaacccaccccgctttcgtagttttcatttagaaaatagagcttttaaaaatgtcctgccttttaacgtagatatatgccttcccccactaccgtaaatgtccatttatatcattttttatatattcttataaaaatgtaaaaaagaaaaacaccgcttctgccttttcactgtgttggagttttctggagtgagcactcacgccctaagcgcacattcatgtgggcatttcttgcgagcctcgcagcctccggaagctgtcgacttcatgacaagcattttgtgaactagggaagctcaggggggttactggcttctcttgagtcacactgctagcaaatggcagaaccaaagctcaaataaaaataaaataattttcattcattcactca

SEQ ID NO: 1265 - DNA, 716 bp, Homo sapiens
  source 1..716: mol_type = genomic DNA
ctcctccgagcactcgctcacggcgtccccttgcctggaaagataccgcggtccctccagaggatttgagggacagggtcggagggggctcttccgccagcaccggaggaagaaagaggaggggctggctggtcaccagagggtggggcggaccgcgtgcgctcggcggctgcggagagggggagagcaggcagcgggcggcggggagcagcatggagccggcggcggggagcagcatggagccttcggctgactggctggccacggccgcggcccggggtcgggtagaggaggtgcgggcgctgctggaggcgggggcgctgcccaacgcaccgaatagttacggtcggaggccgatccaggtcatgatgatgggcagcgcccgagtggcggagctgctgctgctccacggcgcggagcccaactgcgccgaccccgccactctcacccgacccgtgcacgacgctgcccgggagggcttcctggacacgctggtggtgctgcaccgggccggggcgcggctggacgtgcgcgatgcctggggccgtctgcccgtggacctggctgaggagctgggccatcgcgatgtcgcacggtacctgcgcgcggctgcggggggcaccagaggcagtaaccatgcccgcatagatgccgcggaaggtccctcagaaatgatcggaaaccatttgtgggtttgtagaagcaggcatgcgtag

SEQ ID NO: 1266 - DNA, 905 bp, Homo sapiens
  source 1..905: mol_type = genomic DNA
cgctcagggaaggcgggtgcgcgcctgcggggcggagatgggcagggggcggtgcgtgggtcccagtctgcagttaagggggcaggagtggcgctgctcacctctggtgccaaagggcggcgcagcggctgccgagctcggccctggaggcggcgagaacatggtgcgcaggttcttggtgaccctccggattcggcgcgcgtgcggcccgccgcgagtgagggttttcgtggttcacatcccgcggctcacgggggagtgggcagcgccaggggcgcccgccgctgtggccctcgtgctgatgctactgaggagccagcgtctagggcagcagccgcttcctagaagaccaggtcatgatgatgggcagcgcccgagtggcggagctgctgctgctccacggcgcggagcccaactgcgccgaccccgccactctcacccgacccgtgcacgacgctgcccgggagggcttcctggacacgctggtggtgctgcaccgggccggggcgcggctggacgtgcgcgatgcctggggccgtctgcccgtggacctggctgaggagctgggccatcgcgatgtcgcacggtacctgcgcgcggctgcggggggcaccagaggcagtaaccatgcccgcatagatgccgcggaaggtccctcagacatccccgattgaaagaaccagagaggctctgagaaacctcgggaaacttagatcatcagtcaccgaaggtcctacagggccacaactgcccccgccacaacccaccccgctttcgtagttttcatttagaaaatagagcttttaaaaatgtcctgccttttaacgtagatatatgccttcccccactaccgtaaatgtccatttatatcattttttatatattcttataaaaatgtaaaaaag

SEQ ID NO: 1267 - DNA, 3829 bp, Homo sapiens
  source 1..3829: mol_type = genomic DNA
gtgaggactccgcgacgcgtccgcaccctgcggccagagcggctttgagctcggctgcgtccgcgctaggcgctttttcccagaagcaatccaggcgcgcccgctggttcttgagcgccaggaaaagcccggagctaacgaccggccgctcggccactgcacggggccccaagccgcagaaggacgacgggagggtaatgaagctgagcccaggtctcctaggaaggagagagtgcgccggagcagcgtgggaaagaagggaagagtgtcgttaagtttacggccaacggtggattatccgggccgctgcgcgtctgggggctgcggaatgcgcgaggagaacaagggcatgcccagtgggggcggcagcgatgagggtctggccagcgccgcggcgcggggactagtggagaaggtgcgacagctcctggaagccggcgcggatcccaacggagtcaaccgtttcgggaggcgcgcgatccaggtcatgatgatgggcagcgcccgcgtggcggagctgctgctgctccacggcgcggagcccaactgcgcagaccctgccactctcacccgaccggtgcatgatgctgcccgggagggcttcctggacacgctggtggtgctgcaccgggccggggcgcggctggacgtgcgcgatgcctggggtcgtctgcccgtggacttggccgaggagcggggccaccgcgacgttgcagggtacctgcgcacagccacgggggactgacgccaggttccccagccgcccacaacgactttattttcttacccaatttcccacccccacccacctaattcgatgaaggctgccaacggggagcggcggaaagcctgtaagcctgcaagcctgtctgagactcacaggaaggaggagccgaccgggaataaccttccatacatttttttctttgtcttatctggccctcgacactcaccatgaagcgaaacacagagaagcggatttccagggatatttaggagtgtgtgacattccaggggtcgtttgcttttcagggttttctgagggaaagtgcatatgaaatccttgactggacctggtggctacgaatcttccgatggatgaatctcccactccagcgctgagtgggagaaggcagtgattagcacttgggtgacggcagtcgatgcgttcactccaatgtctgctgaggagttatggtgaacccacaacttaggccctagcggcagaaaggaaaacctgaagactgaggacaaagtggaggagggccgaggtgggcttcagtaagtccccggcggcgctttagtttgagcgcatggcaagtcacatgcgtaaacgacactctctggaagccctggagaccctcgcccaactccaccagatagcagaggggtaagagaggatgtgcaagcgacgacagatgctaaaatccctggatcacgacgctgcagagcacctttgcacaggatgctggcctttgctcttactacactgaggagagattcccgcgggttccgcaggcagactacacaggatgaggtggtggagtggagtgagagcaattgtaacggttaactgtaacgttttctttcacacacacacacacacacacacacacacatgctaggatgcggaaatccccttatgacttgctactttttgattttgtgatattttgtactttttagttgttcagcaactgtcttatttaatggggagattttaagtaacataactagtggctctcagttaaaatgtgaggaagaactacagctcttaaatgtagcaatggcactgttgcaaactcagtgcaaacgcctagattgctttcttcttaacctatttatttctttgttaaatttttctgattgtttcctttatagagtgtctcagggtgcagaggtcagactaagaaatattccaaatgtcttttagaagatagatgcacttatgcagtaaattatcttgggatagttcccaaaagattgctgaaaaagtagattgagtataaaaacttgaaaatatatgatggctcgtgggatgtcctactatcactgaacaaactaaaggtgcactgctttgggatttaatttccagggttgcttgatcattatatcattggaacaactgatacttcactactttaataaagaattaacagagattgaactccaagaggtgggtaatttggtttaaaaatacatgttcatgggtttaccactaactcctgagaaatgttaaaggttcacaggggttcccttctctcaatgtttgtaataattgctcataagcaataccagcaattcataaaaactgcttacttatgccatagaaaattaaacacaaagtgtatacatgtattatgcttctaaatgctcattctaccagatacacatttaaaagagaaaaaaggaacagaaacaagtcatttgagagtggagacttataagaaggagtacatttgagttgaatacacaaatctttacttctctaccaattcctattcccaaaatgaacatattactggggaaagttagttgagaatcagagcatatgttattggggaaaggatatgtttattgacacataatctgtaccaggtatgcattaaaatatatttgttaatttaatatttaaacctgagagataggtattgtttcccagatgaggacaatgaggcaaagaaatatcaagtaacttgccaaaggttacaagatattcattccatggatgcacaaagaagtgcatctagttccacagctgattatggttgtcttgcttttcttcccattgcaccagcttgtcctccaaaatcatgaatgatacacatgaagataactttttttaaaaaaaagcagaaatacacaatgatctcccttgtaagctcctaaggtggcttttctttctctaacttctagtaaatataaacggtttgtttgaaaactattttaaaatgtcaacaatatggagaataaccccccccaacacacctataaaaacccaaatttttggaacaaagataatggaacctccattttcaaactgaagcacagggacagaaaatatatttctagttatcacttaagcactcaatcattagaggctacaagaataatatttttaaagttacagtattttacaattattagaaaacattctatataaaagaagtcagttgatactttaaaatctcccatttggtttataaaatcccttaatttgacctctatatcttaaattccaagatgtttaaatttgctagttgcattatactgggtcatgaaaaattatcccttgaaatagatatgaaacatgttacttcatttctggtttaaataacttgtggaatctttcctaatgacaacctgatattaagggaaactaaagaaaatgttattgtggatcccacagtactatattacactgttttttttgtttgttttgttagttttttttatttaaagcaaacctcaaacattattgggtatcaattaccacctggttgtattgaaatagtaacttatcaatgccatgtaaaaattaattccattttcgaagccacctggcagacaggtttagctgtttcatcagcagcctaatatatactgttaaatttgttaaggatttcactttgaaggatacatgcaaaacatatagttactattttcatgagtcctgcttctagctccattgtggaatacagaaaattaaatatacctgttaagttcgtatctaaacctaagacattaccaaggtttgtacaaattctactacctgacatttattccaagaagatctggaaagttaaataaatttataaatttaataaca

SEQ ID NO: 1268 - DNA, 859 bp, Homo sapiens
  source 1..859: mol_type = genomic DNA
ccgcgacgcgtccgcaccctgcggccagagcggctttgagctcggctgcgtccgcgctaggcgctttttcccagaagcaatccaggcgcgcccgctggttcttgagcgccaggaaaagcccggagctaacgaccggccgctcggccactgcacggggccccaagccgcagaaggacgacgggagggtaatgaagctgagcccaggtctcctaggaaggagagagtgcgccggagcagcgtgggaaagaagggaagagtgtcgttaagtttacggccaacggtggattatccgggccgctgcgcgtctgggggctgcggaatgcgcgaggagaacaagggcatgcccagtgggggcggcagcgatgagggtctggccagcgccgcggcgcggggactagtggagaaggtgcgacagctcctggaagccggcgcggatcccaacggagtcaaccgtttcgggaggcgcgcgatccaggtagctggggccccagggcctcgccggcagggggcgcgcgaacgcggggcgcggcctcggcggatcggggctggaacctagatcgccgatgtagatttgtacaggagtctccgttggccggaggtcatgatgatgggcagcgcccgcgtggcggagctgctgctgctccacggcgcggagcccaactgcgcagaccctgccactctcacccgaccggtgcatgatgctgcccgggagggcttcctggacacgctggtggtgctgcaccgggccggggcgcggctggacgtgcgcgatgcctggggtcgtctgcccgtggacttggccgaggagcggggccaccgcgacgttgcagggtacctgcgcacagccacgggggactga

SEQ ID NO: 1269 - DNA, 237 bp, Homo sapiens
  source 1..237: mol_type = genomic DNA
atgcgcgaggagaacaagggcatgcccagtgggggcggcagcgatgagggtctggccagcgccgcggcgcggggactagtggagaaggtgcgacagctcctggaagccggcgcggatcccaacggagtcaaccgtttcgggaggcgcgcgatccaggtagctggggccccagggcctcgccggcagggggcgcgcgaacgcggggcgcggcctcggcggatcggggctggaacctag

SEQ ID NO: 1270 - DNA, 2904 bp, Homo sapiens
  source 1..2904: mol_type = genomic DNA
aacacagaagtaaccagactgccatggtagacatgggagagacgaggaagctgagaaaggactatttcgcagtttccagtccttgattaattaaggcttcagagttcgttcttacatatgccatgtcttaagttttcataaaattcagtctacacaagacttgctttttgtgagcactgtgcttagtggcagtccggatttttccctccacccccgcggccacccctgcccaccgcgccgtcgggcatggatctggcaggtgcgaggccgaggccagggctcagcgaaggacgccgagtttacagagcgcgcgcgcctagaggaggcagcagcagccgcagcctggccgcccgaactttgcgagcctggcgggggagcacagaggcgggccgacctgccccgctagcgctgaggaacgactccctttatgccagctcgctgtccgccttcccgcagcgtacgctgcggagcctcaaagaccctgcggccctccacaaccgtcttaaataacaaacccctgtcctcgcccccgtaggaattggggcagctgggggttcgcgtcacagactcaagcccgccagcagaagggcaggccggacttcgcggggccgaaccccgctccagctggggacaggccgcctagccggcaggagggagccggcgcgagagacttgacgggaggaggtggagagcgggaggcgggaatgagggcgcgggaccgggcgggcggagcgtgcgagactgcgagcgcgagcgccagcagggcggagggcggggcgtgggcggcgcccggccttcccgctcccgcggcgctgcaactctgccgagcctccttaaaactctgccgttaaaatgggggcgggtttttcaactcaaaaagcgctcaatttttttcttttcaaaaaaagctgatgaggtcggaaaaaagggagaagaaaccggcaccctctctgagaggcaacagaagcagcaattgtttcagcgaaaaaagcagcaagggagggagtgaaggaaaaaagcaaaaaagggggcgacacgcaagtgcctgtaggggtgaaaggagcagggaccggcgatctagggggggatcagctacaaaagaaactgtcactgggagcggtgcggccaaggaggaagcagtgctgccaggctctgctccagggcacagctggctggcggctgccctgtccgcagcaaaggggcacaggccggggaccgcgagaggtggcaaagtggcaccgggcgccgaggctgctgagcgctcgccgagacggcgaccggactggctgccccggaactgcggcgactctccctactcagaacttggcctacgtttcccaggactctccccatctccagaggcccccacaaaaccgggaaaggaaggaaaggacagcggcggcagcagctcaatgagtgcctacagcagaaagcctgaacgagctcggtcgtaggcgggaagttcccgggggggctgcccagtgcagccgcaatgctgccgcgagctgccccagcagtccgggctccgtagacgctttccgcatcactctccttcctcgggctgccgggagtcccgggacctggcggggccggcatgacgggcttctcgggggcccgccgcacgcccggcagcctccggagacgcgcgccgagcccggctcccacggcctctgaggctcggcggggctgcggctgcctggcgggcgggctccggagctttcctgagcggcattagcccacggcttggcccggacgcgaccaaaggctcttctggagaagcccagagcactgggcaatcgttacgacctgtaacttgagggccaccgaactgctactcccgttcgcctttggcgatcatcttttaaccctccggagcacgtcagcatccagccaccgcggcgctctcccagcagcggaggacccaggactatcccttcggcgagacggatggaaaccgagccccctggaggacctgcccctgcagttctgcctcacacggctcaagtcaccaccgtgaacaagggaccctaaagaatggccgagccttgggggaacgagttggcgtccgcagctgccaggggggacctagagcaacttactagtttgttgcaaaataatgtaaacgtcaatgcacaaaatggatttggaaggactgcgctgcaggttatgaaacttggaaatcccgagattgccaggagactgctacttagaggtgctaatcccgatttgaaagaccgaactggtttcgctgtcattcatgatgcggccagagcaggtttcctggacactttacagactttgctggagtttcaagctgatgttaacatcgaggataatgaagggaacctgcccttgcacttggctgccaaagaaggccacctccgggtggtggagttcctggtgaagcacacggccagcaatgtggggcatcggaaccataagggggacaccgcctgtgatttggccaggctctatgggaggaatgaggttgttagcctgatgcaggcaaacggggctgggggagccacaaatcttcaataaacgtggggagggctcccccacgttgcctctactttatcaattaactgagtagctctcctgacttttaatgtcatttgttaaaatacagttctgtcatatgttaagcagctaaattttctgaaactgcataagtgaaaatcttacaacaggcttatgaatatatttaagcaacatctttttaacctgcaaaatctgttctaacatgtaattgcagataactttgactttcttctgaatattttatctttccttggcttttcccttgcttccccttttgccaatctcaacacccaagttgaagactttgtttttaaaatggtttgtcctgatgcttttgtctaattaaaacactttcaaaacagg

SEQ ID NO: 1271 - DNA, 1220 bp, Homo sapiens
  source 1..1220: mol_type = genomic DNA
ggtattttctgccccgatctatagtcccttgagtctccacacacactcctcacagagatctgtagcgtaggtacgtgacagctctgcctacatctgacgtccggagtcattaaccaggaatgtatgtgtgtctgtgtgtctctctgtggagtcgtcagaattcttcataggggttaagctaaaaaagcgaggcgaggagcccctctccaatggctcagttttgctgaataatcacgtgtgaatcgaggggcgggcttttggcaggcagatcttactagtatttactaccaagctctactccagattaaccatcccagtccttctgtcagtctccgatgccatcatgcagcctggttaggagcaaaggaaaggggaaaaagaaaaacgactaattcatcttttcctgatcgtcaggaccctaaagaatggccgagccttgggggaacgagttggcgtccgcagctgccaggggggacctagagcaacttactagtttgttgcaaaataatgtaaacgtcaatgcacaaaatggatttggaaggactgcgctgcaggttatgaaacttggaaatcccgagattgccaggagactgctacttagaggtgctaatcccgatttgaaagaccgaactggtttcgctgtcattcatgatgcggccagagcaggtttcctggacactttacagactttgctggagtttcaagctgatgttaacatcgaggataatgaagggaacctgcccttgcacttggctgccaaagaaggccacctccgggtggtggagttcctggtgaagcacacggccagcaatgtggggcatcggaaccataagggggacaccgcctgtgatttggccaggctctatgggaggaatgaggttgttagcctgatgcaggcaaacggggctgggggagccacaaatcttcaataaacgtggggagggctcccccacgttgcctctactttatcaattaactgagtagctctcctgacttttaatgtcatttgttaaaatacagttctgtcatatgttaagcagctaaattttctgaaactgcataagtgaaaatcttacaacaggcttatgaatatatttaagcaacatctttttaacctgcaaaatctgttctaacatgtaattgcagataactttgactttcttctgaatattttatctttccttggcttttcccttgcttccccttttgccaatctcaac

SEQ ID NO: 1272 - DNA, 2086 bp, Homo sapiens
  source 1..2086: mol_type = genomic DNA
ctctgccgagcctccttaaaactctgccgttaaaatgggggcgggtttttcaactcaaaaagcgctcaatttttttcttttcaaaaaaagctgatgaggtcggaaaaaagggagaagaaaccggcaccctctctgagaggcaacagaagcagcaattgtttcagcgaaaaaagcagcaagggagggagtgaaggaaaaaagcaaaaaagggggcgacacgcaagtgcctgtaggggtgaaaggagcagggaccggcgatctagggggggatcagctacaaaagaaactgtcactgggagcggtgcggccaaggaggaagcagtgctgccaggctctgctccagggcacagctggctggcggctgccctgtccgcagcaaaggggcacaggccggggaccgcgagaggtggcaaagtggcaccgggcgccgaggctgctgagcgctcgccgagacggcgaccggactggctgccccggaactgcggcgactctccctactcagaacttggcctacgtttcccaggactctccccatctccagaggcccccacaaaaccgggaaaggaaggaaaggacagcggcggcagcagctcaatgagtgcctacagcagaaagcctgaacgagctcggtcgtaggcgggaagttcccgggggggctgcccagtgcagccgcaatgctgccgcgagctgccccagcagtccgggctccgtagacgctttccgcatcactctccttcctcgggctgccgggagtcccgggacctggcggggccggcatgacgggcttctcgggggcccgccgcacgcccggcagcctccggagacgcgcgccgagcccggctcccacggcctctgaggctcggcggggctgcggctgcctggcgggcgggctccggagctttcctgagcggcattagcccacggcttggcccggacgcgaccaaaggctcttctggagaagcccagagcactgggcaatcgttacgacctgtaacttgagggccaccgaactgctactcccgttcgcctttggcgatcatcttttaaccctccggagcacgtcagcatccagccaccgcggcgctctcccagcagcggaggacccaggactatcccttcggcgagacggatggaaaccgagccccctggaggacctgcccctgcagttctgcctcacacggctcaagtcaccaccgtgaacaagggaccctaaagaatggccgagccttgggggaacgagttggcgtccgcagctgccaggggggacctagagcaacttactagtttgttgcaaaataatgtaaacgtcaatgcacaaaatggatttggaaggactgcgctgcaggttatgaaacttggaaatcccgagattgccaggagactgctacttagaggtgctaatcccgatttgaaagaccgaactggtttcgctgtcattcatgatgcggccagagcaggtttcctggacactttacagactttgctggagtttcaagctgatgttaacatcgaggataatgaagggaacctgcccttgcacttggctgccaaagaaggccacctccgggtggtggagttcctggtgaagcacacggccagcaatgtggggcatcggaaccataagggggacaccgcctgtgatttggccaggctctatgggaggaatgaggttgttagcctgatgcaggcaaacggggctgggggagccacaaatcttcaataaacgtggggagggctcccccacgttgcctctactttatcaattaactgagtagctctcctgacttttaatgtcatttgttaaaatacagttctgtcatatgttaagcagctaaattttctgaaactgcataagtgaaaatcttacaacaggcttatgaatatatttaagcaacatctttttaacctgcaaaatctgttctaacatgtaattgcagataactttgactttcttctgaatattttatctttccttggcttttcccttgcttccccttttgccaatctcaacacccaagttgaagactttgtttttaaaatggtttgtcctgatgcttttgtctaattaaaacactttcaaaacagg

SEQ ID NO: 1273 - DNA, 1144 bp, Homo sapiens
  source 1..1144: mol_type = genomic DNA
agagcagaccccgcccggcgaggaggagggagggccgccagtgtcgacatgctgctggaggaggttcgcgccggcgaccggctgagtggggcggcggcccggggcgacgtgcaggaggtgcgccgccttctgcaccgggagctggtgcatcccgacgccctcaaccgcttcggcaagacggcgctgcaggtcatgatgtttggcagcaccgccatcgccctggagctgctgaagcaaggtgccagccccaatgtccaggacacctccggtaccagtccagtccatgacgcagcccgcactggattcctggacaccctgaaggtcctagtggagcacggggctgatgtcaacgtgcctgatggcaccggggcacttccaatccatctggcagttcaagagggtcacactgctgtggtcagctttctggcagctgaatctgatctccatcgcagggacgccaggggtctcacacccttggagctggcactgcagagaggggctcaggacctcgtggacatcctgcagggccacatggtggccccgctgtgatctggggtcaccctctccagcaagagaaccccgtggggttatgtatcagaagagaggggaagaaacactttctcttcttgtttctcctgcccactgctgcagtaggggaggagcacagtttgtggcttataggtgttggttttgggggtgtgagtgtttgggggacgtttctcatttgtttttctcactccttttggtgtgttggacagagaagggctcctgcaggccacagccacctaaacggttcagtttcttctgcgcctcaggctgctggggcctcagacgagacccaagggcagagcatttaagagtgaagtcatgacctccagggagcctagaagctggtggccttggccggctgtgctcagagacctgaagtgtgcacgttgcttcaggcatggggggtggggggagcgtcccaaatcaataagaaggtagaatgagttatgagttattcatattctgttggaagcttgttttccagtctcttgtacagcgttttaaaagaaatggattctatttattatgctttattggaaaaaatgttgtaataatttaatgtttttacccattaaattaagacttgtgcatgatc

SEQ ID NO: 1274 - DNA, 1398 bp, Homo sapiens
  source 1..1398: mol_type = genomic DNA
ggagggagggtgagttagggggagacccggcccccaaggggcgggcgccgggcagggccccgcgggcggccgagggttgggcccggctcccagcccctcgccgtcctccggctgacagggggaggagcccgccgggagggccggggtctcgggctggggagccgggacgggagagcagcgcagccgggtgcaccgcggccgcgccccgggagggctgttcgggccagcgcccgccggctgctccgcgctgacagcgccgggctggggcggggcggggggctttgcaggccgccagtgtcgacatgctgctggaggaggttcgcgccggcgaccggctgagtggggcggcggcccggggcgacgtgcaggaggtgcgccgccttctgcaccgggagctggtgcatcccgacgccctcaaccgcttcggcaagacggcgctgcaggtcatgatgtttggcagcaccgccatcgccctggagctgctgaagcaaggtgccagccccaatgtccaggacacctccggtaccagtccagtccatgacgcagcccgcactggattcctggacaccctgaaggtcctagtggagcacggggctgatgtcaacgtgcctgatggcaccggggcacttccaatccatctggcagttcaagagggtcacactgctgtggtcagctttctggcagctgaatctgatctccatcgcagggacgccaggggtctcacacccttggagctggcactgcagagaggggctcaggacctcgtggacatcctgcagggccacatggtggccccgctgtgatctggggtcaccctctccagcaagagaaccccgtggggttatgtatcagaagagaggggaagaaacactttctcttcttgtttctcctgcccactgctgcagtaggggaggagcacagtttgtggcttataggtgttggttttgggggtgtgagtgtttgggggacgtttctcatttgtttttctcactccttttggtgtgttggacagagaagggctcctgcaggccacagccacctaaacggttcagtttcttctgcgcctcaggctgctggggcctcagacgagacccaagggcagagcatttaagagtgaagtcatgacctccagggagcctagaagctggtggccttggccggctgtgctcagagacctgaagtgtgcacgttgcttcaggcatggggggtggggggagcgtcccaaatcaataagaaggtagaatgagttatgagttattcatattctgttggaagcttgttttccagtctcttgtacagcgttttaaaagaaatggattctatttattatgctttattggaaaaaatgttgtaataatttaatgtttttacccattaaattaagacttgtgcatgatc

SEQ ID NO: 1275 - DNA, 893 bp, Homo sapiens
  source 1..893: mol_type = genomic DNA
acagaaggacgaaccagtgagctaagctgcggggcgcgggctcggccggggcaccggtgagtcgccggcgctgcagagggaggcggcactggtctcgacgtggggcggccagcgatgaagccgcccagttcaatacaaacaagtgagtttgactcatcagatgaagagcctattgaagatgaacagactccaattcatatatcatggctatctttgtcacgagtgaattgttctcagtttctcggtttatgtgctcttccaggttgtaaatttaaagatgttagaagaaatgtccaaaaagatacagaagaactaaagagctgtggtatacaagacatatttgttttctgcaccagaggggaactgtcaaaatatagagtcccaaaccttctggatctctaccagcaatgtggaattatcacccatcatcatccaatcgcagatggagggactcctgacatagccagctgctgtgaaataatggaagagcttacaacctgccttaaaaattaccgaaaaaccttaatacactgctatggaggacttgggagatcttgtcttgtagctgcttgtctcctactatacctgtctgacacaatatcaccagagcaagccatagacagcctgcgagacctaagaggatccggggcaatacagaccatcaagcaatacaattatcttcatgagtttcgggacaaattagctgcacatctatcatcaagagattcacaatcaagatctgtatcaagataaaggaattcaaatagcatatatatgaccatgtctgaaatgtcagttctctagcataatttgtattgaaatgaaaccaccagtgttatcaacttgaatgtaaatgtacatgtgcagatattcctaaagttttattgacaaaa

SEQ ID NO: 1276 - DNA, 637 bp, Homo sapiens
  source 1..637: mol_type = genomic DNA
atgaatccctgttgtaaatttaaagatgttagaagaaatgtccaaaaagatacagaagaactaaagagctgtggtatacaagacatatttgttttctgcaccagaggggaactgtcaaaatatagagtcccaaaccttctggatctctaccagcaatgtggaattatcacccatcatcatccaatcgcagatggagggactcctgacatagccagctgctgtgaaataatggaagagcttacaacctgccttaaaaattaccgaaaaaccttaatacactgctatggaggacttgggagatcttgtcttgtagctgcttgtctcctactatacctgtctgacacaatatcaccagagcaagccatagacagcctgcgagacctaagaggatccggggcaatacagaccatcaagcaatacaattatcttcatgagtttcgggacaaattagctgcacatctatcatcaagagattcacaatcaagatctgtatcaagataaaggaattcaaatagcatatatatgaccatgtctgaaatgtcagttctctagcataatttgtattgaaatgaaaccaccagtgttatcaacttgaatgtaaatgtacatgtgcagatattcctaaagttttattgac

SEQ ID NO: 1277 - DNA, 238 bp, Homo sapiens
  source 1..238: mol_type = genomic DNA
cggcactggtctcgacgtggggcggccagcgatgaagccgcccagttcaatacaaacaagtgagtttgactcatcagatgaagagcctattgaagatgaacagactccaattcatatatcatggctatctttgtcacgagtgaattgttctcagtttctcggtttatgtgctcttccaggttgtaaatttaaagatgttagaagaaatgtccaaaaagaaaaaaaaaaaaaaaaaaag

SEQ ID NO: 1278 - DNA, 791 bp, Homo sapiens
  source 1..791: mol_type = genomic DNA
cggcactggtctcgacgtggggcggccagcgatgaagccgcccagttcaatacaaacaagtgagtttgactcatcagatgaagagcctattgaagatgaacagactccaattcatatatcatggctatctttgtcacgagtgaattgttctcagtttctcggtttatgtgctcttccaggttgtaaatttaaagatgttagaagaaatgtccaaaaagatacagaagaactaaagagctgtggtatacaagacatatttgttttctgcaccagaggggaactgtcaaaatatagagtcccaaaccttctggatctctaccagcaatgtggaattatcacccatcatcatccaatcgcagatggagggactcctgacatagccagctgctgtgaaataatggaagagcttacaacctgccttaaaaatttgttctgctatggaggacttgggagatcttgtcttgtagctgcttgtctcctactatacctgtctgacacaatatcaccagagcaagccatagacagcctgcgagacctaagaggatccggggcaatacagaccatcaagcaatacaattatcttcatgagtttcgggacaaattagctgcacatctatcatcaagagattcacaatcaagatctgtatcaagataaaggaattcaaatagcatatatatgaccatgtctgaaatgtcagttctctagcataatttgtattgaaatgaaaccaccagtgttatcaacttgaatgtaaatgtacatgtgcagatattcctaaagttttattgac

SEQ ID NO: 1279 - DNA, 727 bp, Homo sapiens
  source 1..727: mol_type = genomic DNA
ctcggccggggcaccggtgagtcgccggcgctgcagagggaggcggcactggtctcgacgtggggcggccagcgatgaagccgcccagttcaatacaaacaagttgtaaatttaaagatgttagaagaaatgtccaaaaagatacagaagaactaaagagctgtggtatacaagacatatttgttttctgcaccagaggggaactgtcaaaatatagagtcccaaaccttctggatctctaccagcaatgtggaattatcacccatcatcatccaatcgcagatggagggactcctgacatagccagctgctgtgaaataatggaagagcttacaacctgccttaaaaattaccgaaaaaccttaatacactgctatggaggacttgggagatcttgtcttgtagctgcttgtctcctactatacctgtctgacacaatatcaccagagcaagccatagacagcctgcgagacctaagaggatccggggcaatacagaccatcaagcaatacaattatcttcatgagtttcgggacaaattagctgcacatctatcatcaagagattcacaatcaagatctgtatcaagataaaggaattcaaatagcatatatatgaccatgtctgaaatgtcagttctctagcataatttgtattgaaatgaaaccaccagtgttatcaacttgaatgtaaatgtacatgtgcagatattcctaaagttttattg

SEQ ID NO: 1280 - DNA, 8713 bp, Homo sapiens
  source 1..8713: mol_type = genomic DNA
gtgcggttcggaggcggggcaggtgggggcgggcccaggtagcaggtttggctgcgcgggggccgcgcgtcggagtttccccctttctagggtgaggatggttctacacagccacccggagttccttagttgaaaggtgcgccctgctgtgacagaatgtggtaattgtaatctttaacattttcatgtaaaacatatttcctgatcatctttccattgtcttcatggaaaattgataaatatttgtgccttccaactctcgtcttggttgaatgacttcatcttaatacaacatggacaccacgttgctgaaaacatgctttgggactgccactgaatttatcttttgcggttttatgacaaagttattagtagtttcccttttttgaattagtattttgaagttaatatcacaatgagttcaggcttatggagccaagaaaaagtcacttcaccctactgggaagagcggattttttacttgcttcttcaagaatgcagcgttacagacaaacaaacacaaaagctccttaaagtaccgaagggaagtataggacagtatattcaagatcgttctgtggggcattcaaggattccttctgcaaaaggcaagaaaaatcagattggattaaaaattctagagcaacctcatgcagttctctttgttgatgaaaaggatgttgtagagataaatgaaaagttcacagagttacttttggcaattaccaattgtgaggagaggttcagcctgtttaaaaacagaaacagactaagtaaaggcctccaaatagacgtgggctgtcctgtgaaagtacagctgagatctggggaagaaaaatttcctggagttgtacgcttcagaggacccctgttagcagagaggacagtctccggaatattctttggagttgaattgctggaagaaggtcgtggtcaaggtttcactgacggggtgtaccaagggaaacagctttttcagtgtgatgaagattgtggcgtgtttgttgcattggacaagctagaactcatagaagatgatgacactgcattggaaagtgattacgcaggtcctggggacacaatgcaggtcgaacttcctcctttggaaataaactccagagtttctttgaaggttggagaaacaatagaatctggaacagttatattctgtgatgttttgccaggaaaagaaagcttaggatattttgttggtgtggacatggataaccctattggcaactgggatggaagatttgatggagtgcagctttgtagttttgcgtgtgttgaaagtacaattctattgcacatcaatgatatcatcccagctttatcagagagtgtgacgcaggaaaggaggcctcccaaacttgcctttatgtcaagaggtgttggggacaaaggttcatccagtcataataaaccaaaggctacaggatctacctcagaccctggaaatagaaacagatctgaattattttataccttaaatgggtcttctgttgactcacaaccacaatccaaatcaaaaaatacatggtacattgatgaagttgcagaagaccctgcaaaatctcttacagagatatctacagactttgaccgttcttcaccaccactccagcctcctcctgtgaactcactgaccaccgagaacagattccactctttaccattcagtctcaccaagatgcccaataccaatggaagtattggccacagtccactttctctgtcagcccagtctgtaatggaagagctaaacactgcacccgtccaagagagtccacccttggccatgcctcctgggaactcacatggtctagaagtgggctcattggctgaagttaaggagaaccctcctttctatggggtaatccgttggatcggtcagccaccaggactgaatgaagtgctcgctggactggaactggaagatgagtgtgcaggctgtacggatggaaccttcagaggcactcggtatttcacctgtgccctgaagaaggcgctgtttgtgaaactgaagagctgcaggcctgactctaggtttgcatcattgcagccggtttccaatcagattgagcgctgtaactctttagcatttggaggctacttaagtgaagtagtagaagaaaatactccaccaaaaatggaaaaagaaggcttggagataatgattgggaagaagaaaggcatccagggtcattacaattcttgttacttagactcaaccttattctgcttatttgcttttagttctgttctggacactgtgttacttagacccaaagaaaagaacgatgtagaatattatagtgaaacccaagagctactgaggacagaaattgttaatcctctgagaatatatggatatgtgtgtgccacaaaaattatgaaactgaggaaaatacttgaaaaggtggaggctgcatcaggatttacctctgaagaaaaagatcctgaggaattcttgaatattctgtttcatcatattttaagggtagaacctttgctaaaaataagatcagcaggtcaaaaggtacaagattgttacttctatcaaatttttatggaaaaaaatgagaaagttggcgttcccacaattcagcagttgttagaatggtcttttatcaacagtaacctgaaatttgcagaggcaccatcatgtctgattattcagatgcctcgatttggaaaagactttaaactatttaaaaaaatttttccttctctggaattaaatataacagatttacttgaagacactcccagacagtgccggatatgtggagggcttgcaatgtatgagtgtagagaatgctacgacgatccggacatctcagctggaaaaatcaagcagttttgtaaaacctgcaacactcaagtccaccttcatccgaagaggctgaatcataaatataacccagtgtcacttcccaaagacttacccgactgggactggagacacggctgcatcccttgccagaatatggagttatttgctgttctctgcatagaaacaagccactatgttgcttttgtgaagtatgggaaggacgattctgcctggctcttctttgacagcatggccgatcgggatggtggtcagaatggcttcaacattcctcaagtcaccccatgcccagaagtaggagagtacttgaagatgtctctggaagacctgcattccttggactccaggagaatccaaggctgtgcacgaagactgctttgtgatgcatatatgtgcatgtaccagagtccaacaatgagtttgtacaaataactggggtcatcgggaaaggcaaagaaactgaaggcagagtcctaacgttgcatcttattcgagctggcagttctgttcacgtccattgccggcaatggatgtctttgtggtgatgatccttcagaaaaggatgcctctgtttaaaaacaaattgcttttgtgtccctgaagtatttaataagaagcattttgcactctagaaagtatgtttgtgttggttttttaagaagtctaaatgaagttattaatacctgaagctttaagttaagtgcattgatcatatgatatttttggaagcatacaattttaattgtggaagtttaaagcctcttttagtccattgagaatgtaaataaatgtgtcttctttatggaccaaggatatgaaatcatttttcttttgtagctaacggttgccttgaggaagaaataatttggttttattaagagtctactctcaatccagttattagagatgtactgagtttgatttgttaatcctttctatatactgctgatcttgcatgtctacaatctgctcagtttttctgtgtttctgcaatagtggtcagaaaaatacttaaattcccttaatggtgttgttttctatttgttctggttttgagataaatgagtgattctgtccccaaatgtccatttttgaagtgattttcctggaggattagggtatttagcagttgaagctcttcattcatagtagttactgtcagctaacaggttttttaaggcttttaactattaatattttatggaatggggcaaagtaaattgatgaaagaattggagtgataatagtcctttacaaacatacagtccataagaaaatgaatttggcatatagaattattacaatttcctgggagagatggatatttaaacctctattattttagacaagactgtctagaacttaagtttgatctgtcagccagtactcccattaaattcagtgtagtttcacttgatagaatcagatatgttatcgaaatgttagcagcagcttcatcctccttctgattaaagtaagtagaaatgggatgttttgtttaataacagccatagtgtgtgtttagaccacagcggatgttgtagaccaggaccatagatgatacatgtcagtgctgtggaatgtgcattctctgagtgttgttttgtggtatcattgtctttcctgaatgactttctaactgtgcagaaaggcagaaaagtcatcatatgtatatgtcatatgactttataaaatatttaatgtgacaaaaagtggaaagaatctttacaaaccctgcaattacttttttaaaggcacttttactctttggttttatcattccattttgctaatatttactagctttataaattacagtaaggtacaaaaactcatcttgtaatattttcatttttgaagtgaaaaagtacatatattttgcacaaggttttatactgctaagtgcttggttggggtggtgagatgatgattagatcaggggtgaggctgagagactctgggtttagggctagccctgcctccatctcccttgggtaaaatgaagggtgtggggtaaaagatgcataaggccttttctagctctgacagcctagaagtccaatcaccctgtaataaatatgtgttgaatgaagaaatgggtgaatgagcttgtcaatgtgattttaaaaaattgactacctggaggaatgattaggaatctaaatgaagccagccctcggtatctgcaggtttctcatccatggattcaaccaactgcaaatggaaaatacgattttttttaaaaaaaggatggttacatccgtattgaacatgtacagacttttttcttgtcattattctctgaacaatacaagaactctttatgtagcatttacatttattaggtattataagtaatctagagattatttaattaaaatatacaggaggatgtgtgtcagttatatgcaaattctgtaccattttgtatcagggaattgagcatcttcagatgttggtatctgcagggatcctggaaccaaacccctgcagatactaagggctgacgatctaggtaagactggatttaacagttggaaaaaaaaaaaaaaaaggagagagaagacagttcctttcctgtagaaattaaaacaaaatacaaattgaggaagctctgctacccaggctgtcatggtagagaacttgaagaagacctgtttggatggacacctggtttcaaaagtcaggtgtggagactgttaaatgggagggcctcatccataaatgatttctggcaacgtcttcttcaggtggagcttgacgtctttttaatgttacttggggagggagtgctcattaagggatgccagggccagctctggtggttcctggggaggctgcgtccttccctgcttctgcatgtcatgaggcagcaggaaggtttcccctgcacctgtctgtcctggctccctctgggtagccccctactgttctgtgcttcagcacagcctggtttgtcaagaggcacatagttggggctgggctgcatggcacaggggcttatgtgcctgctggttatttaattttcagccttaagttttctttaatattttcctgttggctatttaaaggttttggttatcttttattccttatctacaatcaagatgacaatgtaattgaattatcttatttataacacggttcgtgattcatgattcatgattacaagtagaaaatatgtcatgttcctcacctccaaataaatatgtgtgtgtctgtgtgtgtgtatatatgtatgtggcggagagggagagagtggggaaggagagcagtgttatcatacatagagaggctaaatgtgtcccatccctcactgtcagctttataaaggagtttgactccatccacagaagaatgttttataagactaggaaaacacgttgaaaactaggataaacagcaacaaaaatcaactaaatatgttgttactgttgctaaggattttctccttagaataatttaggatttttaaaaatttctgtttgccaaatgctgtagataaatggccagattcttcctatccctaggattcctttattattttttttcacagattttgagaacaagggggagagatagtatggaagattaagattccattaatcttatagaactgtgttgtcacccaaattcctgcttgtttgaacatggcatcttcatagattcaggattcactaccctctatagctggatcttgaaaattatctggccagataattttgcatctgcttggatgattgtagactgagatgtgagtggaggataaagtattagacttttgctgagtaactgccaaccaagaagtatttatcggacacttactaggtgcctaggattgtatcagagggaatatgaaatgtgtccctgccctacctagttttaacgacagaatatctattaaaggctacttagctgaagggtaagggtgacaggtctaggggaagctttgggaggtggtgtgctgtgacagaaaaagtggcagagtagggacgagagacctgcattctagccctgtttctgtcacttgctctgtacacttagacaacagcttgacctcttgagctttagtttcctcctctgcataatgagagggttagactactgaattgtatgggaaaaaaatacaaattcctgggtcctaggccatgcctgctgaatccgactgttcaggaagaggcctaggaaatctgtgagggaatccccaggggaatctcgtgaccagccaggtgtgaaatctgctaactggaagatctcaaagcttccttcactttttgtgattttgtggtcatgtaacgttactgtattattctacgtaaatgtgggtacttggatgtttatcatactgtttctctgtgtttacatactaatttgtgtaagaaatgcattttagtctgtgtacctcaacctgctgtttgtttcctagaggtgttagtagtctttaaatacaagtaagacttaagaggatatttgatgttatttacctggatattttcttccccttttatttatttagaggaaattgagattctaggagccaaaaaaatgaaaacaaaattctaaggcaaagttaaagaaaaaaattacattatttcttaccatttgctactttataatgaaaatttaaaaattatatgggaagatttttctctgggataacaaatccttgtcataaagtaagaggtctttttaaagtaggtaggctataaggcctgtaatttaaaataatactcctttctctagggtttggtgcaattctccattaatgaagataacatttgaattccccaaagcaggtgaggagtcggggaggagaaagcgatgttaaaatgaaaactcactgcaaaagaggaggcagaggaagaaggaatgtaaaccccttaaagcagatgtgtgtggggccttatgaagaccaggattctgcgggtgtcaggggattgcccctcttgacagagactagggttttagactgaggcttcctgcagggtgttcgcattgcccttctccgttccccttcagacctttctggggagaagaggtgggaggaggggagaaagactgttcatcttattctgaatcctggagcagctgaaggttttctcttgagtcaggatgcagtggtaatgcattaaccagcaagtgtggccaaggataatgaaaaagtgggaaaggaaggtcctcctcctccctgattgtagcatccagcagtctctgtagccaggttactcaagaaccacatttgatttcctggccctttgccttggcagtgatggcatttttatttcactgtgttttaaagtcttcatttatttttataacatgggttagggagaagggccacaaatggagggattgtcctttcaagcaccacagcttcagataaaattagtactttcaaatattgtccactttaacttaaaaaattctagagggattatattggagactcaactgcccttggttttagtttataaaatggcctagtactgtggaattttaattttagaaagtcttagcatcagatcataaacattcattaaaagaactcacatcccatctgaaacttcccaggggagttgggattcttagtagattggtagaaaggggctcattttctactgcatttcccatttttggtatcttgttcagcatgttttatttttatttcttgtctgcagaacatcctatatttatgagaacattctttaagaagaccaccacatagaataccccttcctatcagctcgctctgatttagccttaattttgttaaattttttagagatgaatgaagtgctgctgtggaaagaaatgtacatatactatttctgtatcattaaaattacatttttatggttc

SEQ ID NO: 1281 - DNA, 8591 bp, Homo sapiens
  source 1..8591: mol_type = genomic DNA
gtcggaggtaaatactagggcggtgggtgtggggagccggggccggcccgggacgcgggctggggagccggggcgaggggcgacgccccgccgcccgagtttccccctttctagggtgaggatggttctacacagccacccggagttccttagttgaaaggtgcgccctgctgtgacagcatggacaccacgttgctgaaaacatgctttgggactgccactgaatttatcttttgcggttttatgacaaagttattagtagtttcccttttttgaattagtattttgaagttaatatcacaatgagttcaggcttatggagccaagaaaaagtcacttcaccctactgggaagagcggattttttacttgcttcttcaagaatgcagcgttacagacaaacaaacacaaaagctccttaaagtaccgaagggaagtataggacagtatattcaagatcgttctgtggggcattcaaggattccttctgcaaaaggcaagaaaaatcagattggattaaaaattctagagcaacctcatgcagttctctttgttgatgaaaaggatgttgtagagataaatgaaaagttcacagagttacttttggcaattaccaattgtgaggagaggttcagcctgtttaaaaacagaaacagactaagtaaaggcctccaaatagacgtgggctgtcctgtgaaagtacagctgagatctggggaagaaaaatttcctggagttgtacgcttcagaggacccctgttagcagagaggacagtctccggaatattctttggagttgaattgctggaagaaggtcgtggtcaaggtttcactgacggggtgtaccaagggaaacagctttttcagtgtgatgaagattgtggcgtgtttgttgcattggacaagctagaactcatagaagatgatgacactgcattggaaagtgattacgcaggtcctggggacacaatgcaggtcgaacttcctcctttggaaataaactccagagtttctttgaaggttggagaaacaatagaatctggaacagttatattctgtgatgttttgccaggaaaagaaagcttaggatattttgttggtgtggacatggataaccctattggcaactgggatggaagatttgatggagtgcagctttgtagttttgcgtgtgttgaaagtacaattctattgcacatcaatgatatcatcccagagagtgtgacgcaggaaaggaggcctcccaaacttgcctttatgtcaagaggtgttggggacaaaggttcatccagtcataataaaccaaaggctacaggatctacctcagaccctggaaatagaaacagatctgaattattttataccttaaatgggtcttctgttgactcacaaccacaatccaaatcaaaaaatacatggtacattgatgaagttgcagaagaccctgcaaaatctcttacagagatatctacagactttgaccgttcttcaccaccactccagcctcctcctgtgaactcactgaccaccgagaacagattccactctttaccattcagtctcaccaagatgcccaataccaatggaagtattggccacagtccactttctctgtcagcccagtctgtaatggaagagctaaacactgcacccgtccaagagagtccacccttggccatgcctcctgggaactcacatggtctagaagtgggctcattggctgaagttaaggagaaccctcctttctatggggtaatccgttggatcggtcagccaccaggactgaatgaagtgctcgctggactggaactggaagatgagtgtgcaggctgtacggatggaaccttcagaggcactcggtatttcacctgtgccctgaagaaggcgctgtttgtgaaactgaagagctgcaggcctgactctaggtttgcatcattgcagccggtttccaatcagattgagcgctgtaactctttagcatttggaggctacttaagtgaagtagtagaagaaaatactccaccaaaaatggaaaaagaaggcttggagataatgattgggaagaagaaaggcatccagggtcattacaattcttgttacttagactcaaccttattctgcttatttgcttttagttctgttctggacactgtgttacttagacccaaagaaaagaacgatgtagaatattatagtgaaacccaagagctactgaggacagaaattgttaatcctctgagaatatatggatatgtgtgtgccacaaaaattatgaaactgaggaaaatacttgaaaaggtggaggctgcatcaggatttacctctgaagaaaaagatcctgaggaattcttgaatattctgtttcatcatattttaagggtagaacctttgctaaaaataagatcagcaggtcaaaaggtacaagattgttacttctatcaaatttttatggaaaaaaatgagaaagttggcgttcccacaattcagcagttgttagaatggtcttttatcaacagtaacctgaaatttgcagaggcaccatcatgtctgattattcagatgcctcgatttggaaaagactttaaactatttaaaaaaatttttccttctctggaattaaatataacagatttacttgaagacactcccagacagtgccggatatgtggagggcttgcaatgtatgagtgtagagaatgctacgacgatccggacatctcagctggaaaaatcaagcagttttgtaaaacctgcaacactcaagtccaccttcatccgaagaggctgaatcataaatataacccagtgtcacttcccaaagacttacccgactgggactggagacacggctgcatcccttgccagaatatggagttatttgctgttctctgcatagaaacaagccactatgttgcttttgtgaagtatgggaaggacgattctgcctggctcttctttgacagcatggccgatcgggatggtggtcagaatggcttcaacattcctcaagtcaccccatgcccagaagtaggagagtacttgaagatgtctctggaagacctgcattccttggactccaggagaatccaaggctgtgcacgaagactgctttgtgatgcatatatgtgcatgtaccagagtccaacaatgagtttgtacaaataactggggtcatcgggaaaggcaaagaaactgaaggcagagtcctaacgttgcatcttattcgagctggcagttctgttcacgtccattgccggcaatggatgtctttgtggtgatgatccttcagaaaaggatgcctctgtttaaaaacaaattgcttttgtgtccctgaagtatttaataagaagcattttgcactctagaaagtatgtttgtgttggttttttaagaagtctaaatgaagttattaatacctgaagctttaagttaagtgcattgatcatatgatatttttggaagcatacaattttaattgtggaagtttaaagcctcttttagtccattgagaatgtaaataaatgtgtcttctttatggaccaaggatatgaaatcatttttcttttgtagctaacggttgccttgaggaagaaataatttggttttattaagagtctactctcaatccagttattagagatgtactgagtttgatttgttaatcctttctatatactgctgatcttgcatgtctacaatctgctcagtttttctgtgtttctgcaatagtggtcagaaaaatacttaaattcccttaatggtgttgttttctatttgttctggttttgagataaatgagtgattctgtccccaaatgtccatttttgaagtgattttcctggaggattagggtatttagcagttgaagctcttcattcatagtagttactgtcagctaacaggttttttaaggcttttaactattaatattttatggaatggggcaaagtaaattgatgaaagaattggagtgataatagtcctttacaaacatacagtccataagaaaatgaatttggcatatagaattattacaatttcctgggagagatggatatttaaacctctattattttagacaagactgtctagaacttaagtttgatctgtcagccagtactcccattaaattcagtgtagtttcacttgatagaatcagatatgttatcgaaatgttagcagcagcttcatcctccttctgattaaagtaagtagaaatgggatgttttgtttaataacagccatagtgtgtgtttagaccacagcggatgttgtagaccaggaccatagatgatacatgtcagtgctgtggaatgtgcattctctgagtgttgttttgtggtatcattgtctttcctgaatgactttctaactgtgcagaaaggcagaaaagtcatcatatgtatatgtcatatgactttataaaatatttaatgtgacaaaaagtggaaagaatctttacaaaccctgcaattacttttttaaaggcacttttactctttggttttatcattccattttgctaatatttactagctttataaattacagtaaggtacaaaaactcatcttgtaatattttcatttttgaagtgaaaaagtacatatattttgcacaaggttttatactgctaagtgcttggttggggtggtgagatgatgattagatcaggggtgaggctgagagactctgggtttagggctagccctgcctccatctcccttgggtaaaatgaagggtgtggggtaaaagatgcataaggccttttctagctctgacagcctagaagtccaatcaccctgtaataaatatgtgttgaatgaagaaatgggtgaatgagcttgtcaatgtgattttaaaaaattgactacctggaggaatgattaggaatctaaatgaagccagccctcggtatctgcaggtttctcatccatggattcaaccaactgcaaatggaaaatacgattttttttaaaaaaaggatggttacatccgtattgaacatgtacagacttttttcttgtcattattctctgaacaatacaagaactctttatgtagcatttacatttattaggtattataagtaatctagagattatttaattaaaatatacaggaggatgtgtgtcagttatatgcaaattctgtaccattttgtatcagggaattgagcatcttcagatgttggtatctgcagggatcctggaaccaaacccctgcagatactaagggctgacgatctaggtaagactggatttaacagttggaaaaaaaaaaaaaaaaggagagagaagacagttcctttcctgtagaaattaaaacaaaatacaaattgaggaagctctgctacccaggctgtcatggtagagaacttgaagaagacctgtttggatggacacctggtttcaaaagtcaggtgtggagactgttaaatgggagggcctcatccataaatgatttctggcaacgtcttcttcaggtggagcttgacgtctttttaatgttacttggggagggagtgctcattaagggatgccagggccagctctggtggttcctggggaggctgcgtccttccctgcttctgcatgtcatgaggcagcaggaaggtttcccctgcacctgtctgtcctggctccctctgggtagccccctactgttctgtgcttcagcacagcctggtttgtcaagaggcacatagttggggctgggctgcatggcacaggggcttatgtgcctgctggttatttaattttcagccttaagttttctttaatattttcctgttggctatttaaaggttttggttatcttttattccttatctacaatcaagatgacaatgtaattgaattatcttatttataacacggttcgtgattcatgattcatgattacaagtagaaaatatgtcatgttcctcacctccaaataaatatgtgtgtgtctgtgtgtgtgtatatatgtatgtggcggagagggagagagtggggaaggagagcagtgttatcatacatagagaggctaaatgtgtcccatccctcactgtcagctttataaaggagtttgactccatccacagaagaatgttttataagactaggaaaacacgttgaaaactaggataaacagcaacaaaaatcaactaaatatgttgttactgttgctaaggattttctccttagaataatttaggatttttaaaaatttctgtttgccaaatgctgtagataaatggccagattcttcctatccctaggattcctttattattttttttcacagattttgagaacaagggggagagatagtatggaagattaagattccattaatcttatagaactgtgttgtcacccaaattcctgcttgtttgaacatggcatcttcatagattcaggattcactaccctctatagctggatcttgaaaattatctggccagataattttgcatctgcttggatgattgtagactgagatgtgagtggaggataaagtattagacttttgctgagtaactgccaaccaagaagtatttatcggacacttactaggtgcctaggattgtatcagagggaatatgaaatgtgtccctgccctacctagttttaacgacagaatatctattaaaggctacttagctgaagggtaagggtgacaggtctaggggaagctttgggaggtggtgtgctgtgacagaaaaagtggcagagtagggacgagagacctgcattctagccctgtttctgtcacttgctctgtacacttagacaacagcttgacctcttgagctttagtttcctcctctgcataatgagagggttagactactgaattgtatgggaaaaaaatacaaattcctgggtcctaggccatgcctgctgaatccgactgttcaggaagaggcctaggaaatctgtgagggaatccccaggggaatctcgtgaccagccaggtgtgaaatctgctaactggaagatctcaaagcttccttcactttttgtgattttgtggtcatgtaacgttactgtattattctacgtaaatgtgggtacttggatgtttatcatactgtttctctgtgtttacatactaatttgtgtaagaaatgcattttagtctgtgtacctcaacctgctgtttgtttcctagaggtgttagtagtctttaaatacaagtaagacttaagaggatatttgatgttatttacctggatattttcttccccttttatttatttagaggaaattgagattctaggagccaaaaaaatgaaaacaaaattctaaggcaaagttaaagaaaaaaattacattatttcttaccatttgctactttataatgaaaatttaaaaattatatgggaagatttttctctgggataacaaatccttgtcataaagtaagaggtctttttaaagtaggtaggctataaggcctgtaatttaaaataatactcctttctctagggtttggtgcaattctccattaatgaagataacatttgaattccccaaagcaggtgaggagtcggggaggagaaagcgatgttaaaatgaaaactcactgcaaaagaggaggcagaggaagaaggaatgtaaaccccttaaagcagatgtgtgtggggccttatgaagaccaggattctgcgggtgtcaggggattgcccctcttgacagagactagggttttagactgaggcttcctgcagggtgttcgcattgcccttctccgttccccttcagacctttctggggagaagaggtgggaggaggggagaaagactgttcatcttattctgaatcctggagcagctgaaggttttctcttgagtcaggatgcagtggtaatgcattaaccagcaagtgtggccaaggataatgaaaaagtgggaaaggaaggtcctcctcctccctgattgtagcatccagcagtctctgtagccaggttactcaagaaccacatttgatttcctggccctttgccttggcagtgatggcatttttatttcactgtgttttaaagtcttcatttatttttataacatgggttagggagaagggccacaaatggagggattgtcctttcaagcaccacagcttcagataaaattagtactttcaaatattgtccactttaacttaaaaaattctagagggattatattggagactcaactgcccttggttttagtttataaaatggcctagtactgtggaattttaattttagaaagtcttagcatcagatcataaacattcattaaaagaactcacatcccatctgaaacttcccaggggagttgggattcttagtagattggtagaaaggggctcattttctactgcatttcccatttttggtatcttgttcagcatgttttatttttatttcttgtctgcagaacatcctatatttatgagaacattctttaagaagaccaccacatagaataccccttcctatcagctcgctctgatttagccttaattttgttaaattttttagagatgaatgaagtgctgctgtggaaagaaatgtacatatactatttctgtatcattaaaattacatttttatggttc

SEQ ID NO: 1282 - DNA, 8567 bp, Homo sapiens
  source 1..8567: mol_type = genomic DNA
gtgcggttcggaggcggggcaggtgggggcgggcccaggtagcaggtttggctgcgcgggggccgcgcgtcggagtttccccctttctagggtgaggatggttctacacagccacccggagttccttagttgaaaggtgcgccctgctgtgacagcatggacaccacgttgctgaaaacatgctttgggactgccactgaatttatcttttgcggttttatgacaaagttattagtagtttcccttttttgaattagtattttgaagttaatatcacaatgagttcaggcttatggagccaagaaaaagtcacttcaccctactgggaagagcggattttttacttgcttcttcaagaatgcagcgttacagacaaacaaacacaaaagctccttaaagtaccgaagggaagtataggacagtatattcaagatcgttctgtggggcattcaaggattccttctgcaaaaggcaagaaaaatcagattggattaaaaattctagagcaacctcatgcagttctctttgttgatgaaaaggatgttgtagagataaatgaaaagttcacagagttacttttggcaattaccaattgtgaggagaggttcagcctgtttaaaaacagaaacagactaagtaaaggcctccaaatagacgtgggctgtcctgtgaaagtacagctgagatctggggaagaaaaatttcctggagttgtacgcttcagaggacccctgttagcagagaggacagtctccggaatattctttggagttgaattgctggaagaaggtcgtggtcaaggtttcactgacggggtgtaccaagggaaacagctttttcagtgtgatgaagattgtggcgtgtttgttgcattggacaagctagaactcatagaagatgatgacactgcattggaaagtgattacgcaggtcctggggacacaatgcaggtcgaacttcctcctttggaaataaactccagagtttctttgaaggttggagaaacaatagaatctggaacagttatattctgtgatgttttgccaggaaaagaaagcttaggatattttgttggtgtggacatggataaccctattggcaactgggatggaagatttgatggagtgcagctttgtagttttgcgtgtgttgaaagtacaattctattgcacatcaatgatatcatcccagagagtgtgacgcaggaaaggaggcctcccaaacttgcctttatgtcaagaggtgttggggacaaaggttcatccagtcataataaaccaaaggctacaggatctacctcagaccctggaaatagaaacagatctgaattattttataccttaaatgggtcttctgttgactcacaaccacaatccaaatcaaaaaatacatggtacattgatgaagttgcagaagaccctgcaaaatctcttacagagatatctacagactttgaccgttcttcaccaccactccagcctcctcctgtgaactcactgaccaccgagaacagattccactctttaccattcagtctcaccaagatgcccaataccaatggaagtattggccacagtccactttctctgtcagcccagtctgtaatggaagagctaaacactgcacccgtccaagagagtccacccttggccatgcctcctgggaactcacatggtctagaagtgggctcattggctgaagttaaggagaaccctcctttctatggggtaatccgttggatcggtcagccaccaggactgaatgaagtgctcgctggactggaactggaagatgagtgtgcaggctgtacggatggaaccttcagaggcactcggtatttcacctgtgccctgaagaaggcgctgtttgtgaaactgaagagctgcaggcctgactctaggtttgcatcattgcagccggtttccaatcagattgagcgctgtaactctttagcatttggaggctacttaagtgaagtagtagaagaaaatactccaccaaaaatggaaaaagaaggcttggagataatgattgggaagaagaaaggcatccagggtcattacaattcttgttacttagactcaaccttattctgcttatttgcttttagttctgttctggacactgtgttacttagacccaaagaaaagaacgatgtagaatattatagtgaaacccaagagctactgaggacagaaattgttaatcctctgagaatatatggatatgtgtgtgccacaaaaattatgaaactgaggaaaatacttgaaaaggtggaggctgcatcaggatttacctctgaagaaaaagatcctgaggaattcttgaatattctgtttcatcatattttaagggtagaacctttgctaaaaataagatcagcaggtcaaaaggtacaagattgttacttctatcaaatttttatggaaaaaaatgagaaagttggcgttcccacaattcagcagttgttagaatggtcttttatcaacagtaacctgaaatttgcagaggcaccatcatgtctgattattcagatgcctcgatttggaaaagactttaaactatttaaaaaaatttttccttctctggaattaaatataacagatttacttgaagacactcccagacagtgccggatatgtggagggcttgcaatgtatgagtgtagagaatgctacgacgatccggacatctcagctggaaaaatcaagcagttttgtaaaacctgcaacactcaagtccaccttcatccgaagaggctgaatcataaatataacccagtgtcacttcccaaagacttacccgactgggactggagacacggctgcatcccttgccagaatatggagttatttgctgttctctgcatagaaacaagccactatgttgcttttgtgaagtatgggaaggacgattctgcctggctcttctttgacagcatggccgatcgggatggtggtcagaatggcttcaacattcctcaagtcaccccatgcccagaagtaggagagtacttgaagatgtctctggaagacctgcattccttggactccaggagaatccaaggctgtgcacgaagactgctttgtgatgcatatatgtgcatgtaccagagtccaacaatgagtttgtacaaataactggggtcatcgggaaaggcaaagaaactgaaggcagagtcctaacgttgcatcttattcgagctggcagttctgttcacgtccattgccggcaatggatgtctttgtggtgatgatccttcagaaaaggatgcctctgtttaaaaacaaattgcttttgtgtccctgaagtatttaataagaagcattttgcactctagaaagtatgtttgtgttggttttttaagaagtctaaatgaagttattaatacctgaagctttaagttaagtgcattgatcatatgatatttttggaagcatacaattttaattgtggaagtttaaagcctcttttagtccattgagaatgtaaataaatgtgtcttctttatggaccaaggatatgaaatcatttttcttttgtagctaacggttgccttgaggaagaaataatttggttttattaagagtctactctcaatccagttattagagatgtactgagtttgatttgttaatcctttctatatactgctgatcttgcatgtctacaatctgctcagtttttctgtgtttctgcaatagtggtcagaaaaatacttaaattcccttaatggtgttgttttctatttgttctggttttgagataaatgagtgattctgtccccaaatgtccatttttgaagtgattttcctggaggattagggtatttagcagttgaagctcttcattcatagtagttactgtcagctaacaggttttttaaggcttttaactattaatattttatggaatggggcaaagtaaattgatgaaagaattggagtgataatagtcctttacaaacatacagtccataagaaaatgaatttggcatatagaattattacaatttcctgggagagatggatatttaaacctctattattttagacaagactgtctagaacttaagtttgatctgtcagccagtactcccattaaattcagtgtagtttcacttgatagaatcagatatgttatcgaaatgttagcagcagcttcatcctccttctgattaaagtaagtagaaatgggatgttttgtttaataacagccatagtgtgtgtttagaccacagcggatgttgtagaccaggaccatagatgatacatgtcagtgctgtggaatgtgcattctctgagtgttgttttgtggtatcattgtctttcctgaatgactttctaactgtgcagaaaggcagaaaagtcatcatatgtatatgtcatatgactttataaaatatttaatgtgacaaaaagtggaaagaatctttacaaaccctgcaattacttttttaaaggcacttttactctttggttttatcattccattttgctaatatttactagctttataaattacagtaaggtacaaaaactcatcttgtaatattttcatttttgaagtgaaaaagtacatatattttgcacaaggttttatactgctaagtgcttggttggggtggtgagatgatgattagatcaggggtgaggctgagagactctgggtttagggctagccctgcctccatctcccttgggtaaaatgaagggtgtggggtaaaagatgcataaggccttttctagctctgacagcctagaagtccaatcaccctgtaataaatatgtgttgaatgaagaaatgggtgaatgagcttgtcaatgtgattttaaaaaattgactacctggaggaatgattaggaatctaaatgaagccagccctcggtatctgcaggtttctcatccatggattcaaccaactgcaaatggaaaatacgattttttttaaaaaaaggatggttacatccgtattgaacatgtacagacttttttcttgtcattattctctgaacaatacaagaactctttatgtagcatttacatttattaggtattataagtaatctagagattatttaattaaaatatacaggaggatgtgtgtcagttatatgcaaattctgtaccattttgtatcagggaattgagcatcttcagatgttggtatctgcagggatcctggaaccaaacccctgcagatactaagggctgacgatctaggtaagactggatttaacagttggaaaaaaaaaaaaaaaaggagagagaagacagttcctttcctgtagaaattaaaacaaaatacaaattgaggaagctctgctacccaggctgtcatggtagagaacttgaagaagacctgtttggatggacacctggtttcaaaagtcaggtgtggagactgttaaatgggagggcctcatccataaatgatttctggcaacgtcttcttcaggtggagcttgacgtctttttaatgttacttggggagggagtgctcattaagggatgccagggccagctctggtggttcctggggaggctgcgtccttccctgcttctgcatgtcatgaggcagcaggaaggtttcccctgcacctgtctgtcctggctccctctgggtagccccctactgttctgtgcttcagcacagcctggtttgtcaagaggcacatagttggggctgggctgcatggcacaggggcttatgtgcctgctggttatttaattttcagccttaagttttctttaatattttcctgttggctatttaaaggttttggttatcttttattccttatctacaatcaagatgacaatgtaattgaattatcttatttataacacggttcgtgattcatgattcatgattacaagtagaaaatatgtcatgttcctcacctccaaataaatatgtgtgtgtctgtgtgtgtgtatatatgtatgtggcggagagggagagagtggggaaggagagcagtgttatcatacatagagaggctaaatgtgtcccatccctcactgtcagctttataaaggagtttgactccatccacagaagaatgttttataagactaggaaaacacgttgaaaactaggataaacagcaacaaaaatcaactaaatatgttgttactgttgctaaggattttctccttagaataatttaggatttttaaaaatttctgtttgccaaatgctgtagataaatggccagattcttcctatccctaggattcctttattattttttttcacagattttgagaacaagggggagagatagtatggaagattaagattccattaatcttatagaactgtgttgtcacccaaattcctgcttgtttgaacatggcatcttcatagattcaggattcactaccctctatagctggatcttgaaaattatctggccagataattttgcatctgcttggatgattgtagactgagatgtgagtggaggataaagtattagacttttgctgagtaactgccaaccaagaagtatttatcggacacttactaggtgcctaggattgtatcagagggaatatgaaatgtgtccctgccctacctagttttaacgacagaatatctattaaaggctacttagctgaagggtaagggtgacaggtctaggggaagctttgggaggtggtgtgctgtgacagaaaaagtggcagagtagggacgagagacctgcattctagccctgtttctgtcacttgctctgtacacttagacaacagcttgacctcttgagctttagtttcctcctctgcataatgagagggttagactactgaattgtatgggaaaaaaatacaaattcctgggtcctaggccatgcctgctgaatccgactgttcaggaagaggcctaggaaatctgtgagggaatccccaggggaatctcgtgaccagccaggtgtgaaatctgctaactggaagatctcaaagcttccttcactttttgtgattttgtggtcatgtaacgttactgtattattctacgtaaatgtgggtacttggatgtttatcatactgtttctctgtgtttacatactaatttgtgtaagaaatgcattttagtctgtgtacctcaacctgctgtttgtttcctagaggtgttagtagtctttaaatacaagtaagacttaagaggatatttgatgttatttacctggatattttcttccccttttatttatttagaggaaattgagattctaggagccaaaaaaatgaaaacaaaattctaaggcaaagttaaagaaaaaaattacattatttcttaccatttgctactttataatgaaaatttaaaaattatatgggaagatttttctctgggataacaaatccttgtcataaagtaagaggtctttttaaagtaggtaggctataaggcctgtaatttaaaataatactcctttctctagggtttggtgcaattctccattaatgaagataacatttgaattccccaaagcaggtgaggagtcggggaggagaaagcgatgttaaaatgaaaactcactgcaaaagaggaggcagaggaagaaggaatgtaaaccccttaaagcagatgtgtgtggggccttatgaagaccaggattctgcgggtgtcaggggattgcccctcttgacagagactagggttttagactgaggcttcctgcagggtgttcgcattgcccttctccgttccccttcagacctttctggggagaagaggtgggaggaggggagaaagactgttcatcttattctgaatcctggagcagctgaaggttttctcttgagtcaggatgcagtggtaatgcattaaccagcaagtgtggccaaggataatgaaaaagtgggaaaggaaggtcctcctcctccctgattgtagcatccagcagtctctgtagccaggttactcaagaaccacatttgatttcctggccctttgccttggcagtgatggcatttttatttcactgtgttttaaagtcttcatttatttttataacatgggttagggagaagggccacaaatggagggattgtcctttcaagcaccacagcttcagataaaattagtactttcaaatattgtccactttaacttaaaaaattctagagggattatattggagactcaactgcccttggttttagtttataaaatggcctagtactgtggaattttaattttagaaagtcttagcatcagatcataaacattcattaaaagaactcacatcccatctgaaacttcccaggggagttgggattcttagtagattggtagaaaggggctcattttctactgcatttcccatttttggtatcttgttcagcatgttttatttttatttcttgtctgcagaacatcctatatttatgagaacattctttaagaagaccaccacatagaataccccttcctatcagctcgctctgatttagccttaattttgttaaattttttagagatgaatgaagtgctgctgtggaaagaaatgtacatatactatttctgtatcattaaaattacatttttatggttc

SEQ ID NO: 1283 - DNA, 8713 bp, Homo sapiens
  source 1..8713: mol_type = genomic DNA
gtgcggttcggaggcggggcaggtgggggcgggcccaggtagcaggtttggctgcgcgggggccgcgcgtcggagtttccccctttctagggtgaggatggttctacacagccacccggagttccttagttgaaaggtgcgccctgctgtgacagaatgtggtaattgtaatctttaacattttcatgtaaaacatatttcctgatcatctttccattgtcttcatggaaaattgataaatatttgtgccttccaactctcgtcttggttgaatgacttcatcttaatacaacatggacaccacgttgctgaaaacatgctttgggactgccactgaatttatcttttgcggttttatgacaaagttattagtagtttcccttttttgaattagtattttgaagttaatatcacaatgagttcaggcttatggagccaagaaaaagtcacttcaccctactgggaagagcggattttttacttgcttcttcaagaatgcagcgttacagacaaacaaacacaaaagctccttaaagtaccgaagggaagtataggacagtatattcaagatcgttctgtggggcattcaaggattccttctgcaaaaggcaagaaaaatcagattggattaaaaattctagagcaacctcatgcagttctctttgttgatgaaaaggatgttgtagagataaatgaaaagttcacagagttacttttggcaattaccaattgtgaggagaggttcagcctgtttaaaaacagaaacagactaagtaaaggcctccaaatagacgtgggctgtcctgtgaaagtacagctgagatctggggaagaaaaatttcctggagttgtacgcttcagaggacccctgttagcagagaggacagtctccggaatattctttggagttgaattgctggaagaaggtcgtggtcaaggtttcactgacggggtgtaccaagggaaacagctttttcagtgtgatgaagattgtggcgtgtttgttgcattggacaagctagaactcatagaagatgatgacactgcattggaaagtgattacgcaggtcctggggacacaatgcaggtcgaacttcctcctttggaaataaactccagagtttctttgaaggttggagaaacaatagaatctggaacagttatattctgtgatgttttgccaggaaaagaaagcttaggatattttgttggtgtggacatggataaccctattggcaactgggatggaagatttgatggagtgcagctttgtagttttgcgtgtgttgaaagtacaattctattgcacatcaatgatatcatcccagctgtttcagagagtgtgacgcaggaaaggaggcctcccaaacttgcctttatgtcaagaggtgttggggacaaaggttcatccagtcataataaaccaaaggctacaggatctacctcagaccctggaaatagaaacagatctgaattattttataccttaaatgggtcttctgttgactcacaaccacaatccaaatcaaaaaatacatggtacattgatgaagttgcagaagaccctgcaaaatctcttacagagatatctacagactttgaccgttcttcaccaccactccagcctcctcctgtgaactcactgaccaccgagaacagattccactctttaccattcagtctcaccaagatgcccaataccaatggaagtattggccacagtccactttctctgtcagcccagtctgtaatggaagagctaaacactgcacccgtccaagagagtccacccttggccatgcctcctgggaactcacatggtctagaagtgggctcattggctgaagttaaggagaaccctcctttctatggggtaatccgttggatcggtcagccaccaggactgaatgaagtgctcgctggactggaactggaagatgagtgtgcaggctgtacggatggaaccttcagaggcactcggtatttcacctgtgccctgaagaaggcgctgtttgtgaaactgaagagctgcaggcctgactctaggtttgcatcattgcagccggtttccaatcagattgagcgctgtaactctttagcatttggaggctacttaagtgaagtagtagaagaaaatactccaccaaaaatggaaaaagaaggcttggagataatgattgggaagaagaaaggcatccagggtcattacaattcttgttacttagactcaaccttattctgcttatttgcttttagttctgttctggacactgtgttacttagacccaaagaaaagaacgatgtagaatattatagtgaaacccaagagctactgaggacagaaattgttaatcctctgagaatatatggatatgtgtgtgccacaaaaattatgaaactgaggaaaatacttgaaaaggtggaggctgcatcaggatttacctctgaagaaaaagatcctgaggaattcttgaatattctgtttcatcatattttaagggtagaacctttgctaaaaataagatcagcaggtcaaaaggtacaagattgttacttctatcaaatttttatggaaaaaaatgagaaagttggcgttcccacaattcagcagttgttagaatggtcttttatcaacagtaacctgaaatttgcagaggcaccatcatgtctgattattcagatgcctcgatttggaaaagactttaaactatttaaaaaaatttttccttctctggaattaaatataacagatttacttgaagacactcccagacagtgccggatatgtggagggcttgcaatgtatgagtgtagagaatgctacgacgatccggacatctcagctggaaaaatcaagcagttttgtaaaacctgcaacactcaagtccaccttcatccgaagaggctgaatcataaatataacccagtgtcacttcccaaagacttacccgactgggactggagacacggctgcatcccttgccagaatatggagttatttgctgttctctgcatagaaacaagccactatgttgcttttgtgaagtatgggaaggacgattctgcctggctcttctttgacagcatggccgatcgggatggtggtcagaatggcttcaacattcctcaagtcaccccatgcccagaagtaggagagtacttgaagatgtctctggaagacctgcattccttggactccaggagaatccaaggctgtgcacgaagactgctttgtgatgcatatatgtgcatgtaccagagtccaacaatgagtttgtacaaataactggggtcatcgggaaaggcaaagaaactgaaggcagagtcctaacgttgcatcttattcgagctggcagttctgttcacgtccattgccggcaatggatgtctttgtggtgatgatccttcagaaaaggatgcctctgtttaaaaacaaattgcttttgtgtccctgaagtatttaataagaagcattttgcactctagaaagtatgtttgtgttggttttttaagaagtctaaatgaagttattaatacctgaagctttaagttaagtgcattgatcatatgatatttttggaagcatacaattttaattgtggaagtttaaagcctcttttagtccattgagaatgtaaataaatgtgtcttctttatggaccaaggatatgaaatcatttttcttttgtagctaacggttgccttgaggaagaaataatttggttttattaagagtctactctcaatccagttattagagatgtactgagtttgatttgttaatcctttctatatactgctgatcttgcatgtctacaatctgctcagtttttctgtgtttctgcaatagtggtcagaaaaatacttaaattcccttaatggtgttgttttctatttgttctggttttgagataaatgagtgattctgtccccaaatgtccatttttgaagtgattttcctggaggattagggtatttagcagttgaagctcttcattcatagtagttactgtcagctaacaggttttttaaggcttttaactattaatattttatggaatggggcaaagtaaattgatgaaagaattggagtgataatagtcctttacaaacatacagtccataagaaaatgaatttggcatatagaattattacaatttcctgggagagatggatatttaaacctctattattttagacaagactgtctagaacttaagtttgatctgtcagccagtactcccattaaattcagtgtagtttcacttgatagaatcagatatgttatcgaaatgttagcagcagcttcatcctccttctgattaaagtaagtagaaatgggatgttttgtttaataacagccatagtgtgtgtttagaccacagcggatgttgtagaccaggaccatagatgatacatgtcagtgctgtggaatgtgcattctctgagtgttgttttgtggtatcattgtctttcctgaatgactttctaactgtgcagaaaggcagaaaagtcatcatatgtatatgtcatatgactttataaaatatttaatgtgacaaaaagtggaaagaatctttacaaaccctgcaattacttttttaaaggcacttttactctttggttttatcattccattttgctaatatttactagctttataaattacagtaaggtacaaaaactcatcttgtaatattttcatttttgaagtgaaaaagtacatatattttgcacaaggttttatactgctaagtgcttggttggggtggtgagatgatgattagatcaggggtgaggctgagagactctgggtttagggctagccctgcctccatctcccttgggtaaaatgaagggtgtggggtaaaagatgcataaggccttttctagctctgacagcctagaagtccaatcaccctgtaataaatatgtgttgaatgaagaaatgggtgaatgagcttgtcaatgtgattttaaaaaattgactacctggaggaatgattaggaatctaaatgaagccagccctcggtatctgcaggtttctcatccatggattcaaccaactgcaaatggaaaatacgattttttttaaaaaaaggatggttacatccgtattgaacatgtacagacttttttcttgtcattattctctgaacaatacaagaactctttatgtagcatttacatttattaggtattataagtaatctagagattatttaattaaaatatacaggaggatgtgtgtcagttatatgcaaattctgtaccattttgtatcagggaattgagcatcttcagatgttggtatctgcagggatcctggaaccaaacccctgcagatactaagggctgacgatctaggtaagactggatttaacagttggaaaaaaaaaaaaaaaaggagagagaagacagttcctttcctgtagaaattaaaacaaaatacaaattgaggaagctctgctacccaggctgtcatggtagagaacttgaagaagacctgtttggatggacacctggtttcaaaagtcaggtgtggagactgttaaatgggagggcctcatccataaatgatttctggcaacgtcttcttcaggtggagcttgacgtctttttaatgttacttggggagggagtgctcattaagggatgccagggccagctctggtggttcctggggaggctgcgtccttccctgcttctgcatgtcatgaggcagcaggaaggtttcccctgcacctgtctgtcctggctccctctgggtagccccctactgttctgtgcttcagcacagcctggtttgtcaagaggcacatagttggggctgggctgcatggcacaggggcttatgtgcctgctggttatttaattttcagccttaagttttctttaatattttcctgttggctatttaaaggttttggttatcttttattccttatctacaatcaagatgacaatgtaattgaattatcttatttataacacggttcgtgattcatgattcatgattacaagtagaaaatatgtcatgttcctcacctccaaataaatatgtgtgtgtctgtgtgtgtgtatatatgtatgtggcggagagggagagagtggggaaggagagcagtgttatcatacatagagaggctaaatgtgtcccatccctcactgtcagctttataaaggagtttgactccatccacagaagaatgttttataagactaggaaaacacgttgaaaactaggataaacagcaacaaaaatcaactaaatatgttgttactgttgctaaggattttctccttagaataatttaggatttttaaaaatttctgtttgccaaatgctgtagataaatggccagattcttcctatccctaggattcctttattattttttttcacagattttgagaacaagggggagagatagtatggaagattaagattccattaatcttatagaactgtgttgtcacccaaattcctgcttgtttgaacatggcatcttcatagattcaggattcactaccctctatagctggatcttgaaaattatctggccagataattttgcatctgcttggatgattgtagactgagatgtgagtggaggataaagtattagacttttgctgagtaactgccaaccaagaagtatttatcggacacttactaggtgcctaggattgtatcagagggaatatgaaatgtgtccctgccctacctagttttaacgacagaatatctattaaaggctacttagctgaagggtaagggtgacaggtctaggggaagctttgggaggtggtgtgctgtgacagaaaaagtggcagagtagggacgagagacctgcattctagccctgtttctgtcacttgctctgtacacttagacaacagcttgacctcttgagctttagtttcctcctctgcataatgagagggttagactactgaattgtatgggaaaaaaatacaaattcctgggtcctaggccatgcctgctgaatccgactgttcaggaagaggcctaggaaatctgtgagggaatccccaggggaatctcgtgaccagccaggtgtgaaatctgctaactggaagatctcaaagcttccttcactttttgtgattttgtggtcatgtaacgttactgtattattctacgtaaatgtgggtacttggatgtttatcatactgtttctctgtgtttacatactaatttgtgtaagaaatgcattttagtctgtgtacctcaacctgctgtttgtttcctagaggtgttagtagtctttaaatacaagtaagacttaagaggatatttgatgttatttacctggatattttcttccccttttatttatttagaggaaattgagattctaggagccaaaaaaatgaaaacaaaattctaaggcaaagttaaagaaaaaaattacattatttcttaccatttgctactttataatgaaaatttaaaaattatatgggaagatttttctctgggataacaaatccttgtcataaagtaagaggtctttttaaagtaggtaggctataaggcctgtaatttaaaataatactcctttctctagggtttggtgcaattctccattaatgaagataacatttgaattccccaaagcaggtgaggagtcggggaggagaaagcgatgttaaaatgaaaactcactgcaaaagaggaggcagaggaagaaggaatgtaaaccccttaaagcagatgtgtgtggggccttatgaagaccaggattctgcgggtgtcaggggattgcccctcttgacagagactagggttttagactgaggcttcctgcagggtgttcgcattgcccttctccgttccccttcagacctttctggggagaagaggtgggaggaggggagaaagactgttcatcttattctgaatcctggagcagctgaaggttttctcttgagtcaggatgcagtggtaatgcattaaccagcaagtgtggccaaggataatgaaaaagtgggaaaggaaggtcctcctcctccctgattgtagcatccagcagtctctgtagccaggttactcaagaaccacatttgatttcctggccctttgccttggcagtgatggcatttttatttcactgtgttttaaagtcttcatttatttttataacatgggttagggagaagggccacaaatggagggattgtcctttcaagcaccacagcttcagataaaattagtactttcaaatattgtccactttaacttaaaaaattctagagggattatattggagactcaactgcccttggttttagtttataaaatggcctagtactgtggaattttaattttagaaagtcttagcatcagatcataaacattcattaaaagaactcacatcccatctgaaacttcccaggggagttgggattcttagtagattggtagaaaggggctcattttctactgcatttcccatttttggtatcttgttcagcatgttttatttttatttcttgtctgcagaacatcctatatttatgagaacattctttaagaagaccaccacatagaataccccttcctatcagctcgctctgatttagccttaattttgttaaattttttagagatgaatgaagtgctgctgtggaaagaaatgtacatatactatttctgtatcattaaaattacatttttatggttc

SEQ ID NO: 1284 - DNA, 759 bp, Homo sapiens
  source 1..759: mol_type = genomic DNA
cgtcttggcacgcgggtgcgcgccgccccctcggcctcctgggctccctgaacctcgcaggaccccggcaacttcgagccccgccccagctccaggccgcgggggcgcatcgcgggcgtcgggcggggcggcccagcgggtaaaagctgcgcggccgcaagctcggcactcacggctctgagggctccgacggcactgacggccatggcgcgttcgaacctcccgctggcgctgggcctggccctggtcgcattctgcctcctggcgctgccacgcgacgcccgggcccggccgcaggagcgcatggtcggagaactccgggacctgtcgcccgacgacccgcaggtgcagaaggcggcgcaggcggccgtggccagctacaacatgggcagcaacagcatctactacttccgagacacgcacatcatcaaggcgcagagccagctggtggccggcatcaagtacttcctgacgatggagatggggagcacagactgccgcaagaccagggtcactggagaccacgtcgacctcaccacttgccccctggcagcaggggcgcagcaggagaagctgcgctgtgactttgaggtccttgtggttccctggcagaactcctctcagctcctaaagcacaactgtgtgcagatgtgataagtccccgagggcgaaggccattgggtttggggccatggtggagggcacttcaggtccgtgggccgtatctgtcacaataaatggccagtgctgcttcttgca

SEQ ID NO: 1285 - DNA, 928 bp, Homo sapiens
  source 1..928: mol_type = genomic DNA
gctgtggccctggcacctgcccctgggctgggacagcccactgttccatgctgcccaagaaggctcagcacaggcacaaaccattgcccggcactggcccgtgctgcctgagaaggattggcacgggcacagaccactgcccccacctgccctgcgccatctacccaagaaggctcggcacgggcaccaaccactgcctccaactgccccatgctgcctgagaaggcactgcacggccacccccaactgccccgcactgtccctacccgggcagccatgcgagcggctggaactctgctggccttctgctgcctggtcttgagcaccactgggggcccttccccagatacttgttcccaggaccttaactcacgtgtgaagccaggatttcctaaaacaataaagaccaatgacccaggagtcctccaagcagccagatacagtgttgaaaagttcaacaactgcacgaacgacatgttcttgttcaaggagtcccgcatcacaagggccctagttcagatagtgaaaggcctgaaatatatgctggaggtggaaattggcagaactacctgcaagaaaaaccagcacctgcgtctggatgactgtgacttccaaaccaaccacaccttgaagcagactctgagctgctactctgaagtctgggtcgtgccctggctccagcacttcgaggtgcctgttctccgttgtcactgacccccgcctcttcagcaagaccacagccatgacaaacaccaggatgcatgctccttgtcccctcccacccgcctcatgacccagcctcacagaccctctcaggcctctgacgagtgagcgggtgaagtgccactgggtcaccgcagggcagctggaatggcagcatggtagcacctcctaacagattaaatagatcacatttgcttctaaaatt

SEQ ID NO: 1286 - DNA, 930 bp, Homo sapiens
  source 1..930: mol_type = genomic DNA
gctgtggccctggcacctgcccctgggctgggacagcccactgttccatgctgcccaagaaggctcagcacaggcacaaaccattgcccggcactggcccgtgctgcctgagaaggattggcacgggcacagaccactgcccccacctgccctgcgccatctacccaagaaggctcggcacgggcaccaaccactgcctccaactgccccatgctgcctgagaaggcactgcacggccacccccaactgccccgcactgtccctacccgggcagccatgcgagcggctggaactctgctggccttctgctgcctggtcttgagcaccactgggggcccttccccagatacttgttcccaggaccttaactcacgtgtgaagccaggatttcctaaaacaataaagaccaatgacccaggagtcctccaagcagccagatacagtgttgaaaagttcaacaactgcacgaacgacatgttcttgttcaaggagtcccgcatcacaagggccctagttcagatagtgaaaggcctgaaatatatgctggaggtggaaattggcagaactacctgcaagaaaaaccagcacctgcgtctggatgactgtgacttccaaaccaaccacaccttgaagcagactctgagctgctactctgaagtctgggtcgtgccctggctccagcacttcgaggtgcctgttctccgttgtcactgacccccgcctcttcagcaagaccacagccatgacaaacaccaggatgcatgctccttgtcccctcccacccgcctcatgacccagcctcacagaccctctcaggcctctgacgagtgagcgggtgaagtgccactgggtcaccgcagggcagctggaatggcagcatggtagcacctcctaacagattaaatagatcacatttgcttctaaaattaa

SEQ ID NO: 1287 - DNA, 1268 bp, Homo sapiens
  source 1..1268: mol_type = genomic DNA
cggtggctcctcccgcccacgcgccagagtcgcagtgggcgggcctacgtgctccgcccgctgtgagcctgtccggcccccgcccgctccggagcaacccgcgagcttacaccggcttctctctgtcctcagcccgcgcgccgccatcgccgtcatgctgggcgccgctctccgccgctgcgctgtggccgcaaccacccgggccgaccctcgaggcctcctgcactccgcccggacccccggccccgccgtggctatccagtcagttcgctgctattcccatgggtcacaggagacagatgaggagtttgatgctcgctgggtaacatacttcaacaagccagatatagatgcctgggaattgcgtaaagggataaacacacttgttacctatgatatggttccagagcccaaaatcattgatgctgctttgcgggcatgcagacggttaaatgattttgctagtacagttcgtatcctagaggttgttaaggacaaagcaggacctcataaggaaatctacccctatgtcatccaggaacttagaccaactttaaatgaactgggaatctccactccggaggaactgggccttgacaaagtgtaaaccgcatggatgggcttccccaaggatttattgacattgctacttgagtgtgaacagttacctggaaatactgatgataacatattaccttatttgaacaagttttcctttattgagtaccaagccatgtaatggtaacttggactttaataaaagggaaatgagtttgaactgaaattaggtatttgtttcatgtgtttgcattaataagcagaaaattaagtgctgtattggtttcatggttttgctgccctcttacatgctgagagaactgtgttaattctctggaaaccatctgacatgaaaatcagcttcattaatatgtttgggtgccctagcttgtaaattagctgaaggctagaagtcatttatatagaattttcttgttgacaccctaggcttaggggactggttgtctgtggggatagatcaaattgtgtacctttccaaaacaggttttaatgatgtttaaaagtggtcactgagatagtcttgaggatgtgctatgcagtagccaagccctcttacggtgtgttcctctcttagtgcccctttcctttcctacctgttcttcccttgcagtggtgtattagccttggacattaaaacatttgctttgtaaatttggaggcattctgattaaacagctgagtaaaacaaa

SEQ ID NO: 1288 - DNA, 4098 bp, Homo sapiens
  source 1..4098: mol_type = genomic DNA
gtagccgccagctcggccgcacgtcagggcgcgggagcgcggagcgagtttggttgcacttacaccggtacttaagcgcggaccggcgtgtccttggacttagagagtggggacgtccggcttcggagcgggagtgttcgttgtgccagcgactaaaaagagaattaaatatgggtgatgttgagaaaggcaagaagatttttattatgaagtgttcccagtgccacaccgttgaaaagggaggcaagcacaagactgggccaaatctccatggtctctttgggcggaagacaggtcaggcccctggatactcttacacagccgccaataagaacaaaggcatcatctggggagaggatacactgatggagtatttggagaatcccaagaagtacatccctggaacaaaaatgatctttgtcggcattaagaagaaggaagaaagggcagacttaatagcttatctcaaaaaagctactaatgagtaataattggccactgccttatttattacaaaacagaaatgtctcatgacttttttatgtgtaccatcctttaatagatctcatacaccagaattcagatcatgaatgactgacagaatattttgttgggcagtcctgatttaaaactaagactggcttgtggttaaatgaatatgttcagtttttgaattttaatagtaactccaattcagtaaatggtatcactgtttaccccttttaaagatatgattagacttcgttagtaatgttcaacttttcacaaagatggtgagtgccatcttaaaacttactggagattggttttatatttagatttatataactggttatgtgaatatatttaaatactggggaaattgcttcactgtcttagaaccaagcaagattcacctgtgttttgtgttcatgttcatttgcctcttaaaggcaagggttgaagataaataaggtagcaatgtctatagttttggccttaactatgccaatctaattataattccctgtatttaaaatggtttcttttacttattgaaaggcattttagtgtggtttatgtgtaatattaaagattattcaacacctctcacatcttacagatctataaggtcacatgcttttaaaatagtagcaagttaaacttcactcttgaattctttacaatctaagtcaaactaagttataatttaggattgtctttaaacagccattcagaaacaaaactgtagaactgtgtatttgattgggaatggtgcttttgccaacttaaaaggattaaagtaacggagatatacacaaattttaaaattatgtgtgatcacaagactaaagataattaaaaagaaaaccacagatcatgactttttgactgtgcttgatttcatgactgatgcacaaattttaatgattaaaaagtgcaggagccctaaatgtcagtgcagcagccctaaatgtcagtgcagcagtgttaaccagtcatggtgctagattgtttacttggttttctaggactgcctcaactagaataacacttcactaattgactcttagtttctttgctcagattgagaactgcagcatttatgccagacatggacagaggaatgcctgtggtcatagttttgtgatgtgtaacagtgtataattacatactgaattatttcatgcatagtctgtgccatacacatttagagtagtccttggagattttatggagatggtgagcacaaggtaagtcataaagaataatgagaaaataaatctatgctggtgcagctgagaactgtatctttgtgggacagtgagaagactgagaagatgtgaatccatggtctcaaaggtgatagggacgattagataggtgttttaaggcctgaaagcaatttataacatatgagtcttatttttatttatagaaatgtggaaagcttgctgtaattcatatttgaagtcctagtctgagttctggtggggaatttaaaaatgcatcctggaaatcctttaaagatttcagactttgaaaggccttgtagcagaggacttggtgactgtataaagttagtggtattcagggacagtgtagcaagtagcttacaaggggacaattctggactaatgagaaagacctgaagtgaaggctagagagttgattttttttttttttggcatcctggaaatgatacaggaaacatattaagatagatacagaaatgtgttcaaccttccatcttggctagttgtggcgtttagtttgttttttgagacatggtcacgctgtgtcgccaaggctggagtgcagtggtgcgatctcggctggctgcaacctctatttcccaggctcaagcgattctctcacttcagcttcccaagtagctgggactacaggtgttcgccaccatgcccagctaatttttttgtagagatggagttttgccatgtggtcccaggctggtctcaaactcctgagctcaagcaatccgtccacttgccttggctccccaaagtgctgggattacaggcgtgagccaccaggccctgcctggttttcaaattcagaaatcttattatttaacccagaagtaatcagcccagtagtaacttaggtttaattttttttcaggtttaaaatttttctcatttattttttctgagacggagtttcgcccttttcgcccaggctgagtacagtggtgcaatctcactgcaacctccgccttccagttgcaagtgattctcctgcctcagcctcctgagtagctgggattacaggcacccgccaccacgcctggctaatttttgtatttttagtggagatggtgtttcaccatgttggccagactggtcttggactcctgacctcgtgatccacccaccttggcctcccaaagttctaggattacaggtgtgagccaccacgtccggccaatttttctcatttctatgcctcctatattaaggtctgtgttggcacagatgagtaactgccatgttctaggtcagttatacccaagcacttctggtggtttaaaatgtgattctgtaacttttttatttttatttttttgagataatttcactcttgttgcccaggctggagtgcaatggcgtgatcgctgctcaccgcaacctccgccttccaggttcaagcgattctcctgactcagcctctcaagtagctgggattacaagcatgcgccaccatgcccagcttattttgtgtttttagtagagacagggtttctccatgctggacaggctggtcttgaactcccgacgtcaggtgatctacctgcctcggcctcccaaagtgctgggattacaggcgtgagccaccacgcctggccaattatgtaattttttaaaaaggacatttctatcagggatatataccttcagaaataaggaaataggggaaaaaaagagcactataaaccacatgttttcatttctagtgcttcgctgtaagtggctaggttggtagaatcaaaaacaagggccagatgtatttaaggggtattcagatgccacctacatgcttattttgtctagaacagtgctgtctaatagaactttctgtgacgatggatattttgtagacttttgctgtccagtgtggtagccactaaccacatgtggctgttaagcccttgaaatatagctagtgtgactagaaagtattttattttaaatttacataggcacaagtggctagtggctactgtattgacattctgggtctaggactagaaccagtggtctgtaacaaaagtactttctctttactctattaaatctagaattagccgggcatggtcgctcatgcctgtaatcccagcactttgggaggccaaggcaggcagatcacttgaggtcaggcgtttgagaccagcctggtcaacatggcgaaaccctgtctctacaaaaaacataaaaattagccaggtgtggtggtgggcacctgtaatctcagctacttgggaggctgaggcacaagaatcacttgaacttgggaggtggaggttgcagtgagccaagattgtgccactgcactcaagcctgggtgacgagtgaaactgtctccaaaaaaaaaaaaaaa

SEQ ID NO: 1289 - DNA, 974 bp, Homo sapiens
  source 1..974: mol_type = genomic DNA
acgtccggcttcggagcgggagtgttcgttgtgccagcgactaaaaagaggtgagagcgggtcgcggaggccgcacctggttagaggcagagctgtgggaggcgcgcacttgcgagcgaccgaaacccaagcggggagcattcgagtggagcccgcgctgggtgggagggcggggagtgaagaccctggactgtggtcagaccgagctgggcgagtaacggcttgaggtgcggcggagccctaactagggacagaattaaatatgggtgatgttgagaaaggcaagaagatttttattatgaagtgttcccagtgccacaccgttgaaaagggaggcaagcacaagactgggccaaatctccatggtctctttgggcggaagacaggtcaggcccctggatactcttacacagccgccaataagaacaaaggcatcatctggggagaggatacactgatggagtatttggagaatcccaagaagtacatccctggaacaaaaatgatctttgtcggcattaagaagaaggaagaaagggcagacttaatagcttatctcaaaaaagctactaatgagtaataattggccactgccttatttattacaaaacagaaatgtctcatgacttttttatgtgtaccatcctttaatagatctcatacaccagaattcagatcatgaatgactgacagaatattttgttgggcagtcctgatttaaaactaagactggcttgtggttaaatgaatatgttcagtttttgaattttaatagtaactccaattcagtaaatggtatcactgtttaccccttttaaagatatgattagacttcgttagtaatgttcaacttttcacaaagatggtgagtgccatcttaaaacttactggagattggttttatatttagatttatataactggttatgtgaatatatttaaatactggggaaattgcttcactgtcttagaac

SEQ ID NO: 1290 - DNA, 799 bp, Homo sapiens
  source 1..799: mol_type = genomic DNA
agagagtggggacgtccggcttcggagcgggagtgttcgttgtgccagcgactaaaaagagagggcaaaagctgttgctcttctaataaggggccagttcttttcgtgggcacatgtttcttccgtcagtcgttctgacatcctagaaggagtttcatcaatcaccttgaaaccgacctggacgggtgacctcgtggtcgccccaggagatcacagaattaaatatgggtgatgttgagaaaggcaagaagatttttattatgaagtgttcccagtgccacaccgttgaaaagggaggcaagcacaagactgggccaaatctccatggtctctttgggcggaagacaggtcaggcccctggatactcttacacagccgccaataagaacaaaggcatcatctggggagaggatacactgatggagtatttggagaatcccaagaagtacatccctggaacaaaaatgatctttgtcggcattaagaagaaggaagaaagggcagacttaatagcttatctcaaaaaagctactaatgagtaataattggccactgccttatttattacaaaacagaaatgtctcatgacttttttatgtgtaccatcctttaatagatctcatacaccagaattcagatcatgaatgactgacagaatattttgttgggcagtcctgatttaaaactaagactggcttgtggttaaatgaatatgttcagtttttgaattttaatagtaactccaattcagtaaatggtatcactgtttaccccttttaaagatatgattagacttcgt

SEQ ID NO: 1291 - DNA, 498 bp, Homo sapiens
  source 1..498: mol_type = genomic DNA
agagagtggggacgtccggcttcggagcgggagtgttcgttgtgccagcgactaaaaagaggggccagttcttttcgtgggcacatgtttcttccgtcagtcgttctgacatcctagaaggagtttcatcaatcaccttgaaaccgacctggacgggtgacctcgtggtcgccccaggagatcacagaattaaatatgggtgatgttgagaaaggcaagaagatttttattatgaagtgttcccagtgccacaccgttgaaaagggaggcaagcacaagactgggccaaatctccatggtctctttgggcggaagacaggtcaggcccctggatactcttacacagccgccaataagaacaaaggcatcatctggggagaggatacactgatggagtatttggagaatcccaagaagtacatccctggaacaaaaatgatctttgtcggcattaagaagaaggaagaaagggcagacttaatagcttatctcaaaaaa

SEQ ID NO: 1292 - DNA, 5247 bp, Homo sapiens
  source 1..5247: mol_type = genomic DNA
aaaacccggaggagcgggatggcgcgctttgactctggagtgggagtgggagcgagcgcttctgcgactccagttgtgagagccgcaagggcatgggaattgacgccactcaccgacccccagtctcaatctcaacgctgtgaggaaacctcgactttgccaggtccccaagggcagcggggctcggcgagcgaggcacccttctccgtccccatcccaatccaagcgctcctggcactgacgacgccaagagactcgagtgggagttaaagcttccagtgagggcagcaggtgtccaggccgggctgcgggttcctgttgacgtcttgccctaggcaaaggtcccagttccttctcggagccggctgtcccgcgccactggaaaccgcacctccccgcagcatgggcaccagcctcagcccgaacgacccttggccgctaaacccgctgtccatccagcagaccacgctcctgctactcctgtcggtgctggccactgtgcatgtgggccagcggctgctgaggcaacggaggcggcagctccggtccgcgcccccgggcccgtttgcgtggccactgatcggaaacgcggcggcggtgggccaggcggctcacctctcgttcgctcgcctggcgcggcgctacggcgacgttttccagatccgcctgggcagctgccccatagtggtgctgaatggcgagcgcgccatccaccaggccctggtgcagcagggctcggccttcgccgaccggccggccttcgcctccttccgtgtggtgtccggcggccgcagcatggctttcggccactactcggagcactggaaggtgcagcggcgcgcagcccacagcatgatgcgcaacttcttcacgcgccagccgcgcagccgccaagtcctcgagggccacgtgctgagcgaggcgcgcgagctggtggcgctgctggtgcgcggcagcgcggacggcgccttcctcgacccgaggccgctgaccgtcgtggccgtggccaacgtcatgagtgccgtgtgtttcggctgccgctacagccacgacgaccccgagttccgtgagctgctcagccacaacgaagagttcgggcgcacggtgggcgcgggcagcctggtggacgtgatgccctggctgcagtacttccccaacccggtgcgcaccgttttccgcgaattcgagcagctcaaccgcaacttcagcaacttcatcctggacaagttcttgaggcactgcgaaagccttcggcccggggccgccccccgcgacatgatggacgcctttatcctctctgcggaaaagaaggcggccggggactcgcacggtggtggcgcgcggctggatttggagaacgtaccggccactatcactgacatcttcggcgccagccaggacaccctgtccaccgcgctgcagtggctgctcctcctcttcaccaggtatcctgatgtgcagactcgagtgcaggcagaattggatcaggtcgtggggagggaccgtctgccttgtatgggtgaccagcccaacctgccctatgtcctggccttcctttatgaagccatgcgcttctccagctttgtgcctgtcactattcctcatgccaccactgccaacacctctgtcttgggctaccacattcccaaggacactgtggtttttgtcaaccagtggtctgtgaatcatgacccagtgaagtggcctaacccggagaactttgatccagctcgattcttggacaaggatggcctcatcaacaaggacctgaccagcagagtgatgattttttcagtgggcaaaaggcggtgcattggcgaagaactttctaagatgcagctttttctcttcatctccatcctggctcaccagtgcgatttcagggccaacccaaatgagcctgcgaaaatgaatttcagttatggtctaaccattaaacccaagtcatttaaagtcaatgtcactctcagagagtccatggagctccttgatagtgctgtccaaaatttacaagccaaggaaacttgccaataagaagcaagaggcaagctgaaattttagaaatattcacatcttcggagatgaggagtaaaattcagtttttttccagttcctcttttgtgctgcttctcaattagcgtttaaggtgagcataaatcaactgtccatcaggtgaggtgtgctccatacccagcggttcttcatgagtagtgggctatgcaggagcttctgggagatttttttgagtcaaagacttaaagggcccaatgaattattatatacatactgcatcttggttatttctgaaggtagcattctttggagttaaaatgcacatatagacacatacacccaaacacttacaccaaactactgaatgaagcagtattttggtaaccaggccatttttggtgggaatccaagattggtctcccatatgcagaaatagacaaaaagtatattaaacaaagtttcagagtatattgttgaagagacagagacaagtaatttcagtgtaaagtgtgtgattgaaggtgataagggaaaagataaagaccagaaattcccttttcaccttttcaggaaaataacttagactctagtatttatgggtggatttatccttttgccttctggtatacttccttacttttaaggataaatcataaagtcagttgctcaaaaagaaatcaatagttgaattagtgagtatagtggggttccatgagttatcatgaattttaaagtatgcattattaaattgtaaaactccaaggtgatgttgtacctcttttgcttgccaaagtacagaatttgaattatcagcaaagaaaaaaaaaaaagccagccaagctttaaattatgtgaccataatgtactgatttcagtaagtctcataggttaaaaaaaaaagtcaccaaatagtgtgaaatatattacttaactgtccgtaagcagtatattagtattatcttgttcaggaaaaggttgaataatatatgccttgtataatattgaaaattgaaaagtacaactaacgcaaccaagtgtgctaaaaatgagcttgattaaatcaaccacctatttttgacatggaaatgaagcagggtttcttttcttcactcaaattttggcgaatctcaaaattagatcctaagatgtgttcttatttttataacatctttattgaaattctatttataatacagaatcttgttttgaaaataacctaattaatatattaaaattccaaattcatggcatgcttaaattttaactaaattttaaagccattctgattattgagttccagttgaagttagtggaaatctgaacattctcctgtggaaggcagagaaatctaagctgtgtctgcccaatgaataatggaaaatgccatgaattacctggatgttctttttacgaggtgacaagagttggggacagaactcccattacaactgaccaagtttctcttctagatgattttttgaaagttaacattaatgcctgctttttggaaagtcagaatcagaagatagtcttggaagctgtttggaaaagacagtggagatgaggtcagttgtgttttttaagatggcaattactttggtagctgggaaagcataaagctcaaatgaaatgtatgcattcacatttagaaaagtgaattgaagtttcaagttttaaagttcattgcaattaaacttccaaagaaagttctacagtgtcctaagtgctaagtgcttattacattttattaagctttttggaatctttgtaccaaaattttaaaaaagggagtttttgatagttgtgtgtatgtgtgtgtggggtggggggatggtaagagaaaagagagaaacactgaaaagaaggaaagatggttaaacattttcccactcattctgaattaattaatttggagcacaaaattcaaagcatggacatttagaagaaagatgtttggcgtagcagagttaaatctcaaataggctattaaaaaagtctacaacatagcagatctgttttgtggtttggaatattaaaaaacttcatgtaattttattttaaaatttcatagctgtacttcttgaatataaaaaatcatgccagtatttttaaaggcattagagtcaactacacaaagcaggcttgcccagtacatttaaattttttggcacttgccattccaaaatattatgccccaccaaggctgagacagtgaatttgggctgctgtagcctatttttttagattgagaaatgtgtagctgcaaaaataatcatgaaccaatctggatgcctcattatgtcaaccaggtccagatgtgctataatctgtttttacgtatgtaggcccagtcgtcatcagatgcttgcggcaaaaggaaagctgtgtttatatggaagaaagtaaggtgcttggagtttacctggcttatttaatatgcttataacctagttaaagaaaggaaaagaaaacaaaaaacgaatgaaaataactgaatttggaggctggagtaatcagattactgctttaatcagaaaccctcattgtgtttctaccggagagagaatgtatttgctgacaaccattaaagtcagaagttttactccaggttattgcaataaagtataatgtttattaaatgcttcatttgtatgtcaaagctttgactctataagcaaattgcttttttccaaaacaaaaagatgtctcaggtttgttttgtgaattttctaaaagctttcatgtcccagaacttagcctttacctgtgaagtgttactacagccttaatattttcctagtagatctatattagatcaaatagttgcatagcagtatatgttaatttgtgtgtttttagctgtgacacaactgtgtgattaaaaggtatactttagtagacatttataactcaaggataccttcttatttaatcttttcttatttttgtactttatcatgaatgcttttagtgtgtgcataatagctacagtgcatagttgtagacaaagtacattctggggaaacaacatttatatgtagcctttactgtttgatataccaaattaaaaaaaaattgtatctcattacttatactgggacaccattaccaaaataataaaaatcactttcataatcttgttatgaagttttatgttgtagcaaatatagtctaatgtatcactttatttcaactattactatggattattcaattaaaatattgcactgtaaa

SEQ ID NO: 1293 - DNA, 2173 bp, Homo sapiens
  source 1..2173: mol_type = genomic DNA
ccactcaccgacccccagtctcaatctcaacgctgtgaggaaacctcgactttgccaggtccccaagggcagcggggctcggcgagcgaggcacccttctccgtccccatcccaatccaagcgctcctggcactgacgacgccaagagactcgagtgggagttaaagcttccagtgagggcagcaggtgtccaggccgggctgcgggttcctgttgacgtcttgccctaggcaaaggtcccagttccttctcggagccggctgtcccgcgccactggaaaccgcacctccccgcaggtcacatgggcaccagcctcagcccgaacgacccttggccgctaaacccgctgtccatccagcagaccacgctcctgctactcctgtcggtgctggccactgtgcatgtgggccagcggctgctgaggcaacggaggcggcagctccggtccgcgcccccgggcccgtttgcgtggccactgatcggaaacgcggcggcggtgggccaggcggctcacctctcgttcgctcgcctggcgcggcgctacggcgacgttttccagatccgcctgggcagctgccccatagtggtgctgaatggcgagcgcgccatccaccaggccctggtgcagcagggctcggccttcgccgaccggccggccttcgcctccttccgtgtggtgtccggcggccgcagcatggctttcggccactactcggagcactggaaggtgcagcggcgcgcagcccacagcatgatgcgcaacttcttcacgcgccagccgcgcagccgccaagtcctcgagggccacgtgctgagcgaggcgcgcgagctggtggcgctgctggtgcgcggcagcgcggacggcgccttcctcgacccgaggccgctgaccgtcgtggccgtggccaacgtcatgagtgccgtgtgtttcggctgccgctacagccacgacgaccccgagttccgtgagctgctcagccacaacgaagagttcgggcgcacggtgggcgcgggcagcctggtggacgtgatgccctggctgcagtacttccccaacccggtgcgcaccgttttccgcgaattcgagcagctcaaccgcaacttcagcaacttcatcctggacaagttcttgaggcactgcgaaagccttcggcccggggccgccccccgcgacatgatggacgcctttatcctctctgcggaaaagaaggcggccggggactcgcacggtggtggcgcgcggctggatttggagaacgtaccggccactatcactgacatcttcggcgccagccaggacaccctgtccaccgcgctgcagtggctgctcctcctcttcaccaggtatcctgatgtgcagactcgagtgcaggcagaattggatcaggtcgtggggagggaccgtctgccttgtatgggtgaccagcccaacctgccctatgtcctggccttcctttatgaagccatgcgcttctccagctttgtgcctgtcactattcctcatgccaccactgccaacacctctgtcttgggctaccacattcccaaggacactgtggtttttgtcaaccagtggtctgtgaatcatgacccagtgaagtggcctaacccggagaactttgatccagctcgattcttggacaaggatggcctcatcaacaaggacctgaccagcagagtgatgattttttcagtgggcaaaaggcggtgcattggcgaagaactttctaagatgcagctttttctcttcatctccatcctggctcaccagtgcgatttcagggccaacccaaatgagcctgcgaaaatgaatttcagttatggtctaaccattaaacccaagtcatttaaagtcaatgtcactctcagagagtccatggagctccttgatagtgctgtccaaaatttacaagccaaggaaacttgccaataagaagcaagaggcaagctgaaattttagaaatattcacatcttcggagatgaggagtaaaattcagtttttttccagttcctcttttgtgctgcttctcaattagcgtttaaggtgagcataaatcaactgtccatcaggtgaggtgtgctccatacccagcggttcttcatgagtagtgggctatgcaggagcttctgggagatttttttgagtcaaagacttaaagggcccaatgaatt

SEQ ID NO: 1294 - DNA, 5451 bp, Homo sapiens
  source 1..5451: mol_type = genomic DNA
cccagacgctcatggagacagcctcggttcataaatcaggtggggccaggggctgggggcccacacgccatggagcccgactcccttctggaccaagacgactcctacgagtcgcctcaagaaaggccgggctctcggcgcagcctgcctggcagcctttccgagaagagccccagcatggagccctcggccgccacgccgttccgggtcacgggcttcctcagccgccgcctcaagggctccatcaagcgcaccaagagccagcccaagctggaccgcaaccacagcttccgccacatcctgccggggttccggagcgccgccgccgccgccgcggacaatgagaggtcccatctgatgccgaggctgaaggagtctcgctcccacgagtccctgctcagccccagcagtgcggtggaggcgctggacctcagcatggaggaagaggtggtcatcaagcccgtgcacagcagcatccttggccaggactactgcttcgaggtgacgacgtcatcaggaagcaagtgcttttcctgccggtctgcagctgagcgggataagtggatggagaacctccggcgagcggtgcatcccaacaaggacaacagccggcgtgtggagcacatcctgaagctgtgggtgatcgaggccaaggacctgccagccaagaagaagtacctgtgcgagctgtgcctggacgatgtgctctatgcccgcaccacgggcaagctcaagacggacaatgttttctggggcgagcacttcgagttccacaacttgccgcctctgcgcacggtcactgtccacctgtaccgggagaccgacaagaagaagaagaaggagcgcaacagttacctgggcctggtgagcctacctgctgcctcggtggccgggcggcagttcgtggagaagtggtacccggtggtgacgcccaaccccaagggcggcaagggccctggacccatgatccgcatcaaggcgcgctaccaaaccatcaccatcctgcccatggagatgtacaaagagttcgctgagcacatcaccaaccactacctggggctgtgtgcagccctcgagcccatcctcagtgccaagaccaaggaggagatggcatctgccctggtgcacatcctgcagagcacgggcaaggtgaaggacttcctgacagacctgatgatgtcagaggtggaccgctgcggggacaacgagcacctcatcttccgggagaacacactggccaccaaggccattgaggagtacctcaagctagtgggccagaagtacctgcaggacgccctaggtgagttcatcaaagcgctgtatgagtcagatgagaactgcgaagtggatcccagcaagtgctcggccgctgacctcccagagcaccagggcaacctcaagatgtgctgcgagctggccttctgcaagatcatcaactcctactgtgtcttcccacgggagttgaaagaggtgtttgcctcgtggaggcaggagtgcagcagtcgcggccgcccggacatcagtgagcggctcatcagcgcctccctcttcctgcgcttcctctgcccagccatcatgtcgccctcactcttcaacctgctgcaggagtaccctgatgaccgcactgcccgcaccctcaccctcatcgccaaggtcacccagaacctggccaactttgccaaatttggcagcaaggaggaatacatgtccttcatgaaccagttcctagagcatgagtggaccaacatgcagcgcttcctgctggagatctccaaccccgagaccctctccaatacagccggcttcgagggctacatcgacctgggccgcgagctctccagcctgcactcactgctctgggaggccgtcagccagctggagcagagcatagtatccaaactgggacccctgcctcggatcctgagggacgtccacacagcactgagcaccccaggtagcgggcagctcccagggaccaatgacctggcctccacaccgggctctggcagcagcagcatctcagctgggctgcagaagatggtgattgagaacgatctttccggtctgatagatttcacccggttaccgtctccaacccccgaaaacaaggacttgttttttgtcacaaggtcctccggggtccagccctcacctgcccgcagctcgagttactcggaagccaacgagcctgatcttcagatggccaacggtggcaagagcctctccatggtggacctccaggacgcccgcacgctggatggggaggcaggctccccggcgggccccgacgtcctccccacagatgggcaggccgctgcagctcagctggtggccgggtggccggcccgggcaaccccagtgaacctggcagggctggccacggtgcggcgggcaggccagacaccaaccacaccaggcacctccgagggcgcgccaggccggccccagctgttggcaccgctctccttccagaaccctgtgtaccagatggcggctggcctgccgctgtcaccccgtggccttggcgactcaggctctgagggccacagctccctgagctcacacagcaacagcgaggagttggcggctgctgccaagctgggaagtttcagcactgccgcggaggagctggctcggcggcccggtgagctggcacggcgacagatgtcactgactgaaaaaggcgggcagcccacggtgccacggcagaacagtgctggcccccagaggaggatcgaccagcctccgcccccacccccgccgccacctcctgccccccgcggccggacgccccccaacctgctgagcaccctgcagtacccaagaccctcaagcggaaccctggcgtcggcctcacctgattgggtgggccccagtacccgcctgaggcagcagtcctcttcctccaagggggacagcccagaactgaagccacgggcagtgcacaagcagggcccttcacctgtgagccccaatgccctggaccgcacagccgcttggctcttgaccatgaacgcgcagttgttagaagacgagggcctgggcccagaccccccccacagggataggctaaggagtaaggacgagctcagccaagcagaaaaggacctggcggtgctgcaggacaagctgcgaatctccaccaagaagctggaggagtatgagaccctgttcaagtgccaggaggagacgacgcagaagctggtgctggagtaccaggcacggctggaggagggcgaggagcggctgcggcggcagcaggaggacaaggacatccagatgaagggcatcatcagcaggttgatgtccgtggaggaagaactgaagaaggaccacgcagagatgcaagcggctgtggactccaaacagaagatcattgatgcccaggagaagcgcattgcctcgttggatgccgccaatgcccgcctcatgagtgccctgacccagctgaaagagagtatgcattagaaacaaaagcccgcttgctcgcttgctggaacacaggggccttttaagttgagcgtgcgcactgcatgggaaatagcggccctggaggatgttagacttgctccctctccaagacagcagcagcctgcacctgccccgtgtgtgtggccggcctcctcctcacccttcccggcccccggccaaggacccaggcgctgcatacaggggaggggcgcaccccacagctggggccggttttcctcagctctaggctgttctgtagcttatctgcccctcccccactttcaagacagatgagcaggagcttgggtctctctcggcccctgtctgttcccagcccctgcagattctgagcaaaggccctgggtaagaagggtgggagtggggcctttgccagcagagccagggcagggcgagctgcaggaatcacccctctgcccctgcagctggaatgtgccacagaggccccacctgaagggtggatgtgctggaggggtggcccagagccatactgcgtccaccctgagctcggggacaggtgacagtggctgctctgggaaggggcttttagatgtaacctacaattcagttaggctagagacagatgctggtggaggaagggctgggccaccagggatcacagaccacaggaagatgggaggtggaagcagaggccctgcccccaccccttcctgtctcactcttctgtcttgtccccacccatgcgccttcgtgcctgagaccagggtggccacacaggcagggcctggctccagtctcatcctcccattgcccagtgagccctgctcttctctccccagccccctcccaccgctgcctcgtagagtgacctcggacagagcccccctagcaatacagggaggctcccggggcctggacaggcgggctcggaggctacccgctgtggccggtgccagctgcccttgcagggtgggtgagctctcaggccgagagccttatttacctagtgcaaaaactgtaaaagtgtacagactcttcacagatttttatcttaattgcaagtctgccgattttgtaaatgttcttggtgtttgactgtaatgtaactatctcacctaatggttgtacatatcctttggtcctggtgctgccgagggctggccgggactgctgctctcccaagggttttattttatttctgaatctagagaacagtattgggcaggaggaaaaggcttggtgtctgcggggggtgtcttccctgcctgtggcatttgtgtgttggctttgcagctgctgtctgagtagtggccactggggtgccttcactgggccagtcaacggggggctcctgcccaggccacagagaacctgagttcccgggagctgggccctgcctgcagccagggctggggttgccagaggccctggagggaaggacagtccctgctggggaagaacagccccggggccccctggtcaccgagactcagcctctgctggagaaagccacgccctccctgctagcacagaggcctgactgacttttttgcttaacttccatgttctgggtgatggaaactgccaaacctcctgtcagtgaggactctttccgactgcccagaaagtgggggtggaggaccgaggctacagctccacacgccccggtcccccagagcatctgccccaggtacacctccccctgcgccccgcacgactgcgggagccagactgtccagggaaacagcctctctcttttctacacactcagccacaaagccccccagctcccacaccgcgtcccagctcccctcttttgtaagtatgtgaaaaggaaaaaatgcaaacgttggagtttgggctggagctcctccctccagctgcgacttttaactatgtaataatgtacagaggaagctgttggtgttctaagactctgtgtggctgtgcaatttctgtacatttgcaattagaaatattaaagatttatttagctatttt

SEQ ID NO: 1295 - DNA, 3500 bp, Homo sapiens
  source 1..3500: mol_type = genomic DNA
tgttcctcttctttcgtgttgtgtcagaagccatgatttccagtcttctcatctggaagatgaaggaaaagatagacccgaccccacagggttctgaggctcaaactgaaagcctggtggtggggcacctgtgacaggtcccatctgatgccgaggctgaaggagtctcgctcccacgagtccctgctcagccccagcagtgcggtggaggcgctggacctcagcatggaggaagaggtggtcatcaagcccgtgcacagcagcatccttggccaggactactgcttcgaggtgacgacgtcatcaggaagcaagtgcttttcctgccggtctgcagctgagcgggataagtggatggagaacctccggcgagcggtgcatcccaacaaggacaacagccggcgtgtggagcacatcctgaagctgtgggtgatcgaggccaaggacctgccagccaagaagaagtacctgtgcgagctgtgcctggacgatgtgctctatgcccgcaccacgggcaagctcaagacggacaatgttttctggggcgagcacttcgagttccacaacttgccgcctctgcgcacggtcactgtccacctgtaccgggagaccgacaagaagaagaagaaggagcgcaacagttacctgggcctggtgagcctacctgctgcctcggtggccgggcggcagttcgtggagaagtggtacccggtggtgacgcccaaccccaagggcggcaagggccctggacccatgatccgcatcaaggcgcgctaccaaaccatcaccatcctgcccatggagatgtacaaagagttcgctgagcacatcaccaaccactacctggggctgtgtgcagccctcgagcccatcctcagtgccaagaccaaggaggagatggcatctgccctggtgcacatcctgcagagcacgggcaaggtgaaggacttcctgacagacctgatgatgtcagaggtggaccgctgcggggacaacgagcacctcatcttccgggagaacacactggccaccaaggccattgaggagtacctcaagctagtgggccagaagtacctgcaggacgccctaggtgagttcatcaaagcgctgtatgagtcagatgagaactgcgaagtggatcccagcaagtgctcggccgctgacctcccagagcaccagggcaacctcaagatgtgctgcgagctggccttctgcaagatcatcaactcctactgtgtcttcccacgggagttgaaagaggtgtttgcctcgtggaggcaggagtgcagcagtcgcggccgcccggacatcagtgagcggctcatcagcgcctccctcttcctgcgcttcctctgcccagccatcatgtcgccctcactcttcaacctgctgcaggagtaccctgatgaccgcactgcccgcaccctcaccctcatcgccaaggtcacccagaacctggccaactttgccaaatttggcagcaaggaggaatacatgtccttcatgaaccagttcctagagcatgagtggaccaacatgcagcgcttcctgctggagatctccaaccccgagaccctctccaatacagccggcttcgagggctacatcgacctgggccgcgagctctccagcctgcactcactgctctgggaggccgtcagccagctggagcagagcatagtatccaaactgggacccctgcctcggatcctgagggacgtccacacagcactgagcaccccaggtagcgggcagctcccagggaccaatgacctggcctccacaccgggctctggcagcagcagcatctcagctgggctgcagaagatggtgattgagaacgatctttccggtctgatagatttcacccggttaccgtctccaacccccgaaaacaaggacttgttttttgtcacaaggtcctccggggtccagccctcacctgcccgcagctcgagttactcggaagccaacgagcctgatcttcagatggccaacggtggcaagagcctctccatggtggacctccaggacgcccgcacgctggatggggaggcaggctccccggcgggccccgacgtcctccccacagatgggcaggccgctgcagctcagctggtggccgggtggccggcccgggcaaccccagtgaacctggcagggctggccacggtgcggcgggcaggccagacaccaaccacaccaggcacctccgagggcgcgccaggccggccccagctgttggcaccgctctccttccagaaccctgtgtaccagatggcggctggcctgccgctgtcaccccgtggccttggcgactcaggctctgagggccacagctccctgagctcacacagcaacagcgaggagttggcggctgctgccaagctgggaagtttcagcactgccgcggaggagctggctcggcggcccggtgagctggcacggcgacagatgtcactgactgaaaaaggcgggcagcccacggtgccacggcagaacagtgctggcccccagaggaggatcgaccagcctccgcccccacccccgccgccacctcctgccccccgcggccggacgccccccaacctgctgagcaccctgcagtacccaagaccctcaagcggaaccctggcgtcggcctcacctgattgggtgggccccagtacccgcctgaggcagcagtcctcttcctccaagggggacagcccagaactgaagccacgggcagtgcacaagcagggcccttcacctgtgagccccaatgccctggaccgcacagccgcttggctcttgaccatgaacgcgcagttgttagaagacgagggcctgggcccagaccccccccacagggataggctaaggagtaaggacgagctcagccaagcagaaaaggacctggcggtgctgcaggacaagctgcgaatctccaccaagaagctggaggagtatgagaccctgttcaagtgccaggaggagacgacgcagaagctggtgctggagtaccaggcacggctggaggagggcgaggagcggctgcggcggcagcaggaggacaaggacatccagatgaagggcatcatcagcaggttgatgtccgtggaggaagaactgaagaaggaccacgcagagatgcaagcggctgtggactccaaacagaagatcattgatgcccaggagaagcgcattgcctcgttggatgccgccaatgcccgcctcatgagtgccctgacccagctgaaagagaggtacagcatgcaagcccgtaacggcatctcccccaccaaccccaccaaattgcagattactgagaacggcgagttcagaaacagcagcaattgttaacctgcctgaggagggaggaagctacccaaggagagggggactatggtggccaagggcagggtctcggcctggggaggcacccacggttgcagccccagcgcgggtgtcaggaggccgagcctcccctccctgccgctgtccaggaggcggccgca

SEQ ID NO: 1296 - DNA, 5193 bp, Homo sapiens
  source 1..5193: mol_type = genomic DNA
agccagcccaagctggaccgcaaccacagcttccgccacatcctgccggggttccggagcgccgccgccgccgccgcggacaatgagaggtcccatctgatgccgaggctgaaggagtctcgctcccacgagtccctgctcagccccagcagtgcggtggaggcgctggacctcagcatggaggaagaggtggtcatcaagcccgtgcacagcagcatccttggccaggactactgcttcgaggtgacgacgtcatcaggaagcaagtgcttttcctgccggtctgcagctgagcgggataagtggatggagaacctccggcgagcggtgcatcccaacaaggacaacagccggcgtgtggagcacatcctgaagctgtgggtgatcgaggccaaggacctgccagccaagaagaagtacctgtgcgagctgtgcctggacgatgtgctctatgcccgcaccacgggcaagctcaagacggacaatgttttctggggcgagcacttcgagttccacaacttgccgcctctgcgcacggtcactgtccacctgtaccgggagaccgacaagaagaagaagaaggagcgcaacagttacctgggcctggtgagcctacctgctgcctcggtggccgggcggcagttcgtggagaagtggtacccggtggtgacgcccaaccccaagggcggcaagggccctggacccatgatccgcatcaaggcgcgctaccaaaccatcaccatcctgcccatggagatgtacaaagagttcgctgagcacatcaccaaccactacctggggctgtgtgcagccctcgagcccatcctcagtgccaagaccaaggaggagatggcatctgccctggtgcacatcctgcagagcacgggcaaggtgaaggacttcctgacagacctgatgatgtcagaggtggaccgctgcggggacaacgagcacctcatcttccgggagaacacactggccaccaaggccattgaggagtacctcaagctagtgggccagaagtacctgcaggacgccctaggtgagttcatcaaagcgctgtatgagtcagatgagaactgcgaagtggatcccagcaagtgctcggccgctgacctcccagagcaccagggcaacctcaagatgtgctgcgagctggccttctgcaagatcatcaactcctactgtgtcttcccacgggagttgaaagaggtgtttgcctcgtggaggcaggagtgcagcagtcgcggccgcccggacatcagtgagcggctcatcagcgcctccctcttcctgcgcttcctctgcccagccatcatgtcgccctcactcttcaacctgctgcaggagtaccctgatgaccgcactgcccgcaccctcaccctcatcgccaaggtcacccagaacctggccaactttgccaaatttggcagcaaggaggaatacatgtccttcatgaaccagttcctagagcatgagtggaccaacatgcagcgcttcctgctggagatctccaaccccgagaccctctccaatacagccggcttcgagggctacatcgacctgggccgcgagctctccagcctgcactcactgctctgggaggccgtcagccagctggagcagagcatagtatccaaactgggacccctgcctcggatcctgagggacgtccacacagcactgagcaccccaggtagcgggcagctcccagggaccaatgacctggcctccacaccgggctctggcagcagcagcatctcagctgggctgcagaagatggtgattgagaacgatctttccggtctgatagatttcacccggttaccgtctccaacccccgaaaacaaggacttgttttttgtcacaaggtcctccggggtccagccctcacctgcccgcagctcgagttactcggaagccaacgagcctgatcttcagatggccaacggtggcaagagcctctccatggtggacctccaggacgcccgcacgctggatggggaggcaggctccccggcgggccccgacgtcctccccacagatgggcaggccgctgcagctcagctggtggccgggtggccggcccgggcaaccccagtgaacctggcagggctggccacggtgcggcgggcaggccagacaccaaccacaccaggcacctccgagggcgcgccaggccggccccagctgttggcaccgctctccttccagaaccctgtgtaccagatggcggctggcctgccgctgtcaccccgtggccttggcgactcaggctctgagggccacagctccctgagctcacacagcaacagcgaggagttggcggctgctgccaagctgggaagtttcagcactgccgcggaggagctggctcggcggcccggtgagctggcacggcgacagatgtcactgactgaaaaaggcgggcagcccacggtgccacggcagaacagtgctggcccccagaggaggatcgaccagcctccgcccccacccccgccgccacctcctgccccccgcggccggacgccccccaacctgctgagcaccctgcagtacccaagaccctcaagcggaaccctggcgtcggcctcacctgattgggtgggccccagtacccgcctgaggcagcagtcctcttcctccaagggggacagcccagaactgaagccacgggcagtgcacaagcagggcccttcacctgtgagccccaatgccctggaccgcacagccgcttggctcttgaccatgaacgcgcagttgttagaagacgagggcctgggcccagaccccccccacagggataggctaaggagtaaggacgagctcagccaagcagaaaaggacctggcggtgctgcaggacaagctgcgaatctccaccaagaagctggaggagtatgagaccctgttcaagtgccaggaggagacgacgcagaagctggtgctggagtaccaggcacggctggaggagggcgaggagcggctgcggcggcagcaggaggacaaggacatccagatgaagggcatcatcagcaggttgatgtccgtggaggaagaactgaagaaggaccacgcagagatgcaagcggctgtggactccaaacagaagatcattgatgcccaggagaagcgcattgcctcgttggatgccgccaatgcccgcctcatgagtgccctgacccagctgaaagagagtatgcattagaaacaaaagcccgcttgctcgcttgctggaacacaggggccttttaagttgagcgtgcgcactgcatgggaaatagcggccctggaggatgttagacttgctccctctccaagacagcagcagcctgcacctgccccgtgtgtgtggccggcctcctcctcacccttcccggcccccggccaaggacccaggcgctgcatacaggggaggggcgcaccccacagctggggccggttttcctcagctctaggctgttctgtagcttatctgcccctcccccactttcaagacagatgagcaggagcttgggtctctctcggcccctgtctgttcccagcccctgcagattctgagcaaaggccctgggtaagaagggtgggagtggggcctttgccagcagagccagggcagggcgagctgcaggaatcacccctctgcccctgcagctggaatgtgccacagaggccccacctgaagggtggatgtgctggaggggtggcccagagccatactgcgtccaccctgagctcggggacaggtgacagtggctgctctgggaaggggcttttagatgtaacctacaattcagttaggctagagacagatgctggtggaggaagggctgggccaccagggatcacagaccacaggaagatgggaggtggaagcagaggccctgcccccaccccttcctgtctcactcttctgtcttgtccccacccatgcgccttcgtgcctgagaccagggtggccacacaggcagggcctggctccagtctcatcctcccattgcccagtgagccctgctcttctctccccagccccctcccaccgctgcctcgtagagtgacctcggacagagcccccctagcaatacagggaggctcccggggcctggacaggcgggctcggaggctacccgctgtggccggtgccagctgcccttgcagggtgggtgagctctcaggccgagagccttatttacctagtgcaaaaactgtaaaagtgtacagactcttcacagatttttatcttaattgcaagtctgccgattttgtaaatgttcttggtgtttgactgtaatgtaactatctcacctaatggttgtacatatcctttggtcctggtgctgccgagggctggccgggactgctgctctcccaagggttttattttatttctgaatctagagaacagtattgggcaggaggaaaaggcttggtgtctgcggggggtgtcttccctgcctgtggcatttgtgtgttggctttgcagctgctgtctgagtagtggccactggggtgccttcactgggccagtcaacggggggctcctgcccaggccacagagaacctgagttcccgggagctgggccctgcctgcagccagggctggggttgccagaggccctggagggaaggacagtccctgctggggaagaacagccccggggccccctggtcaccgagactcagcctctgctggagaaagccacgccctccctgctagcacagaggcctgactgacttttttgcttaacttccatgttctgggtgatggaaactgccaaacctcctgtcagtgaggactctttccgactgcccagaaagtgggggtggaggaccgaggctacagctccacacgccccggtcccccagagcatctgccccaggtacacctccccctgcgccccgcacgactgcgggagccagactgtccagggaaacagcctctctcttttctacacactcagccacaaagccccccagctcccacaccgcgtcccagctcccctcttttgtaagtatgtgaaaaggaaaaaatgcaaacgttggagtttgggctggagctcctccctccagctgcgacttttaactatgtaataatgtacagaggaagctgttggtgttctaagactctgtgtggctgtgcaatttctgtacatttgcaattagaaatattaaagatttatttagctatttt

SEQ ID NO: 1297 - DNA, 1006 bp, Homo sapiens
  source 1..1006: mol_type = genomic DNA
tgcttgcaggaatacccagtcatctagttggaaaagccgccagatggaatacaaaaggaggaacccagacgctcatggagacagcctcggttcataaatcaggtggggccaggggctgggggcccacacgccatggagcccgactcccttctggaccaagacgactcctacgagtcgcctcaagaaaggccgggctctcggcgcagcctgcctggcagcctttccgagaagagccccagcatggagccctcggccgccacgccgttccgggtcacgggcttcctcagccgccgcctcaagggctccatcaagcgcaccaagagccagcccaagctggaccgcaaccacagcttccgccacatcctgccggggttccggagcgccgccgccgccgccgcggacaatgagaggtcccatctgatgccgaggctgaaggagtctcgctcccacgagtccctgctcagccccagcagtgcggtggaggcgctggacctcagcatggaggaagaggtggtcatcaagcccgtgcacagcagcatccttggccaggactactgcttcgaggtgacgacgtcatcaggaagcaagtgcttttcctgccggtctgcagctgagcgggataagtggatggagaacctccggcgagcggtgcatcccaacaaggacaacagccggcgtgtggagcacatcctgaagctgtgggtgatcgaggccaaggacctgccagccaagaagaagtacctgtgcgagctgtgcctggacgatgtgctctatgcccgcaccacgggcaagctcaagacggacaatgttttctggggcgagcacttcgagttccacaacttgccgcctctgcgcacggtcactgtccacctgtaccgggagaccgacaagaagaagaagaaggagcgcaacagttacctgggcctggtgagcctacctgctgcctcggtggccgggcggcagttcgtggagaagtggtacccggtggtgacgcccaaccccaagg

SEQ ID NO: 1298 - DNA, 6784 bp, Homo sapiens
  source 1..6784: mol_type = genomic DNA
gggagcgggagggggcaggaggcggaggaggagtttgagcgactttgtggggcagccagggcctcggcggccgctcgggcgagcgcgggagaacgcgtgggcgcccgccgggctgtccggagcggccgatggggcccgtgtgagcgcgcccaggcccggcccggtgcccggcgggcggcagcatgtccgcgggcggcagcgccaggaagagcaccgggaggtcctcctactactaccggctgctgaggcggccccggctgcagcgacagaggagccgctcccgcagccggacccggcctgccagggagtcgcctcaagaaaggccgggctctcggcgcagcctgcctggcagcctttccgagaagagccccagcatggagccctcggccgccacgccgttccgggtcacgggcttcctcagccgccgcctcaagggctccatcaagcgcaccaagagccagcccaagctggaccgcaaccacagcttccgccacatcctgccggggttccggagcgccgccgccgccgccgcggacaatgagaggtcccatctgatgccgaggctgaaggagtctcgctcccacgagtccctgctcagccccagcagtgcggtggaggcgctggacctcagcatggaggaagaggtggtcatcaagcccgtgcacagcagcatccttggccaggactactgcttcgaggtgacgacgtcatcaggaagcaagtgcttttcctgccggtctgcagctgagcgggataagtggatggagaacctccggcgagcggtgcatcccaacaaggacaacagccggcgtgtggagcacatcctgaagctgtgggtgatcgaggccaaggacctgccagccaagaagaagtacctgtgcgagctgtgcctggacgatgtgctctatgcccgcaccacgggcaagctcaagacggacaatgttttctggggcgagcacttcgagttccacaacttgccgcctctgcgcacggtcactgtccacctgtaccgggagaccgacaagaagaagaagaaggagcgcaacagttacctgggcctggtgagcctacctgctgcctcggtggccgggcggcagttcgtggagaagtggtacccggtggtgacgcccaaccccaagggcggcaagggccctggacccatgatccgcatcaaggcgcgctaccaaaccatcaccatcctgcccatggagatgtacaaagagttcgctgagcacatcaccaaccactacctggggctgtgtgcagccctcgagcccatcctcagtgccaagaccaaggaggagatggcatctgccctggtgcacatcctgcagagcacgggcaaggtgaaggacttcctgacagacctgatgatgtcagaggtggaccgctgcggggacaacgagcacctcatcttccgggagaacacactggccaccaaggccattgaggagtacctcaagctagtgggccagaagtacctgcaggacgccctaggtgagttcatcaaagcgctgtatgagtcagatgagaactgcgaagtggatcccagcaagtgctcggccgctgacctcccagagcaccagggcaacctcaagatgtgctgcgagctggccttctgcaagatcatcaactcctactgtgtcttcccacgggagttgaaagaggtgtttgcctcgtggaggcaggagtgcagcagtcgcggccgcccggacatcagtgagcggctcatcagcgcctccctcttcctgcgcttcctctgcccagccatcatgtcgccctcactcttcaacctgctgcaggagtaccctgatgaccgcactgcccgcaccctcaccctcatcgccaaggtcacccagaacctggccaactttgccaaatttggcagcaaggaggaatacatgtccttcatgaaccagttcctagagcatgagtggaccaacatgcagcgcttcctgctggagatctccaaccccgagaccctctccaatacagccggcttcgagggctacatcgacctgggccgcgagctctccagcctgcactcactgctctgggaggccgtcagccagctggagcagagcatagtatccaaactgggacccctgcctcggatcctgagggacgtccacacagcactgagcaccccaggtagcgggcagctcccagggaccaatgacctggcctccacaccgggctctggcagcagcagcatctcagctgggctgcagaagatggtgattgagaacgatctttccggtctgatagatttcacccggttaccgtctccaacccccgaaaacaaggacttgttttttgtcacaaggtcctccggggtccagccctcacctgcccgcagctcgagttactcggaagccaacgagcctgatcttcagatggccaacggtggcaagagcctctccatggtggacctccaggacgcccgcacgctggatggggaggcaggctccccggcgggccccgacgtcctccccacagatgggcaggccgctgcagctcagctggtggccgggtggccggcccgggcaaccccagtgaacctggcagggctggccacggtgcggcgggcaggccagacaccaaccacaccaggcacctccgagggcgcgccaggccggccccagctgttggcaccgctctccttccagaaccctgtgtaccagatggcggctggcctgccgctgtcaccccgtggccttggcgactcaggctctgagggccacagctccctgagctcacacagcaacagcgaggagttggcggctgctgccaagctgggaagtttcagcactgccgcggaggagctggctcggcggcccggtgagctggcacggcgacagatgtcactgactgaaaaaggcgggcagcccacggtgccacggcagaacagtgctggcccccagaggaggatcgaccagcctccgcccccacccccgccgccacctcctgccccccgcggccggacgccccccaacctgctgagcaccctgcagtacccaagaccctcaagcggaaccctggcgtcggcctcacctgattgggtgggccccagtacccgcctgaggcagcagtcctcttcctccaagggggacagcccagaactgaagccacgggcagtgcacaagcagggcccttcacctgtgagccccaatgccctggaccgcacagccgcttggctcttgaccatgaacgcgcagttgttagaagacgagggcctgggcccagaccccccccacagggataggctaaggagtaaggacgagctcagccaagcagaaaaggacctggcggtgctgcaggacaagctgcgaatctccaccaagaagctggaggagtatgagaccctgttcaagtgccaggaggagacgacgcagaagctggtgctggagtaccaggcacggctggaggagggcgaggagcggctgcggcggcagcaggaggacaaggacatccagatgaagggcatcatcagcaggttgatgtccgtggaggaagaactgaagaaggaccacgcagagatgcaagcggctgtggactccaaacagaagatcattgatgcccaggagaagcgcattgcctcgttggatgccgccaatgcccgcctcatgagtgccctgacccagctgaaagagaggtacagcatgcaagcccgtaacggcatctcccccaccaaccccaccaaattgcagattactgagaacggcgagttcagaaacagcagcaattgttaacctgcctgaggagggaggaagctacccaaggagagggggactatggtggccaagggcagggtctcggcctggggaggcacccacggttgcagccccagcgcgggtgtcaggaggccgagcctcccctccctgccgctgtccaggaggcggccgcagagggagccaccagagactgaagcagcgtgaggcgaggtcaccagccgctccctgtggggtgcgggcagaagagactgcacgctggggagtggggacagcctgatggggcagggggcctgccaaaaatatgtctgttggttcctgaatgtggtgtgtccttgtcctcctggatctggccgagtgcatgtgtccccccacacctgtgccagggagggggcttcctggaggggggattcaagggctaggggcctacacctgtggcttcccctcgcctccttggggggcccgggactccctggcagccaggccctgtcatgtgggacctggcacttggcagatcagttggcaggcaggaagataggaggacacagagcaggaggtcagtgtcccctgcctgtctccatccgaagcacctgccactgcatgcagcctgttgggaccttcctggctgtgaggaactgaggattcctacccacccaccccctctgaacctgtccccagagcaccacctgctaccttcttccctgccttagttgtattgccagatagacccagtgagggccatggctttttcttgtgagctcttgtccctgtggggaggacccacagcttcccacacctcccacacaggcccaggctgatgctctagggctcccagaagccagagatctgggcggatctggccagatggctctgagcactgtatctgccttctcctggggcccagcacacccagggcacagtggtcctgtagggagtgccacctggtgctcaccctgaaagaaaaggtgatccttcctctgagtgatggtttaaaaaaagattctaacgcctgcaggccctgagaaggtggataactgtgattttttttcctttcacagtatgcattagaaacaaaagcccgcttgctcgcttgctggaacacaggggccttttaagttgagcgtgcgcactgcatgggaaatagcggccctggaggatgttagacttgctccctctccaagacagcagcagcctgcacctgccccgtgtgtgtggccggcctcctcctcacccttcccggcccccggccaaggacccaggcgctgcatacaggggaggggcgcaccccacagctggggccggttttcctcagctctaggctgttctgtagcttatctgcccctcccccactttcaagacagatgagcaggagcttgggtctctctcggcccctgtctgttcccagcccctgcagattctgagcaaaggccctgggtaagaagggtgggagtggggcctttgccagcagagccagggcagggcgagctgcaggaatcacccctctgcccctgcagctggaatgtgccacagaggccccacctgaagggtggatgtgctggaggggtggcccagagccatactgcgtccaccctgagctcggggacaggtgacagtggctgctctgggaaggggcttttagatgtaacctacaattcagttaggctagagacagatgctggtggaggaagggctgggccaccagggatcacagaccacaggaagatgggaggtggaagcagaggccctgcccccaccccttcctgtctcactcttctgtcttgtccccacccatgcgccttcgtgcctgagaccagggtggccacacaggcagggcctggctccagtctcatcctcccattgcccagtgagccctgctcttctctccccagccccctcccaccgctgcctcgtagagtgacctcggacagagcccccctagcaatacagggaggctcccggggcctggacaggcgggctcggaggctacccgctgtggccggtgccagctgcccttgcagggtgggtgagctctcaggccgagagccttatttacctagtgcaaaaactgtaaaagtgtacagactcttcacagatttttatcttaattgcaagtctgccgattttgtaaatgttcttggtgtttgactgtaatgtaactatctcacctaatggttgtacatatcctttggtcctggtgctgccgagggctggccgggactgctgctctcccaagggttttattttatttctgaatctagagaacagtattgggcaggaggaaaaggcttggtgtctgcggggggtgtcttccctgcctgtggcatttgtgtgttggctttgcagctgctgtctgagtagtggccactggggtgccttcactgggccagtcaacggggggctcctgcccaggccacagagaacctgagttcccgggagctgggccctgcctgcagccagggctggggttgccagaggccctggagggaaggacagtccctgctggggaagaacagccccggggccccctggtcaccgagactcagcctctgctggagaaagccacgccctccctgctagcacagaggcctgactgacttttttgcttaacttccatgttctgggtgatggaaactgccaaacctcctgtcagtgaggactctttccgactgcccagaaagtgggggtggaggaccgaggctacagctccacacgccccggtcccccagagcatctgccccaggtacacctccccctgcgccccgcacgactgcgggagccagactgtccagggaaacagcctctctcttttctacacactcagccacaaagccccccagctcccacaccgcgtcccagctcccctcttttgtaagtatgtgaaaaggaaaaaatgcaaacgttggagtttgggctggagctcctccctccagctgcgacttttaactatgtaataatgtacagaggaagctgttggtgttctaagactctgtgtggctgtgcaatttctgtacatttgcaattagaaatattaaagatttatttagctattttaa

SEQ ID NO: 1299 - DNA, 928 bp, Homo sapiens
  source 1..928: mol_type = genomic DNA
ggaatacaaaaggaggaacccagacgctcatggagacagcctcggttcataaatcaggtggggccaggggctgggggcccacacgccatggagcccgactcccttctggaccaagacgactcctacgagtcgcctcaagaaaggccgggctctcggcgcagcctgcctggcagcctttccgagaagagccccagcatggagccctcggccgccacgccgttccgggtcacggtcccatctgatgccgaggctgaaggagtctcgctcccacgagtccctgctcagccccagcagtgcggtggaggcgctggacctcagcatggaggaagaggtggtcatcaagcccgtgcacagcagcatccttggccaggactactgcttcgaggtgacgacgtcatcaggaagcaagtgcttttcctgccggtctgcagctgagcgggataagtggatggagaacctccggcgagcggtgcatcccaacaaggacaacagccggcgtgtggagcacatcctgaagctgtgggtgatcgaggccaaggacctgccagccaagaagaagtacctgtgcgagctgtgcctggacgatgtgctctatgcccgcaccacgggcaagctcaagacggacaatgttttctggggcgagcacttcgagttccacaacttgccgcctctgcgcacggtcactgtccacctgtaccgggagaccgacaagaagaagaagaaggagcgcaacagttacctgggcctggtgagcctacctgctgcctcggtggccgggcggcagttcgtggagaagtggtacccggtggtgacgcccaaccccaagggcggcaagggccctggacccatgatccgcatcaaggcgcgctaccaaaccatcaccatcctgcccatggagatgtacaaagagttcgctgagcacatcacc

SEQ ID NO: 1300 - DNA, 4506 bp, Homo sapiens
  source 1..4506: mol_type = genomic DNA
gggagtctgcgggcgagctcggaggacactggcgcacctcccccgccggctcacggccgcatccgccacatccgaaggcgccgcgacttcccggagaccccgaagcgtgcgctctcatccgggtcctgcgggcgctggcggaaagaggcgaggcggtgcctccgggggcggggcctccttcggttggcggcctcgggcttcgggagtcctccaagaggccaggtgaggccgtcccgtgatgccccgcgccccggccgctctggcctgcaacgtgtctctggggcggaggcagcggcagtggagttcgctgcgcgctgttgggggccacctgtcttttcgcttgtgtccctctttctagtgtcgcgctcgagtcccgacgggccgctccaagcctcgacatgtcgtacaactacgtggtaacggcccagaagcccaccgccgtgaacggctgcgtgaccggacactttacttcggccgaagacttaaacctgttgattgccaaaaacacgagattagagatctatgtggtcaccgccgaggggcttcggcccgtcaaagaggtgggcatgtatgggaagattgcggtcatggagcttttcaggcccaagggggagagcaaggacctgctgtttatcttgacagcgaagtacaatgcctgcatcctggagtataaacagagtggcgagagcattgacatcattacgcgagcccatggcaatgtccaggaccgcattggccgcccctcagagaccggcattattggcatcattgaccctgagtgccggatgattggcctgcgtctctatgatggccttttcaaggttattccactagatcgcgataataaagaactcaaggccttcaacatccgcctggaggagctgcatgtcattgatgtcaagttcctatatggttgccaagcacctactatttgctttgtctaccaggaccctcaggggcggcacgtaaaaacctatgaggtgtctctccgagaaaaggaattcaataagggcccttggaaacaggaaaatgtcgaagctgaagcttccatggtgatcgcagtcccagagccctttgggggggccatcatcattggacaggagtcaatcacctatcacaatggtgacaaatacctggctattgcccctcctatcatcaagcaaagcacgattgtgtgccacaatcgagtggaccctaatggctcaagatacctgctgggagacatggaaggccggctcttcatgctgcttttggagaaggaggaacagatggatggcaccgtcactctcaaggatctccgtgtagaactccttggagagacctctattgctgagtgcttgacataccttgataatggtgttgtgtttgtcgggtctcgcctgggtgactcccagcttgtgaagctcaacgttgacagtaatgaacaaggctcctatgtagtggccatggaaacctttaccaacttaggacccattgtcgatatgtgcgtggtggacctggagaggcaggggcaggggcagctggtcacttgctctggggctttcaaggaaggttctttgcggatcatccggaatggaattggaatccacgagcatgccagcattgacttaccaggcatcaaaggattatggccactgcggtctgaccctaatcgtgagactgatgacactttggtgctctcttttgtgggccagacaagagttctcatgttaaatggagaggaggtagaagaaaccgaactgatgggtttcgtggatgatcagcagactttcttctgtggcaacgtggctcatcagcagcttatccagatcacttcagcatcggtgaggttggtctctcaagaacccaaagctctggtcagtgaatggaaggagcctcaggccaagaacatcagtgtggcctcctgcaatagcagccaggtggtggtggctgtaggcagggccctctactatctgcagatccatcctcaggagctccggcagatcagccacacagagatggaacatgaagtggcttgcttggacatcaccccattaggagacagcaatggactgtcccctctttgtgccattggcctctggacggacatctcggctcgtatcttgaagttgccctcttttgaactactgcacaaggagatgctgggtggagagatcattcctcgctccatcctgatgaccacctttgagagtagccattacctcctttgtgccttgggagatggagcgcttttctactttgggctcaacattgagacaggtctgttgagcgaccgtaagaaggtgactttgggcacccagcccaccgtattgaggacttttcgttctctttctaccaccaacgtctttgcttgttctgaccgccccactgtcatctatagcagcaaccacaaattggtcttctcaaatgtcaacctcaaggaagtgaactacatgtgtcccctcaattcagatggctatcctgacagcctggcgctggccaacaatagcaccctcaccattggcaccatcgatgagatccagaagctgcacattcgcacagttcccctctatgagtctccaaggaagatctgctaccaggaagtgtcccagtgtttcggggtcctctccagccgcattgaagtccaagacacgagtgggggcacgacagccttgaggcccagcgctagcacccaggctctgtccagcagtgtaagctccagcaagctgttctccagcagcactgctcctcatgagacctcctttggagaagaggtggaggtgcacaacctacttatcattgaccaacacacctttgaagtgcttcatgcccaccagtttctgcagaatgaatatgccctcagtctggtttcctgcaagctgggcaaagaccccaacacttacttcattgtgggcacagcaatggtgtatcctgaagaggcagagcccaagcagggtcgcattgtggtctttcagtattcggatggaaaactacagactgtggctgaaaaggaagtgaaaggggccgtgtactctatggtggaatttaacgggaagctgttagccagcatcaatagcacggtgcggctctatgagtggacaacagagaaggagctgcgcactgagtgcaaccactacaacaacatcatggccctctacctgaagaccaagggcgacttcatcctggtgggcgaccttatgcgctcagtgctgctgcttgcctacaagcccatggaaggaaactttgaagagattgctcgagactttaatcccaactggatgagtgctgtggaaatcttggatgatgacaattttctgggggctgaaaatgcctttaacttgtttgtgtgtcaaaaggatagcgctgccaccactgacgaggagcggcagcacctccaggaggttggtcttttccacctgggcgagtttgtcaatgtcttttgccacggctctctggtaatgcagaatctgggtgagacttccacccccacacaaggctcggtgctcttcggcacggtcaacggcatgatagggctggtgacctcactgtcagagagctggtacaacctcctgctggacatgcagaatcgactcaataaagtcatcaaaagtgtggggaagatcgagcactccttctggagatcctttcacaccgagcggaagacagaaccagccacaggtttcatcgacggtgacttgattgagagtttcctggatattagccgccccaagatgcaggaggtggtggcaaacctacagtatgacgatggcagcggtatgaagcgagaggccactgcagacgacctcatcaaggttgtggaggagctaactcggatccattagccaagggcagggggcccctttgctgaccctccccaaaggctttgccctgctgccctccccctcctctccaccatcgtcttcttggccatgggaggcctttccctaagccagctgcccccagagccacagttcccctatgtggaagtggggcgggcttcatagagacttgggaatgagctgaaggtgaaacattttctccctggatttttaccagtctcacatgattccagccatcaccttagaccaccaagccttgattggtgttgccagttgtcctccttccggggaaggattttgcagttctttggctgaaaggaagctgtgcgtgtgtgtgtgtgtatgtgtgtgtgtgtatgtgtatctcacactcatgcattgtcctctttttatttagattggcagtgtagggagttgtgggtagtggggaagagggttaggagggtttcattgtctgtgaagtgagaccttccttttacttttcttctattgcctctgagagcatcaggcctagaggcctgactgccaagccatgggtagcctgggtgtaaaacctggagatggtggatgatccccacgccacagcccttttgtctctgcaaactgccttcttcggaaagaagaaggtgggaggatgtgaattgttagtttctgagttttaccaaataaagtagaatataagaagaaa

SEQ ID NO: 1301 - DNA, 1801 bp, Homo sapiens
  source 1..1801: mol_type = genomic DNA
gctgttgggggccacctgtcttttcgcttgtgtccctctttctagtgtcgcgctcgagtcccgacgggccgctccaagcctcgacatgtcgtacaactacgtggtaacggcccagaagcccaccgccgtgaacggctgcgtgaccggacactttacttcggccgaagacttaaacctgttgattgccaaaaacacgagattagagatctatgtggtcaccgccgaggggcttcggcccgtcaaagaggtgggcatgtatgggaagattgcggtcatggagcttttcaggcccaaggctctgtccagcagtgtaagctccagcaagctgttctccagcagcactgctcctcatgagacctcctttggagaagaggtggaggtgcacaacctacttatcattgaccaacacacctttgaagtgcttcatgcccaccagtttctgcagaatgaatatgccctcagtctggtttcctgcaagctgggcaaagaccccaacacttacttcattgtgggcacagcaatggtgtatcctgaagaggcagagcccaagcagggtcgcattgtggtctttcagtattcggatggaaaactacagactgtggctgaaaaggaagtgaaaggggccgtgtactctatggtggaatttaacgggaagctgttagccagcatcaatagcacggtgcggctctatgagtggacaacagagaaggagctgcgcactgagtgcaaccactacaacaacatcatggccctctacctgaagaccaagggcgacttcatcctggtgggcgaccttatgcgctcagtgctgctgcttgcctacaagcccatggaaggaaactttgaagagattgctcgagactttaatcccaactggatgagtgctgtggaaatcttggatgatgacaattttctgggggctgaaaatgcctttaacttgtttgtgtgtcaaaaggatagcgctgccaccactgacgaggagcggcagcacctccaggaggttggtcttttccacctgggcgagtttgtcaatgtcttttgccacggctctctggtaatgcagaatctgggtgagacttccacccccacacaaggctcggtgctcttcggcacggtcaacggcatgatagggctggtgacctcactgtcagagagctggtacaacctcctgctggacatgcagaatcgactcaataaagtcatcaaaagtgtggggaagatcgagcactccttctggagatcctttcacaccgagcggaagacagaaccagccacaggtttcatcgacggtgacttgattgagagtttcctggatattagccgccccaagatgcaggaggtggtggcaaacctacagtatgacgatggcagcggtatgaagcgagaggccactgcagacgacctcatcaaggttgtggaggagctaactcggatccattagccaagggcagggggcccctttgctgaccctccccaaaggctttgccctgctgccctccccctcctctccaccatcgtcttcttggccatgggaggcctttccctaagccagctgcccccagagccacagttcccctatgtggaagtggggcgggcttcatagagacttgggaatgagctgaaggtgaaacattttctccctggatttttaccagtctcacatgattccagccatcaccttagaccaccaagccttgattggtgttgccagttgtcctccttccggggaaggattttgcagttctttggctgaaaggaagctgtgcgtgtgtgtgtgtgtatgtgtgtgtgtgtatgtgta

SEQ ID NO: 1302 - DNA, 558 bp, Homo sapiens
  source 1..558: mol_type = genomic DNA
aagaggcgaggcggtgcctccgggggcggggcctccttcggttggcggcctcgggcttcgggagtcctccaagaggccagtgtcgcgctcgagtcccgacgggccgctccaagcctcgacatgtcgtacaactacgtggtaacggcccagaagcccaccgccgtgaacggctgcgtgaccggacactttacttcggccgaagacttaaacctgttgattgccaaaaacacgagattagagatctatgtggtcaccgccgaggggcttcggcccgtcaaagaggtgggcatgtatgggaagattgcggtcatggagcttttcaggcccaagggggagagcaaggacctgctgtttatcttgacagcgaagtacaatgcctgcatcctggagtataaacagagtggcgagagcattgacatcattacgcgagcccatggcaatgtccaggaccgcattggccgcccctcagagaccggcattattggcatcattgaccctgagtgccggatgattggcctgcgtctctatgatggccttttcaaggttattccactagat

SEQ ID NO: 1303 - DNA, 540 bp, Homo sapiens
  source 1..540: mol_type = genomic DNA
ctggaggctgcagggctgacggctctcctggctcattaaggttccctacggagaaatactggttttgtgtttgaggttcgaatttgtagagcaataggggcactaataacgttgggcaagcagaccggtgggccctttgaagtctgaagaatcaacgcgcaaaagggaggagtgtcgcgctcgagtcccgacgggccgctccaagcctcgacatgtcgtacaactacgtggtaacggcccagaagcccaccgccgtgaacggctgcgtgaccggacactttacttcggccgaagacttaaacctgttgattgccaaaaacacgagattagagatctatgtggtcaccgccgaggggcttcggcccgtcaaagaggtgggcatgtatgggaagattgcggtcatggagcttttcaggcccaagggggagagcaaggacctgctgtttatcttgacagcgaagtacaatgcctgcatcctggagtataaacagagtggcgagagcattgacatcattacgcgagcccatggcaatgtccagg

SEQ ID NO: 1304 - DNA, 1846 bp, Homo sapiens
  source 1..1846: mol_type = genomic DNA
ctccgagacgggtggggccggagctccaagctggtttgaacaagccctgggcatgtttggcgggaagttggcttagctcggctacctgtggccccgcagttttgtagtccccgccttgtttctccccagaggcctctcaatcctccctccatgatcttcgcatagagcacagtaccccttcacacggaggacgcgatggctcccaagaaacgcccagaaacccagaagacctccgagattgtattacgccccaggaacaagaggagcaggagtcccctggagctggagcccgaggccaagaagctctgtgcgaagggctccggtcctagcagaagatgtgactcagactgcctctgggtggggctggctggcccacagatcctgccaccatgccgcagcatcgtcaggaccctccaccagcataagctgggcagagcttcctggccatctgtccagcaggggctccagcagtcctttttgcacactctggattcttaccggatattacaaaaggctgccccctttgacaggagggctacatccttggcgtggcacccaactcaccccagcactgtggctgtgggttccaaagggggagatatcatgctctggaattttggcatcaaggacaaacccaccttcatcaaagggattggagctggagggagcatcactgggctgaagtttaaccctctcaataccaaccagttttacgcctcctcaatggagggaacaactaggctgcaagactttaaaggcaacattctacgagtttttgccagctcagacaccatcaacatctggttttgtagcctggatgtgtctgctagtagccgaatggtggtcacaggagacaacgtggggaacgtgatcctgctgaacatggacggcaaagagctttggaatctcagaatgcacaaaaagaaagtgacgcatgtggccctgaacccatgctgtgattggttcctggccacagcctccgtagatcaaacagtgaaaatttgggacctgcgccaggttagagggaaagccagcttcctctactcgctgccgcacaggcatcctgtcaacgcagcttgtttcagtcccgatggagcccggctcctgaccacggaccagaagagcgagatccgagtttactctgcttcccagtgggactgccccctgggcctgatcccgcaccctcaccgtcacttccagcacctcacacccatcaaggcagcctggcatcctcgctacaacctcattgttgtgggccgatacccagatcctaatttcaaaagttgtaccccttatgaattgaggacgatcgacgtgttcgatggaaactcagggaagatgatgtgtcagctctatgacccagaatcttctggcatcagttcgcttaatgaattcaatcccatgggggacacgctggcctctgcaatgggttaccacattctcatctggagccaggaggaagccaggacacggaagtgagagacactaaagaaggtgtgggccagacaaggccttggagcccacacatgggatcaagtcctgcaagcagaggtggcgatttgttaaagggccaaaagtatccaaggttagggttggagcaggggtgctgggacctggggcactgtgggactgggacacttttatgttaatgctctggacttgcctccagagactgctccagagttggtgacacagctgtcccaagggcccctctgtatctagcctggaaccaaggttatcttggaactaaatgacttttctcctctcagtgggtggtagcagagggatcaagcagttatttgatttgtgctcacttttgatatggccaataaaaccataccgactg

SEQ ID NO: 1305 - DNA, 1279 bp, Homo sapiens
  source 1..1279: mol_type = genomic DNA
ctccgagacgggtggggccggagctccaagctggtttgaacaagccctgggcatgtttggcgggaagttggcttagctcggctacctgtggccccgcagttttgtagtccccgccttgtttctccccagaggcctctcaatcctccctccatgatcttcgcatagagcacagtaccccttcacacggaggacgcgatggctcccaagaaacgcccagaaacccagaagacctccgagattgtattacgccccaggaacaagaggagcaggagtcccctggagctggagcccgaggccaagaagctctgtgcgaagggctccggtcctagcagaagatgtgactcagactgcctctgggtggggctggctggcccacagatcctgccaccatgccgcagcatcgtcaggaccctccaccagcataagctgggcagagcttcctggccatctgtccagcaggggctccagcagtcctttttgcacactctggattcttaccggatattacaaaaggctgccccctttgacaggagggctacatccttggcgtggcacccaactcaccccagcactgtggctgtgggttccaaagggggagatatcatgctctggaattttggcatcaaggacaaacccaccttcatcaaaggggcagcctggcatcctcgctacaacctcattgttgtgggccgatacccagatcctaatttcaaaagttgtaccccttatgaattgaggacgatcgacgtgttcgatggaaactcagggaagatgatgtgtcagctctatgacccagaatcttctggcatcagttcgcttaatgaattcaatcccatgggggacacgctggcctctgcaatgggttaccacattctcatctggagccaggaggaagccaggacacggaagtgagagacactaaagaaggtgtgggccagacaaggccttggagcccacacatgggatcaagtcctgcaagcagaggtggcgatttgttaaagggccaaaagtatccaaggttagggttggagcaggggtgctgggacctggggcactgtgggactgggacacttttatgttaatgctctggacttgcctccagagactgctccagagttggtgacacagctgtcccaagggcccctctgtatctagcctggaaccaaggttatcttggaactaaatgacttttctcctctcagtgggtggtagcagagggatcaagcagttatttgatttgtgctcacttttgatatggccaataaaaccataccgactg

SEQ ID NO: 1306 - DNA, 1668 bp, Homo sapiens
  source 1..1668: mol_type = genomic DNA
ctccgagacgggtggggccggagctccaagctggtttgaacaagccctgggcatgtttggcgggaagttggcttagctcggctacctgtggccccgcagttttgtagtccccgccttgtttctccccagaggcctctcaatcctccctccatgatcttcgcatagagcacagtaccccttcacacggaggacgcgatggctcccaagaaacgcccagaaacccagaagacctccgagattgtattacgccccaggaacaagaggagcaggagtcccctggagctggagcccgaggccaagaagctctgtgcgaagggctccggtcctagcagaagatgtgactcagactgcctctgggtggggctggctggcccacagatcctgccaccatgccgcagcatcgtcaggaccctccaccagcataagctgggcagagcttcctggccatctgtccagcaggggctccagcagtcctttttgcacactctggattcttaccggatattacaaaaggctgccccctttgacaggagggctacatccttggcgtggcacccaactcaccccagcactgtggctgtgggttccaaagggggagatatcatgctctggaattttggcatcaaggacaaacccaccttcatcaaagggattggagctggagggagcatcactgggctgaagtttaaccctctcaataccaaccagttttacgcctcctcaatggagggaacaactaggctgcaagactttaaaggcaacattctacgagtttttgccagctcagacaccatcaacatctggttttgtagcctggatgtgtctgctagtagccgaatggtggtcacaggagacaacgtggggaacgtgatcctgctgaacatggacggcaaagagcttgtttcagtcccgatggagcccggctcctgaccacggaccagaagagcgagatccgagtttactctgcttcccagtgggactgccccctgggcctgatcccgcaccctcaccgtcacttccagcacctcacacccatcaaggcagcctggcatcctcgctacaacctcattgttgtgggccgatacccagatcctaatttcaaaagttgtaccccttatgaattgaggacgatcgacgtgttcgatggaaactcagggaagatgatgtgtcagctctatgacccagaatcttctggcatcagttcgcttaatgaattcaatcccatgggggacacgctggcctctgcaatgggttaccacattctcatctggagccaggaggaagccaggacacggaagtgagagacactaaagaaggtgtgggccagacaaggccttggagcccacacatgggatcaagtcctgcaagcagaggtggcgatttgttaaagggccaaaagtatccaaggttagggttggagcaggggtgctgggacctggggcactgtgggactgggacacttttatgttaatgctctggacttgcctccagagactgctccagagttggtgacacagctgtcccaagggcccctctgtatctagcctggaaccaaggttatcttggaactaaatgacttttctcctctcagtgggtggtagcagagggatcaagcagttatttgatttgtgctcacttttgatatggccaataaaaccataccgactg

SEQ ID NO: 1307 - DNA, 1654 bp, Homo sapiens
  source 1..1654: mol_type = genomic DNA
ctccgagacgggtggggccggagctccaagctggtttgaacaagccctgggcatgtttggcgggaagttggcttagctcggctacctgtggccccgcagttttgtagtccccgccttgtttctccccagaggcctctcaatcctccctccatgatcttcgcatagagcacagtaccccttcacacggaggacgcgatggctcccaagaaacgcccagaaacccagaagacctccgagattgtattacgccccaggaacaagaggagcaggagtcccctggagctggagcccgaggccaagaagctctgtgcgaagggctccggtcctagcagaagatgtgactcagactgcctctgggtggggctggctggcccacagatcctgccaccatgccgcagcatcgtcaggaccctccaccagcataagctgggcagagcttcctggccatctgtccagcagattggagctggagggagcatcactgggctgaagtttaaccctctcaataccaaccagttttacgcctcctcaatggagggaacaactaggctgcaagactttaaaggcaacattctacgagtttttgccagctcagacaccatcaacatctggttttgtagcctggatgtgtctgctagtagccgaatggtggtcacaggagacaacgtggggaacgtgatcctgctgaacatggacggcaaagagctttggaatctcagaatgcacaaaaagaaagtgacgcatgtggccctgaacccatgctgtgattggttcctggccacagcctccgtagatcaaacagtgaaaatttgggacctgcgccaggttagagggaaagccagcttcctctactcgctgccgcacaggcatcctgtcaacgcagcttgtttcagtcccgatggagcccggctcctgaccacggaccagaagagcgagatccgagtttactctgcttcccagtgggactgccccctgggcctgatcccgcaccctcaccgtcacttccagcacctcacacccatcaaggcagcctggcatcctcgctacaacctcattgttgtgggccgatacccagatcctaatttcaaaagttgtaccccttatgaattgaggacgatcgacgtgttcgatggaaactcagggaagatgatgtgtcagctctatgacccagaatcttctggcatcagttcgcttaatgaattcaatcccatgggggacacgctggcctctgcaatgggttaccacattctcatctggagccaggaggaagccaggacacggaagtgagagacactaaagaaggtgtgggccagacaaggccttggagcccacacatgggatcaagtcctgcaagcagaggtggcgatttgttaaagggccaaaagtatccaaggttagggttggagcaggggtgctgggacctggggcactgtgggactgggacacttttatgttaatgctctggacttgcctccagagactgctccagagttggtgacacagctgtcccaagggcccctctgtatctagcctggaaccaaggttatcttggaactaaatgacttttctcctctcagtgggtggtagcagagggatcaagcagttatttgatttgtgctcacttttgatatggccaataaaaccataccgactg

SEQ ID NO: 1308 - DNA, 3717 bp, Homo sapiens
  source 1..3717: mol_type = genomic DNA
gttgttccggctgcctttcactgaggggacccgccagtttctaactcagtggcgtttgccctgattcccggggcctggctttcagcgtagcaattctgccggcgaagaaggaagacttcatggcagagctgtaccgggttttggaggctggcaagattgggatatttgagagtccaactggcactgggaagtccttaagtcttatttgtggggccctctcttggctccgtgactttgaacagaagaagcgtgaagaagaggcacgactccttgaaactggaactggccccttacatgatgagaaagatgaatccctgtgtctgtcttcttcctgcgaaggggctgcaggcaccccgaggcctgctggagaaccggcctgggttactcagtttgtgcagaagaaagaagagagggacctggtggaccgactaaaggcggagcaggccaggaggaagcagcgagaagaacgcctgcagcagctgcagcacagggtgcagctcaagtatgcagccaagcgcctgaggcaggaagaagaagaaagagagaatctcctccgcctcagcagggagatgctagagacaggcccggaggctgagcggctggagcagctggagtctggggaggaggagctggtcctcgccgaatacgagagtgatgaggagaaaaaggtggcgagcagagtggatgaggatgaggatgacctggaggaagaacacataactaagatttattactgtagtcggacacactcccagctggcccagtttgtgcatgaggtgaagaagagcccctttggcaaggatgttcggctggtctcccttggctcccggcagaacctttgtgtaaatgaagacgtgaaaagcctaggttctgtgcagcttatcaacgaccgctgtgtggacatgcagagaagcaggcacgagaagaagaaaggagctgaggaggagaagccaaagaggaggaggcaggagaagcaggcagcctgccccttctacaaccacgagcagatgggccttctccgggatgaggccctggcagaggtgaaggacatggagcagctgctggcccttgggaaggaggcccgggcctgtccctattacgggagccgccttgccatccctgcagcccagctggtggtgctgccctatcagatgctgctgcatgcggccactcggcaggccgcgggcatccggctgcaggaccaggtggtgatcatcgacgaggcgcacaacctgatcgacaccatcacgggcatgcacagcgtggaggtcagcggctcccagctctgccaggcccattcccagctgctgcagtacgtggagcgatacgggaagcgtttgaaggccaagaacctgatgtacctgaagcagatcctgtatttgctggagaaattcgtggctgtgctaggggggaacattaagcaaaatcccaatacacagagtctgtcacagacagggacggagctgaagaccatcaacgactttctcttccagagccagatcgacaacatcaacctgttcaaggtgcagcgatactgtgagaagagcatgatcagcagaaagctctttggattcactgaacggtacggagcagtgttctcatcccgggagcagcccaaactggctgggtttcagcaattcctgcagagcctgcagcccaggacgactgaagctcttgcagcccctgcagacgagagtcaggccagcaccctgcgaccagcttctccactgatgcacatccaaggcttcctggcagctctcactacggccaaccaggacggcagggtcatcctgagccgccaaggcagcctcagtcagagcaccctgaagtttttgctcctgaatccagctgtgcactttgcccaagtggtgaaggaatgccgggcagtggtcattgcggggggtaccatgcagccggtgtctgacttccggcagcagctgctggcctgtgccggggtggaagctgagcgcgtggtggagttttcctgtggtcacgtgatccctccagacaacatcctgcccctcgtcatctgcagcgggatctccaaccagccgctggaattcacgttccagaaaagagagctgcctcagatgatggacgaggtgggtcgcattctctgtaacctgtgcggtgtggttcctggaggggtggtctgtttcttcccctcctacgagtacctgcgccaggtccatgcccactgggagaagggtggcctgctgggccgtctggctgccaggaagaagatattccaggaacctaagagcgcacaccaggtggagcaggtgctgctggcatattccaggtgcatccaggcctgtggccaggagagaggccaggtgacaggggccctgctcctctctgtggttggaggaaagatgagtgaagggatcaacttctctgacaacctaggccggtgtgtggtgatggtgggcatgcccttccccaacatcaggtctgcagagctgcaggagaagatggcctacttggatcaaaccctccccagagcccccggccaggcacccccagggaaggctctggtggagaacctgtgcatgaaggccgtcaaccagtccataggcagggccatcaggcaccagaaggattttgccagcgtagtgctcctggaccagcgatatgcccggccccctgtcctggccaagctgccggcctggatccgagcccgtgtggaggtcaaagctacctttggccccgccattgctgctgtgcagaagtttcaccgggagaagtcggcctcttcctgatgggcaaccacaccactgcctggcgccgtgcccttcctttgtcctgcccgctggagacagtgtttgtcgtgggcgtggtctgcggggatcctgttacaaaggtgaaacccaggaggagagtgtggagtccagagtgctgccaggacccaggcacaggcgttagctcccgtaggagaaaatgggggaatcctgaatgaacagtgggtcctggctgtccttggggcgttccagggcagctcccctcctggaatagaatctttctttccatcctgcatggctgagagccaggcttccttcctggtctccgcaggaggctgtggcagctgtggcatccactgtggcatctccgtcctgcccaccttcttaagaggcgagatggagcaggcccatctgcctctgccctttctagccaaggttatagctgccctggactgctcactctctggtctcaatttaaaatgatccatggccacagggctcctgcccaggggcttgtcaccttcccctcctccttcctgagtcactccttcagtagaaggccctgctccctatcctgtcccacagccctgcctggatttgtatccttggcttcgtgccagttcctccaagtctatggcacctccctccctctcaaccacttgagcaaactccaagacaccttctaccccaacaccagcaattatgccaagggccgttaggctctcaacatgactatagagaccccgtgtcatcacggagacctttgttcctgtgggaaaatatccctcccacctgcaacagctgcccctgctgactgcgcctgtcttctccctctgaccccagagaaaggggctgtggtcagctgggatcttctgccaccatcagggacaaacgggggcaggaggaaagtcactgatgcccagatgtttgcatcctgcacagctataggtccttaaataaaagtgtgctgttggtt

SEQ ID NO: 1309 - DNA, 4115 bp, Homo sapiens
  source 1..4115: mol_type = genomic DNA
tgcgcagcggcgggggttgttccggctgcctttcactgaggggacccgccagtttctaactcagtggcgtttgccctgattcccggggcctggctttcagcgtagcaattctgccggcgaagaaggtgagcgcagtgctgtgtggcagcagagctccttaggacgaggagcagcgggacgaggaagggcagactggtgaaatcgcaaactgggcgtctgttccggcgccggacccctatttgcaaaggtccatggctaatgaaacacagaaggttggtgccatccattttccttttcccttcacaccctattccatccaggaagacttcatggcagagctgtaccgggttttggaggctggcaagattgggatatttgagagtccaactggcactgggaagtccttaagtcttatttgtggggccctctcttggctccgtgactttgaacagaagaagcgtgaagaagaggcacgactccttgaaactggaactggccccttacatgatgagaaagatgaatccctgtgtctgtcttcttcctgcgaaggggctgcaggcaccccgaggcctgctggagaaccggcctgggttactcagtttgtgcagaagaaagaagagagggacctggtggaccgactaaaggcggagcaggccaggaggaagcagcgagaagaacgcctgcagcagctgcagcacagggtgcagctcaagtatgcagccaagcgcctgaggcaggaagaagaagaaagagagaatctcctccgcctcagcagggagatgctagagacaggcccggaggctgagcggctggagcagctggagtctggggaggaggagctggtcctcgccgaatacgagagtgatgaggagaaaaaggtggcgagcagggcgccttctgatgccacctccagccgccatccaccagacgccagcttccccgctgccctgaacttcctccagcgcaccaggccttcctctgtcctgtctgaggatttgctcatgcaacgtgctgtggccaaacaccctgccctcctcccttggcagatgtcttcctctcctttaaggcctggctcagagtggatgaggatgaggatgacctggaggaagaacacataactaagatttattactgtagtcggacacactcccagctggcccagtttgtgcatgaggtgaagaagagcccctttggcaaggatgttcggctggtctcccttggctcccggcagaacctttgtgtaaatgaagacgtgaaaagcctaggttctgtgcagcttatcaacgaccgctgtgtggacatgcagagaagcaggcacgagaagaagaaaggagctgaggaggagaagccaaagaggaggaggcaggagaagcaggcagcctgccccttctacaaccacgagcagatgggccttctccgggatgaggccctggcagaggtgaaggacatggagcagctgctggcccttgggaaggaggcccgggcctgtccctattacgggagccgccttgccatccctgcagcccagctggtggtgctgccctatcagatgctgctgcatgcggccactcggcaggccgcgggcatccggctgcaggaccaggtggtgatcatcgacgaggcgcacaacctgatcgacaccatcacgggcatgcacagcgtggaggtcagcggctcccagctctgccaggcccattcccagctgctgcagtacgtggagcgatacgggaagcgtttgaaggccaagaacctgatgtacctgaagcagatcctgtatttgctggagaaattcgtggctgtgctaggggggaacattaagcaaaatcccaatacacagagtctgtcacagacagggacggagctgaagaccatcaacgactttctcttccagagccagatcgacaacatcaacctgttcaaggtgcagcgatactgtgagaagagcatgatcagcagaaagctctttggattcactgaacggtacggagcagtgttctcatcccgggagcagcccaaactggctgggtttcagcaattcctgcagagcctgcagcccaggacgactgaagctcttgcagcccctgcagacgagagtcaggccagcaccctgcgaccagcttctccactgatgcacatccaaggcttcctggcagctctcactacggccaaccaggacggcagggtcatcctgagccgccaaggcagcctcagtcagagcaccctgaagtttttgctcctgaatccagctgtgcactttgcccaagtggtgaaggaatgccgggcagtggtcattgcggggggtaccatgcagccggtgtctgacttccggcagcagctgctggcctgtgccggggtggaagctgagcgcgtggtggagttttcctgtggtcacgtgatccctccagacaacatcctgcccctcgtcatctgcagcgggatctccaaccagccgctggaattcacgttccagaaaagagagctgcctcagatgatggacgaggtgggtcgcattctctgtaacctgtgcggtgtggttcctggaggggtggtctgtttcttcccctcctacgagtacctgcgccaggtccatgcccactgggagaagggtggcctgctgggccgtctggctgccaggaagaagatattccaggaacctaagagcgcacaccaggtggagcaggtgctgctggcatattccaggtgcatccaggcctgtggccaggagagaggccaggtgacaggggccctgctcctctctgtggttggaggaaagatgagtgaagggatcaacttctctgacaacctaggccggtgtgtggtgatggtgggcatgcccttccccaacatcaggtctgcagagctgcaggagaagatggcctacttggatcaaaccctccccagagcccccggccaggcacccccagggaaggctctggtggagaacctgtgcatgaaggccgtcaaccagtccataggcagggccatcaggcaccagaaggattttgccagcgtagtgctcctggaccagcgatatgcccggccccctgtcctggccaagctgccggcctggatccgagcccgtgtggaggtcaaagctacctttggccccgccattgctgctgtgcagaagtttcaccgggagaagtcggcctcttcctgatgggcaaccacaccactgcctggcgccgtgcccttcctttgtcctgcccgctggagacagtgtttgtcgtgggcgtggtctgcggggatcctgttacaaaggtgaaacccaggaggagagtgtggagtccagagtgctgccaggacccaggcacaggcgttagctcccgtaggagaaaatgggggaatcctgaatgaacagtgggtcctggctgtccttggggcgttccagggcagctcccctcctggaatagaatctttctttccatcctgcatggctgagagccaggcttccttcctggtctccgcaggaggctgtggcagctgtggcatccactgtggcatctccgtcctgcccaccttcttaagaggcgagatggagcaggcccatctgcctctgccctttctagccaaggttatagctgccctggactgctcactctctggtctcaatttaaaatgatccatggccacagggctcctgcccaggggcttgtcaccttcccctcctccttcctgagtcactccttcagtagaaggccctgctccctatcctgtcccacagccctgcctggatttgtatccttggcttcgtgccagttcctccaagtctatggcacctccctccctctcaaccacttgagcaaactccaagacaccttctaccccaacaccagcaattatgccaagggccgttaggctctcaacatgactatagagaccccgtgtcatcacggagacctttgttcctgtgggaaaatatccctcccacctgcaacagctgcccctgctgactgcgcctgtcttctccctctgaccccagagaaaggggctgtggtcagctgggatcttctgccaccatcagggacaaacgggggcaggaggaaagtcactgatgcccagatgtttgcatcctgcacagctataggtccttaaataaaagtgtgctgttggtt

SEQ ID NO: 1310 - DNA, 3724 bp, Homo sapiens
  source 1..3724: mol_type = genomic DNA
ttctaactcagtggcgtttgccctgattcccggggcctggctttcagcgtagcaattctgccggcgaagaaggtgagcgcagtgctgtgtggcagcagagctccttaggacgaggagcagcgggacgaggaagggcagactggtgaaatcgcaaactgggcgtctgttccggcgccggacccctatttgcaaaggtccatggctaatgaaacacagaaggttggtgccatccattttccttttcccttcacaccctattccatccaggaagacttcatggcagagctgtaccgggttttggaggctggcaagattgggatatttgagagtccaactggcactgggaagtccttaagtcttatttgtggggccctctcttggctccgtgactttgaacagaagaagcgtgaagaagaggcacgactccttgaaactggaactggccccttacatgatgagaaagatgaatccctgtgtctgtcttcttcctgcgaaggggctgcaggcaccccgaggcctgctggagaaccggcctgggttactcagtttgtgcagaagaaagaagagagggacctggtggaccgactaaaggcggagcaggccaggaggaagcagcgagaagaacgcctgcagcagctgcagcacagggtgcagctcaagtatgcagccaagcgcctgaggcaggaagaagaagaaagagagaatctcctccgcctcagcagggagatgctagagacaggcccggaggctgagcggctggagcagctggagtctggggaggaggagctggtcctcgccgaatacgagagtgatgaggagaaaaaggtggcgagcagagtggatgaggatgaggatgacctggaggaagaacacataactaagatttattactgtagtcggacacactcccagctggcccagtttgtgcatgaggtgaagaagagcccctttggcaaggatgttcggctggtctcccttggctcccggcagaacctttgtgtaaatgaagacgtgaaaagcctaggttctgtgcagcttatcaacgaccgctgtgtggacatgcagagaagcaggcacgagaagaagaaaggagctgaggaggagaagccaaagaggaggaggcaggagaagcaggcagcctgccccttctacaaccacgagcagatgggccttctccgggatgaggccctggcagaggtgaaggacatggagcagctgctggcccttgggaaggaggcccgggcctgtccctattacgggagccgccttgccatccctgcagcccagctggtggtgctgccctatcagatgctgctgcatgcggccactcggcaggccgcgggcatccggctgcaggaccaggtggtgatcatcgacgaggcgcacaacctgatcgacaccatcacgggcatgcacagcgtggaggtcagcggctcccagctctgccaggcccattcccagctgctgcagtacgtggagcgatacgggaagcgtttgaaggccaagaacctgatgtacctgaagcagatcctgtatttgctggagaaattcgtggctgtgctaggggggaacattaagcaaaatcccaatacacagagtctgtcacagacagggacggagctgaagaccatcaacgactttctcttccagagccagatcgacaacatcaacctgttcaaggtgcagcgatactgtgagaagagcatgatcagcagaaagctctttggattcactgaacggtacggagcagtgttctcatcccgggagcagcccaaactggctgggtttcagcaattcctgcagagcctgcagcccaggacgactgaagctcttgcagcccctgcagacgagagtcaggccagcaccctgcgaccagcttctccactgatgcacatccaaggcttcctggcagctctcactacggccaaccaggacggcagggtcatcctgagccgccaaggcagcctcagtcagagcaccctgaagtttttgctcctgaatccagctgtgcactttgcccaagtggtgaaggaatgccgggcagtggtcattgcggggggtaccatgcagccggtgtctgacttccggcagcagctgctggcctgtgccggggtggaagctgagcgcgtggtggagttttcctgtggtcacgtgatccctccagacaacatcctgcccctcgtcatctgcagcgggatctccaaccagccgctggaattcacgttccagaaaagagagctgcctcagatgatattccaggaacctaagagcgcacaccaggtggagcaggtgctgctggcatattccaggtgcatccaggcctgtggccaggagagaggccaggtgacaggggccctgctcctctctgtggttggaggaaagatgagtgaagggatcaacttctctgacaacctaggccggtgtgtggtgatggtgggcatgcccttccccaacatcaggtctgcagagctgcaggagaagatggcctacttggatcaaaccctccccagagcccccggccaggcacccccagggaaggctctggtggagaacctgtgcatgaaggccgtcaaccagtccataggcagggccatcaggcaccagaaggattttgccagcgtagtgctcctggaccagcgatatgcccggccccctgtcctggccaagctgccggcctggatccgagcccgtgtggaggtcaaagctacctttggccccgccattgctgctgtgcagaagtttcaccgggagaagtcggcctcttcctgatgggcaaccacaccactgcctggcgccgtgcccttcctttgtcctgcccgctggagacagtgtttgtcgtgggcgtggtctgcggggatcctgttacaaaggtgaaacccaggaggagagtgtggagtccagagtgctgccaggacccaggcacaggcgttagctcccgtaggagaaaatgggggaatcctgaatgaacagtgggtcctggctgtccttggggcgttccagggcagctcccctcctggaatagaatctttctttccatcctgcatggctgagagccaggcttccttcctggtctccgcaggaggctgtggcagctgtggcatccactgtggcatctccgtcctgcccaccttcttaagaggcgagatggagcaggcccatctgcctctgccctttctagccaaggttatagctgccctggactgctcactctctggtctcaatttaaaatgatccatggccacagggctcctgcccaggggcttgtcaccttcccctcctccttcctgagtcactccttcagtagaaggccctgctccctatcctgtcccacagccctgcctggatttgtatccttggcttcgtgccagttcctccaagtctatggcacctccctccctctcaaccacttgagcaaactccaagacaccttctaccccaacaccagcaattatgccaagggccgttaggctctcaacatgactatagagaccccgtgtcatcacggagacctttgttcctgtgggaaaatatccctcccacctgcaacagctgcccctgctgactgcgcctgtcttctccctctgaccccagagaaaggggctgtggtcagctgggatcttctgccaccatcagggacaaacgggggcaggaggaaagtcactgatgcccagatgtttgcatcctgcacagctataggtccttaaataaaagtgtgctgttggtt

SEQ ID NO: 1311 - DNA, 3760 bp, Homo sapiens
  source 1..3760: mol_type = genomic DNA
tgcgcagcggcgggggttgttccggctgcctttcactgaggggacccgccagtttctaactcagtggcgtttgccctgattcccggggcctggctttcagcgtagcaattctgccggcgaagaaggtgagcgcagtgctgtgtggcagcagagctccttaggacgaggagcagcgggacgaggaagggcagactggtgaaatcgcaaactgggcgtctgttccggcgccggacccctatttgcaaaggtccatggctaatgaaacacagaaggttggtgccatccattttccttttcccttcacaccctattccatccaggaagacttcatggcagagctgtaccgggttttggaggctggcaagattgggatatttgagagtccaactggcactgggaagtccttaagtcttatttgtggggccctctcttggctccgtgactttgaacagaagaagcgtgaagaagaggcacgactccttgaaactggaactggccccttacatgatgagaaagatgaatccctgtgtctgtcttcttcctgcgaaggggctgcaggcaccccgaggcctgctggagaaccggcctgggttactcagtttgtgcagaagaaagaagagagggacctggtggaccgactaaaggcggagcaggccaggaggaagcagcgagaagaacgcctgcagcagctgcagcacagggtgcagctcaagtatgcagccaagcgcctgaggcaggaagaagaagaaagagagaatctcctccgcctcagcagggagatgctagagacaggcccggaggctgagcggctggagcagctggagtctggggaggaggagctggtcctcgccgaatacgagagtgatgaggagaaaaaggtggcgagcagagtggatgaggatgaggatgacctggaggaagaacacataactaagatttattactgtagtcggacacactcccagctggcccagtttgtgcatgaggtgaagaagagcccctttggcaaggatgttcggctggtctcccttggctcccggcagagaagaagaaaggagctgaggaggagaagccaaagaggaggaggcaggagaagcaggcagcctgccccttctacaaccacgagcagatgggccttctccgggatgaggccctggcagaggtgaaggacatggagcagctgctggcccttgggaaggaggcccgggcctgtccctattacgggagccgccttgccatccctgcagcccagctggtggtgctgccctatcagatgctgctgcatgcggccactcggcaggccgcgggcatccggctgcaggaccaggtggtgatcatcgacgaggcgcacaacctgatcgacaccatcacgggcatgcacagcgtggaggtcagcggctcccagctctgccaggcccattcccagctgctgcagtacgtggagcgatacgggaagcgtttgaaggccaagaacctgatgtacctgaagcagatcctgtatttgctggagaaattcgtggctgtgctaggggggaacattaagcaaaatcccaatacacagagtctgtcacagacagggacggagctgaagaccatcaacgactttctcttccagagccagatcgacaacatcaacctgttcaaggtgcagcgatactgtgagaagagcatgatcagcagaaagctctttggattcactgaacggtacggagcagtgttctcatcccgggagcagcccaaactggctgggtttcagcaattcctgcagagcctgcagcccaggacgactgaagctcttgcagcccctgcagacgagagtcaggccagcaccctgcgaccagcttctccactgatgcacatccaaggcttcctggcagctctcactacggccaaccaggacggcagggtcatcctgagccgccaaggcagcctcagtcagagcaccctgaagtttttgctcctgaatccagctgtgcactttgcccaagtggtgaaggaatgccgggcagtggtcattgcggggggtaccatgcagccggtgtctgacttccggcagcagctgctggcctgtgccggggtggaagctgagcgcgtggtggagttttcctgtggtcacgtgatccctccagacaacatcctgcccctcgtcatctgcagcgggatctccaaccagccgctggaattcacgttccagaaaagagagctgcctcagatgatggacgaggtgggtcgcattctctgtaacctgtgcggtgtggttcctggaggggtggtctgtttcttcccctcctacgagtacctgcgccaggtccatgcccactgggagaagggtggcctgctgggccgtctggctgccaggaagaagatattccaggaacctaagagcgcacaccaggtggagcaggtgctgctggcatattccaggtgcatccaggcctgtggccaggagagaggccaggtgacaggggccctgctcctctctgtggttggaggaaagatgagtgaagggatcaacttctctgacaacctaggccggtgtgtggtgatggtgggcatgcccttccccaacatcaggtctgcagagctgcaggagaagatggcctacttggatcaaaccctcgcagggccatcaggcaccagaaggattttgccagcgtagtgctcctggaccagcgatatgcccggccccctgtcctggccaagctgccggcctggatccgagcccgtgtggaggtcaaagctacctttggccccgccattgctgctgtgcagaagtttcaccgggagaagtcggcctcttcctgatgggcaaccacaccactgcctggcgccgtgcccttcctttgtcctgcccgctggagacagtgtttgtcgtgggcgtggtctgcggggatcctgttacaaaggtgaaacccaggaggagagtgtggagtccagagtgctgccaggacccaggcacaggcgttagctcccgtaggagaaaatgggggaatcctgaatgaacagtgggtcctggctgtccttggggcgttccagggcagctcccctcctggaatagaatctttctttccatcctgcatggctgagagccaggcttccttcctggtctccgcaggaggctgtggcagctgtggcatccactgtggcatctccgtcctgcccaccttcttaagaggcgagatggagcaggcccatctgcctctgccctttctagccaaggttatagctgccctggactgctcactctctggtctcaatttaaaatgatccatggccacagggctcctgcccaggggcttgtcaccttcccctcctccttcctgagtcactccttcagtagaaggccctgctccctatcctgtcccacagccctgcctggatttgtatccttggcttcgtgccagttcctccaagtctatggcacctccctccctctcaaccacttgagcaaactccaagacaccttctaccccaacaccagcaattatgccaagggccgttaggctctcaacatgactatagagaccccgtgtcatcacggagacctttgttcctgtgggaaaatatccctcccacctgcaacagctgcccctgctgactgcgcctgtcttctccctctgaccccagagaaaggggctgtggtcagctgggatcttctgccaccatcagggacaaacgggggcaggaggaaagtcactgatgcccagatgtttgcatcctgcacagctataggtccttaaataaaagtgtgctgttggtt

SEQ ID NO: 1312 - DNA, 3922 bp, Homo sapiens
  source 1..3922: mol_type = genomic DNA
tgcgcagcggcgggggttgttccggctgcctttcactgaggggacccgccagtttctaactcagtggcgtttgccctgattcccggggcctggctttcagcgtagcaattctgccggcgaagaaggtgagcgcagtgctgtgtggcagcagagctccttaggacgaggagcagcgggacgaggaagggcagactggtgaaatcgcaaactgggcgtctgttccggcgccggacccctatttgcaaaggtccatggctaatgaaacacagaaggttggtgccatccattttccttttcccttcacaccctattccatccaggaagacttcatggcagagctgtaccgggttttggaggctggcaagattgggatatttgagagtccaactggcactgggaagtccttaagtcttatttgtggggccctctcttggctccgtgactttgaacagaagaagcgtgaagaagaggcacgactccttgaaactggaactggccccttacatgatgagaaagatgaatccctgtgtctgtcttcttcctgcgaaggggctgcaggcaccccgaggcctgctggagaaccggcctgggttactcagtttgtgcagaagaaagaagagagggacctggtggaccgactaaaggcggagcaggccaggaggaagcagcgagaagaacgcctgcagcagctgcagcacagggtgcagctcaagtatgcagccaagcgcctgaggcaggaagaagaagaaagagagaatctcctccgcctcagcagggagatgctagagacaggcccggaggctgagcggctggagcagctggagtctggggaggaggagctggtcctcgccgaatacgagagtgatgaggagaaaaaggtggcgagcagagtggatgaggatgaggatgacctggaggaagaacacataactaagatttattactgtagtcggacacactcccagctggcccagtttgtgcatgaggtgaagaagagcccctttggcaaggatgttcggctggtctcccttggctcccggcagaacctttgtgtaaatgaagacgtgaaaagcctaggttctgtgcagcttatcaacgaccgctgtgtggacatgcagagaagcaggcacgagaagaagaaaggagctgaggaggagaagccaaagaggaggaggcaggagaagcaggcagcctgccccttctacaaccacgagcagatgggccttctccgggatgaggccctggcagaggtgaaggacatggagcagctgctggcccttgggaaggaggcccgggcctgtccctattacgggagccgccttgccatccctgcagcccagctggtggtgctgccctatcagatgctgctgcatgcggccactcggcaggccgcgggcatccggctgcaggaccaggtggtgatcatcgacgaggcgcacaacctgatcgacaccatcacgggcatgcacagcgtggaggtcagcggctcccagctctgccaggcccattcccagctgctgcagtacgtggagcgatacgggaagcgtttgaaggccaagaacctgatgtacctgaagcagatcctgtatttgctggagaaattcgtggctgtgctaggggggaacattaagcaaaatcccaatacacagagtctgtcacagacagggacggagctgaagaccatcaacgactttctcttccagagccagatcgacaacatcaacctgttcaaggtgcagcgatactgtgagaagagcatgatcagcagaaagctctttggattcactgaacggtacggagcagtgttctcatcccgggagcagcccaaactggctgggtttcagcaattcctgcagagcctgcagcccaggacgactgaagctcttgcagcccctgcagacgagagtcaggccagcaccctgcgaccagcttctccactgatgcacatccaaggcttcctggcagctctcactacggccaaccaggacggcagggtcatcctgagccgccaaggcagcctcagtcagagcaccctgaagtttttgctcctgaatccagctgtgcactttgcccaagtggtgaaggaatgccgggcagtggtcattgcggggggtaccatgcagccggtgtctgacttccggcagcagctgctggcctgtgccggggtggaagctgagcgcgtggtggagttttcctgtggtcacgtgatccctccagacaacatcctgcccctcgtcatctgcagcgggatctccaaccagccgctggaattcacgttccagaaaagagagctgcctcagatgatggacgaggtgggtcgcattctctgtaacctgtgcggtgtggttcctggaggggtggtctgtttcttcccctcctacgagtacctgcgccaggtccatgcccactgggagaagggtggcctgctgggccgtctggctgccaggaagaagatattccaggaacctaagagcgcacaccaggtggagcaggtgctgctggcatattccaggtgcatccaggcctgtggccaggagagaggccaggtgacaggggccctgctcctctctgtggttggaggaaagatgagtgaagggatcaacttctctgacaacctaggccggtgtgtggtgatggtgggcatgcccttccccaacatcaggtctgcagagctgcaggagaagatggcctacttggatcaaaccctcagcccccggccaggcacccccagggaaggctctggtggagaacctgtgcatgaaggccgtcaaccagtccataggcagggccatcaggcaccagaaggattttgccagcgtagtgctcctggaccagcgatatgcccggccccctgtcctggccaagctgccggcctggatccgagcccgtgtggaggtcaaagctacctttggccccgccattgctgctgtgcagaagtttcaccgggagaagtcggcctcttcctgatgggcaaccacaccactgcctggcgccgtgcccttcctttgtcctgcccgctggagacagtgtttgtcgtgggcgtggtctgcggggatcctgttacaaaggtgaaacccaggaggagagtgtggagtccagagtgctgccaggacccaggcacaggcgttagctcccgtaggagaaaatgggggaatcctgaatgaacagtgggtcctggctgtccttggggcgttccagggcagctcccctcctggaatagaatctttctttccatcctgcatggctgagagccaggcttccttcctggtctccgcaggaggctgtggcagctgtggcatccactgtggcatctccgtcctgcccaccttcttaagaggcgagatggagcaggcccatctgcctctgccctttctagccaaggttatagctgccctggactgctcactctctggtctcaatttaaaatgatccatggccacagggctcctgcccaggggcttgtcaccttcccctcctccttcctgagtcactccttcagtagaaggccctgctccctatcctgtcccacagccctgcctggatttgtatccttggcttcgtgccagttcctccaagtctatggcacctccctccctctcaaccacttgagcaaactccaagacaccttctaccccaacaccagcaattatgccaagggccgttaggctctcaacatgactatagagaccccgtgtcatcacggagacctttgttcctgtgggaaaatatccctcccacctgcaacagctgcccctgctgactgcgcctgtcttctccctctgaccccagagaaaggggctgtggtcagctgggatcttctgccaccatcagggacaaacgggggcaggaggaaagtcactgatgcccagatgtttgcatcctgcacagctataggtccttaaataaaagtgtgctgttggtt

SEQ ID NO: 1313 - DNA, 883 bp, Homo sapiens
  source 1..883: mol_type = genomic DNA
gccagtttctaactcagtggcgtttgccctgattcccggggcctggctttcagcgtagcaattctgccggcgaagaaggtgagcgcagtgctgtgtggcagcagagctccttaggacgaggagcagcgggacgaggaagggcagactggtgaaatcgcaaactgggcgtctgttccggcgccggacccctatttgcaaaggaagacttcatggcagagctgtaccgggttttggaggctggcaagattgggatatttgagagtccaactggcactgggaagtccttaagtcttatttgtggggccctctcttggctccgtgactttgaacagaagaagcgtgaagaagaggcacgactccttgaaactggaactggccccttacatgatgagaaagatgaatccctgtgtctgtcttcttcctgcgaaggggctgcaggcaccccgaggcctgctggagaaccggcctgggttactcagtttgtgcagaagaaagaagagagggacctggtggaccgactaaaggcggagcaggccaggaggaagcagcgagaagaacgcctgcagcagctgcagcacagggtgcagctcaagtatgcagccaagcgcctgaggcaggaagaagaagaaagagagaatctcctccgcctcagcagggagatgctagagacaggcccggaggctgagcggctggagcagctggagtctggggaggaggagctggtcctcgccgaatacgagagtgatgaggagaaaaaggtggcgagcagagtggatgaggatgaggatgacctggaggaagaacacataactaagatttattactgtagtcggacacactcccagctggcccagtttgtgcatgaggtgaagaagagcccctt

SEQ ID NO: 1314 - DNA, 3079 bp, Homo sapiens
  source 1..3079: mol_type = genomic DNA
tgcgcagcggcgggggttgttccggctgcctttcactgaggggacccgccagtttctaactcagtggcgtttgccctgattcccggggcctggctttcagcgtagcaattctgccggcgaagaaggtgagcgcagtgctgtgtggcagcagagctccttaggacgaggagcagcgggacgaggaagggcagactggtgaaatcgcaaactgggcgtctgttccggcgccggacccctatttgcaaaggtccatggctaatgaaacacagaaggttggtgccatccattttccttttcccttcacaccctattccatccaggaagacttcatggcagagctgtaccgggttttggaggctggcaagattgggatatttgagagtccaactggcactgggaagtccttaagtcttatttgtggggccctctcttggctccgtgactttgaacagaagaagcgtgaagaagaggcacgactccttgaaactggaactggccccttacatgatgagaaagatgaatccctgtgtctgtcttcttcctgcgaaggggctgcaggcaccccgaggcctgctggagaaccggcctgggttactcagtttgtgcagaagaaagaagagagggacctggtggaccgactaaaggcggagcaggccaggaggaagcagcgagaagaacgcctgcagcagctgcagcacagggtgcagctcaagtatgcagccaagcgcctgaggcaggaagaagaagaaagagagaatctcctccgcctcagcagggagatgctagagacaggcccggaggctgagcggctggagcagctggagtctggggaggaggagctggtcctcgccgaatacgagagtgatgaggagaaaaaggtggcgagcagagtggatgaggatgaggatgacctggaggaagaacacataactaagatttattactgtagtcggacacactcccagctggcccagtttgtgcatgaggtgaagaagagcccctttggcaaggatgttcggctggtctcccttggctcccggcagaacctttgtgtaaatgaagacgtgaaaagcctaggttctgtgcagcttatcaacgaccgctgtgtggacatgcagagaagcaggcacgagaagaagaaaggagctgaggaggagaagccaaagaggaggaggcaggagaagcaggcagcctgccccttctacaaccacgagcagatgggccttctccgggatgaggccctggcagaggtgaaggacatggagcagctgctggcccttgggaaggaggcccgggcctgtccctattacgggagccgccttgccatccctgcagcccagctggtggtgctgccctatcagatgctgctgcatgcggccactcggcaggccgcgggcatccggctgcaggaccaggtggtgatcatcgacgaggcgcacaacctgatcgacaccatcacgggcatgcacagcgtggaggtcagcggctcccagctctgccaggcccattcccagctgctgcagtacgtggagcgatacgggaagcgtttgaaggccaagaacctgatgtacctgaagcagatcctgtatttgctggagaaattcgtggctgtgctaggggggaacattaagcaaaatcccaatacacagagtctgtcacagacagggacggagctgaagaccatcaacgactttctcttccagagccagatcgacaacatcaacctgttcaaggtgcagcgatactgtgagaagagcatgatcagcagaaagctctttggattcactgaacggtacggagcagtgttctcatcccgggagcagcccaaactggctgggtttcagcaattcctgcagagcctgcagcccaggacgactgaagctcttgcagcccctgcagacgagagtcaggccagcaccctgcgaccagcttctccactgatgcacatccaaggcttcctggcagctctcactacggccaaccaggacggcagggtcatcctgagccgccaaggcagcctcagtcagagcaccctgaagtttttgctcctgaatccagctgtgcactttgcccaagtggtgaaggaatgccgggcagtggtcattgcggggggtaccatgcagccggtgtctgacttccggcagcagctgctggcctgtgccggggtggaagctgagcgcgtggtggagttttcctgtggtcacgtgatccctccagacaacatcctgcccctcgtcatctgcagcgggatctccaaccagccgctggaattcacgttccagaaaagagagctgcctcagatgatggacgaggtgggtcgcattctctgtaacctgtgcggtgtggttcctggaggggtggtctgtttcttcccctcctacgagtacctgcgccaggtccatgcccactgggagaagggtggcctgctgggccgtctggctgccaggaagaagatattccaggaacctaagagcgcacaccaggtggagcaggtgctgctggcatattccaggtgcatccaggcctgtggccaggagagaggccaggtgacaggggccctgctcctctctgtggttggaggaaagatgagtgaagggatcaacttctctgacaacctaggccggtgtgtggtgatggtgggcatgcccttccccaacatcaggtctgcagagctgcaggagaagatggcctacttggatcaaaccctccccagagcccccggccaggcacccccagggaaggctctggtggagaacctgtgcatgaaggccgtcaaccagtccataggcagggccatcaggcaccagaaggattttgccagcgtagtgctcctggaccagcgatatgcccggccccctgtcctggccaagctgccggcctggatccgagcccgtgtggaggtcaaagctacctttggccccgccattgctgctgtgcagaagtttcaccgggagaagtcggcctcttcctgatgggcaaccacaccactgcctggcgccgtgcccttcctttgtcctgcccgctggagacagtgtttgtcgtgggcgtggtctgcggggatcctgttacaaaggtgaaa

SEQ ID NO: 1315 - DNA, 3751 bp, Homo sapiens
  source 1..3751: mol_type = genomic DNA
cagtttctaactcagtggcgtttgccctgattcccggggcctggctttcagcgtagcaattctgccggcgaagaaggtccatggctaatgaaacacagaaggttggtgccatccattttccttttcccttcacaccctattccatccaggaagacttcatggcagagctgtaccgggttttggaggctggcaagattgggatatttgagagtccaactggcactgggaagtccttaagtcttatttgtggggccctctcttggctccgtgactttgaacagaagaagcgtgaagaagaggcacgactccttgaaactggaactggccccttacatgatgagaaagatgaatccctgtgtctgtcttcttcctgcgaaggggctgcaggcaccccgaggcctgctggagaaccggcctgggttactcagtttgtgcagaagaaagaagagagggacctggtggaccgactaaaggcggagcaggccaggaggaagcagcgagaagaacgcctgcagcagctgcagcacagggtgcagctcaagtatgcagccaagcgcctgaggcaggaagaagaagaaagagagaatctcctccgcctcagcagggagatgctagagacaggcccggaggctgagcggctggagcagctggagtctggggaggaggagctggtcctcgccgaatacgagagtgatgaggagaaaaaggtggcgagcagagtggatgaggatgaggatgacctggaggaagaacacataactaagatttattactgtagtcggacacactcccagctggcccagtttgtgcatgaggtgaagaagagcccctttggcaaggatgttcggctggtctcccttggctcccggcagaacctttgtgtaaatgaagacgtgaaaagcctaggttctgtgcagcttatcaacgaccgctgtgtggacatgcagagaagcaggcacgagaagaagaaaggagctgaggaggagaagccaaagaggaggaggcaggagaagcaggcagcctgccccttctacaaccacgagcagatgggccttctccgggatgaggccctggcagaggtgaaggacatggagcagctgctggcccttgggaaggaggcccgggcctgtccctattacgggagccgccttgccatccctgcagcccagctggtggtgctgccctatcagatgctgctgcatgcggccactcggcaggccgcgggcatccggctgcaggaccaggtggtgatcatcgacgaggcgcacaacctgatcgacaccatcacgggcatgcacagcgtggaggtcagcggctcccagctctgccaggcccattcccagctgctgcagtacgtggagcgatacgggaagcgtttgaaggccaagaacctgatgtacctgaagcagatcctgtatttgctggagaaattcgtggctgtgctaggggggaacattaagcaaaatcccaatacacagagtctgtcacagacagggacggagctgaagaccatcaacgactttctcttccagagccagatcgacaacatcaacctgttcaaggtgcagcgatactgtgagaagagcatgatcagcagaaagctctttggattcactgaacggtacggagcagtgttctcatcccgggagcagcccaaactggctgggtttcagcaattcctgcagagcctgcagcccaggacgactgaagctcttgcagcccctgcagacgagagtcaggccagcaccctgcgaccagcttctccactgatgcacatccaaggcttcctggcagctctcactacggccaaccaggacggcagggtcatcctgagccgccaaggcagcctcagtcagagcaccctgaagtttttgctcctgaatccagctgtgcactttgcccaagtggtgaaggaatgccgggcagtggtcattgcggggggtaccatgcagccggtgtctgacttccggcagcagctgctggcctgtgccggggtggaagctgagcgcgtggtggagttttcctgtggtcacgtgatccctccagacaacatcctgcccctcgtcatctgcagcgggatctccaaccagccgctggaattcacgttccagaaaagagagctgcctcagatgatggacgaggtgggtcgcattctctgtaacctgtgcggtgtggttcctggaggggtggtctgtttcttcccctcctacgagtacctgcgccaggtccatgcccactgggagaagggtggcctgctgggccgtctggctgccaggaagaagatattccaggaacctaagagcgcacaccaggtggagcaggtgctgctggcatattccaggtgcatccaggcctgtggccaggagagaggccaggtgacaggggccctgctcctctctgtggttggaggaaagatgagtgaagggatcaacttctctgacaacctaggccggtgtgtggtgatggtgggcatgcccttccccaacatcaggtctgcagagctgcaggagaagatggcctacttggatcaaaccctcagcccccggccaggcacccccagggaaggctctggtggagaacctgtgcatgaaggccgtcaaccagtccataggcagggccatcaggcaccagaaggattttgccagcgtagtgctcctggaccagcgatatgcccggccccctgtcctggccaagctgccggcctggatccgagcccgtgtggaggtcaaagctacctttggccccgccattgctgctgtgcagaagtttcaccgggagaagtcggcctcttcctgatgggcaaccacaccactgcctggcgccgtgcccttcctttgtcctgcccgctggagacagtgtttgtcgtgggcgtggtctgcggggatcctgttacaaaggtgaaacccaggaggagagtgtggagtccagagtgctgccaggacccaggcacaggcgttagctcccgtaggagaaaatgggggaatcctgaatgaacagtgggtcctggctgtccttggggcgttccagggcagctcccctcctggaatagaatctttctttccatcctgcatggctgagagccaggcttccttcctggtctccgcaggaggctgtggcagctgtggcatccactgtggcatctccgtcctgcccaccttcttaagaggcgagatggagcaggcccatctgcctctgccctttctagccaaggttatagctgccctggactgctcactctctggtctcaatttaaaatgatccatggccacagggctcctgcccaggggcttgtcaccttcccctcctccttcctgagtcactccttcagtagaaggccctgctccctatcctgtcccacagccctgcctggatttgtatccttggcttcgtgccagttcctccaagtctatggcacctccctccctctcaaccacttgagcaaactccaagacaccttctaccccaacaccagcaattatgccaagggccgttaggctctcaacatgactatagagaccccgtgtcatcacggagacctttgttcctgtgggaaaatatccctcccacctgcaacagctgcccctgctgactgcgcctgtcttctccctctgaccccagagaaaggggctgtggtcagctgggatcttctgccaccatcagggacaaacgggggcaggaggaaagtcactgatgcccagatgtttgcatcctgcacagctataggtccttaaataaaagtgtgctgttggtt

SEQ ID NO: 1316 - DNA, 5743 bp, Homo sapiens
  source 1..5743: mol_type = genomic DNA
cttcagattgcaaaccttcttgccttcaagcctcggctccaacaccagtccggcagaggaacccagtctaatgaggactggagactgatgcatgagggggctacggaggcgcaggagcggtggtgatggtctgggaagcggagctgaagtgccctgggctttggtgaggcgtgacagtttatcatgaccgtgttcaggcaggaaaacgtggatgattactacgacaccggcgaggaacttggcagtggacagtttgcggttgtgaagaaatgccgtgagaaaagcaccggcctccagtatgccgccaaattcatcaagaaaaggaggactaagtccagccggcggggtgtgagccgcgaggacatcgagcgggaggtcagcatcctgaaggagatccagcaccccaatgtcatcaccctgcacgaggtctatgagaacaagacggacgtcatcctgatcttggaactcgttgcaggtggcgagctgtttgacttcttagctgaaaaggaatctttaactgaagaggaagcaactgaatttctcaaacaaattcttaatggtgtttactacctgcactcccttcaaatcgcccactttgatcttaagcctgagaacataatgcttttggatagaaatgtccccaaacctcggatcaagatcattgactttgggttggcccataaaattgactttggaaatgaatttaaaaacatatttgggactccagagtttgtcgctcctgagatagtcaactatgaacctcttggtcttgaggcagatatgtggagtatcggggtaataacctatatcctcctaagtggggcctccccatttcttggagacactaagcaagaaacgttagcaaatgtatccgctgtcaactacgaatttgaggatgaatacttcagtaataccagtgccctagccaaagatttcataagaagacttctggtcaaggatccaaagaagagaatgacaattcaagatagtttgcagcatccctggatcaagcctaaagatacacaacaggcacttagtagaaaagcatcagcagtaaacatggagaaattcaagaagtttgcagcccggaaaaaatggaaacaatccgttcgcttgatatcactgtgccaaagattatccaggtcattcctgtccagaagtaacatgagtgttgccagaagcgatgatactctggatgaggaagactcctttgtgatgaaagccatcatccatgccatcaacgatgacaatgtcccaggcctgcagcaccttctgggctcattatccaactatgatgttaaccaacccaacaagcacgggacacctccattactcattgctgctggctgtgggaatattcaaatactacagttgctcattaaaagaggctcgagaatcgatgtccaggataagggcgggtccaatgccgtctactgggctgctcggcatggccacgtcgataccttgaaatttctcagtgagaacaaatgccctttggatgtgaaagacaagtctggagagatggccctccacgtggcagctcgctatggccatgctgacgtggctcagttactgtgcagcttcggctcaaatcccaatatccaggacaaggaagaagaaacccccctgcactgtgctgcttggcacggctattactctgtggccaaagccctttgtgaagccggctgtaacgtgaacatcaagaaccgagaaggagagacgcccctcctgacagcctctgccaggggctaccacgacatcgtggagtgtctggccgaacatggagccgaccttaatgcttgcgacaaggacggacacattgcccttcatctggctgtaagacggtgtcagatggaggtaatcaagactctcctcagccaagggtgtttcgtcgattatcaagacaggcacggcaatactcccctccatgtggcatgtaaagatggcaacatgcctatcgtggtggccctctgtgaagcaaactgcaatttggacatctccaacaagtatgggcgaacgcctctgcaccttgcggccaacaacggaatcctagacgtggtccggtatctctgtctgatgggagccagcgttgaggcgctgaccacggacggaaagacggcagaagatcttgctagatcggaacagcacgagcacgtagcaggtctccttgcaagacttcgaaaggatacgcaccgaggactcttcatccagcagctccgacccacacagaacctgcagccaagaattaagctcaagctgtttggccactcgggatccgggaaaaccacccttgtagaatctctcaagtgtgggctgctgaggagctttttcagaaggcgtcggcccagactgtcttccaccaactccagcaggttcccaccttcacccctggcttctaagcccacagtctcagtgagcatcaacaacctgtacccaggctgcgagaacgtgagtgtgaggagccgcagcatgatgttcgagccgggtcttaccaaagggatgctggaggtgtttgtggccccgacccaccacccgcactgctcggccgatgaccagtccaccaaggccatcgacatccagaacgcttatttgaatggagttggcgatttcagcgtgtgggagttctctggaaatcctgtgtatttctgctgttatgactattttgctgcaaatgatcccacgtcaatccatgttgttgtctttagtctagaagagccctatgagatccagctgaaccaagtgattttctggctcagtttcctgaagtcccttgtcccagttgaagaacccatagccttcggtggcaagctgaagaacccactccaagttgtcctggtggccacccacgctgacatcatgaatgttcctcgaccggctggaggcgagtttggatatgacaaagacacatcgttgctgaaagagattaggaacaggtttggaaatgatcttcacatttcaaataagctgtttgttctggatgctggggcttctgggtcaaaggacatgaaggtacttcgaaatcatctgcaagaaatacgaagccagattgtttcggtctgtcctcccatgactcacctgtgtgagaaaatcatctccacgctgccttcctggaggaagctcaatggacccaaccagctgatgtcgctgcagcagtttgtgtacgacgtgcaggaccagctgaaccccctggccagcgaggaggacctcaggcgcattgctcagcagctccacagcacaggcgagatcaacatcatgcaaagtgaaacagttcaggacgtgctgctcctggacccccgctggctctgcacaaacgtcctggggaagttgctgtccgtggagaccccacgggcgctgcaccactaccggggccgctacaccgtggaggacatccagcgcctggtgcccgacagcgacgtggaggagctgctgcagatcctcgatgccatggacatctgcgcccgggacctgagcagcgggaccatggtggacgtcccagccctgatcaagacagacaacctgcaccgctcctgggctgatgaggaggacgaggtgatggtgtatggtggcgtgcgcatcgtgcccgtggaacacctcacccccttcccatgtggcatctttcacaaggtccaggtgaacctgtgccggtggatccaccagcaaagcacagagggcgacgcggacatccgcctgtgggtgaatggctgcaagctggccaaccgtggggccgagctgctggtgctgctggtcaaccacggccagggcattgaggtccaggtccgcggcctggagacggagaagatcaagtgctgcctgctgctggactcggtgtgcagcaccattgagaacgtcatggccaccacgctgccagggctcctgaccgtgaagcattacctgagcccccagcagctgcgggagcaccatgagcccgtcatgatctaccagccacgggacttcttccgggcacagactctgaaggaaacctcactgaccaacaccatgggggggtacaaggaaagcttcagcagcatcatgtgcttcgggtgtcacgacgtctactcacaggccagcctcggcatggacatccatgcatcagacctgaacctcctcactcggaggaaactgagtcgcctgctggacccgcccgaccccctggggaaggactggtgccttctcgccatgaacttaggcctccctgacctcgtggcaaagtacaacaccagtaacggggctcccaaggatttcctccccagccccctccacgccctgctgcgggaatggaccacctaccctgagagcacagtgggcaccctcatgtccaaactgagggagctgggtcgccgggatgccgcagactttttgctgaaggcatcctctgtgttcaaaatcaacctggatggcaatggccaggaggcctatgcctcgagctgcaacagcggcacctcttacaattccattagctctgttgtatcccggtgagggcagcctctggcttgggcagggtctgtttggactgcagaagcaagggggtgatgtagcccatccttccctttggagatgctgagggtgtttcttcctgcacccacagccagggggatgccactcctccctccggcttgacctgtttctctgccgctacctccctccccgtctcattccgttgtctgtggatggtcattgcagtttaagagcagaacagatcttttactttggccgcttgaaaagctagtgtacctcctctcagtgttttggactccatctctcatcctccagtaccttgcttcttactgataattttgctggaattcctaacttttcaatgacattttttttaactactatattgattgtcctttaaaaaagaaaagtgcatatttatccaaaatgtgtatttcttatacgcttttctttgttataccatttcctcagcttatctcttttatatttgtaggagaaactcccatgtatggaatcccactgtatgatttataaacagacaatatgtgagtgccttttgcagaagagggtgtgtttgaaatcatcggagtcagccaggagctgtcaccaaggaaacgctacctctctgtcccttgctgtatgctgatcatcgccagaggtgcttcaccctgagttttgttttgtattgttttctgacagtttttctgttttgtttggcaaggaaaggggagaagggaatcctcctccagggtgattttatgatcagtgttgttgctctaggaagacatttttccgtttgcttttgttccaatgtcaatgtgaacgtccacatgaaacctacacactgtcatgcttcatcattccctctcatctcaggtagaaggttgacacagttgtagggttacagagacctatgtaagaattcagaagacccctgactcatcatttgtggcagtcccttataattggtgcatagcagatggtttccacatttagatcctggtttcataacttcctgtacttgaagtctaaaagcagaaaataaaggaagcaagttttcttccatgattttaaattgtgatcgagttttaaattgataggagggaacatgtcctaattcttctgtcctgagaagcatgtaatgttaatgttatatcatatgtatatatatatatgcactatgtatatacatatatattaatactggtatttttacttaatctataaaatgtcgttaaaaagttgtttgtttttttctttttttataaataaactgttgctcgttgca

SEQ ID NO: 1317 - DNA, 5892 bp, Homo sapiens
  source 1..5892: mol_type = genomic DNA
ggaggacagccggaccgagccaacgccggggactttgttccctccgcggaggggactcggcaactcgcagcggcagggtctggggccggcgcctgggagggatctgcgccccccactcactccctagctgtgttcccgccgccgccccggctagtctccggcgctggcgcctatggtcggcctccgacagcgctccggagggaccgggggagctcccaggcgcccgggactggagactgatgcatgagggggctacggaggcgcaggagcggtggtgatggtctgggaagcggagctgaagtgccctgggctttggtgaggcgtgacagtttatcatgaccgtgttcaggcaggaaaacgtggatgattactacgacaccggcgaggaacttggcagtggacagtttgcggttgtgaagaaatgccgtgagaaaagcaccggcctccagtatgccgccaaattcatcaagaaaaggaggactaagtccagccggcggggtgtgagccgcgaggacatcgagcgggaggtcagcatcctgaaggagatccagcaccccaatgtcatcaccctgcacgaggtctatgagaacaagacggacgtcatcctgatcttggaactcgttgcaggtggcgagctgtttgacttcttagctgaaaaggaatctttaactgaagaggaagcaactgaatttctcaaacaaattcttaatggtgtttactacctgcactcccttcaaatcgcccactttgatcttaagcctgagaacataatgcttttggatagaaatgtccccaaacctcggatcaagatcattgactttgggttggcccataaaattgactttggaaatgaatttaaaaacatatttgggactccagagtttgtcgctcctgagatagtcaactatgaacctcttggtcttgaggcagatatgtggagtatcggggtaataacctatatcctcctaagtggggcctccccatttcttggagacactaagcaagaaacgttagcaaatgtatccgctgtcaactacgaatttgaggatgaatacttcagtaataccagtgccctagccaaagatttcataagaagacttctggtcaaggatccaaagaagagaatgacaattcaagatagtttgcagcatccctggatcaagcctaaagatacacaacaggcacttagtagaaaagcatcagcagtaaacatggagaaattcaagaagtttgcagcccggaaaaaatggaaacaatccgttcgcttgatatcactgtgccaaagattatccaggtcattcctgtccagaagtaacatgagtgttgccagaagcgatgatactctggatgaggaagactcctttgtgatgaaagccatcatccatgccatcaacgatgacaatgtcccaggcctgcagcaccttctgggctcattatccaactatgatgttaaccaacccaacaagcacgggacacctccattactcattgctgctggctgtgggaatattcaaatactacagttgctcattaaaagaggctcgagaatcgatgtccaggataagggcgggtccaatgccgtctactgggctgctcggcatggccacgtcgataccttgaaatttctcagtgagaacaaatgccctttggatgtgaaagacaagtctggagagatggccctccacgtggcagctcgctatggccatgctgacgtggctcagttactgtgcagcttcggctcaaatcccaatatccaggacaaggaagaagaaacccccctgcactgtgctgcttggcacggctattactctgtggccaaagccctttgtgaagccggctgtaacgtgaacatcaagaaccgagaaggagagacgcccctcctgacagcctctgccaggggctaccacgacatcgtggagtgtctggccgaacatggagccgaccttaatgcttgcgacaaggacggacacattgcccttcatctggctgtaagacggtgtcagatggaggtaatcaagactctcctcagccaagggtgtttcgtcgattatcaagacaggcacggcaatactcccctccatgtggcatgtaaagatggcaacatgcctatcgtggtggccctctgtgaagcaaactgcaatttggacatctccaacaagtatgggcgaacgcctctgcaccttgcggccaacaacggaatcctagacgtggtccggtatctctgtctgatgggagccagcgttgaggcgctgaccacggacggaaagacggcagaagatcttgctagatcggaacagcacgagcacgtagcaggtctccttgcaagacttcgaaaggatacgcaccgaggactcttcatccagcagctccgacccacacagaacctgcagccaagaattaagctcaagctgtttggccactcgggatccgggaaaaccacccttgtagaatctctcaagtgtgggctgctgaggagctttttcagaaggcgtcggcccagactgtcttccaccaactccagcaggttcccaccttcacccctggcttctaagcccacagtctcagtgagcatcaacaacctgtacccaggctgcgagaacgtgagtgtgaggagccgcagcatgatgttcgagccgggtcttaccaaagggatgctggaggtgtttgtggccccgacccaccacccgcactgctcggccgatgaccagtccaccaaggccatcgacatccagaacgcttatttgaatggagttggcgatttcagcgtgtgggagttctctggaaatcctgtgtatttctgctgttatgactattttgctgcaaatgatcccacgtcaatccatgttgttgtctttagtctagaagagccctatgagatccagctgaaccaagtgattttctggctcagtttcctgaagtcccttgtcccagttgaagaacccatagccttcggtggcaagctgaagaacccactccaagttgtcctggtggccacccacgctgacatcatgaatgttcctcgaccggctggaggcgagtttggatatgacaaagacacatcgttgctgaaagagattaggaacaggtttggaaatgatcttcacatttcaaataagctgtttgttctggatgctggggcttctgggtcaaaggacatgaaggtacttcgaaatcatctgcaagaaatacgaagccagattgtttcggtctgtcctcccatgactcacctgtgtgagaaaatcatctccacgctgccttcctggaggaagctcaatggacccaaccagctgatgtcgctgcagcagtttgtgtacgacgtgcaggaccagctgaaccccctggccagcgaggaggacctcaggcgcattgctcagcagctccacagcacaggcgagatcaacatcatgcaaagtgaaacagttcaggacgtgctgctcctggacccccgctggctctgcacaaacgtcctggggaagttgctgtccgtggagaccccacgggcgctgcaccactaccggggccgctacaccgtggaggacatccagcgcctggtgcccgacagcgacgtggaggagctgctgcagatcctcgatgccatggacatctgcgcccgggacctgagcagcgggaccatggtggacgtcccagccctgatcaagacagacaacctgcaccgctcctgggctgatgaggaggacgaggtgatggtgtatggtggcgtgcgcatcgtgcccgtggaacacctcacccccttcccatgtggcatctttcacaaggtccaggtgaacctgtgccggtggatccaccagcaaagcacagagggcgacgcggacatccgcctgtgggtgaatggctgcaagctggccaaccgtggggccgagctgctggtgctgctggtcaaccacggccagggcattgaggtccaggtccgcggcctggagacggagaagatcaagtgctgcctgctgctggactcggtgtgcagcaccattgagaacgtcatggccaccacgctgccagggctcctgaccgtgaagcattacctgagcccccagcagctgcgggagcaccatgagcccgtcatgatctaccagccacgggacttcttccgggcacagactctgaaggaaacctcactgaccaacaccatgggggggtacaaggaaagcttcagcagcatcatgtgcttcgggtgtcacgacgtctactcacaggccagcctcggcatggacatccatgcatcagacctgaacctcctcactcggaggaaactgagtcgcctgctggacccgcccgaccccctggggaaggactggtgccttctcgccatgaacttaggcctccctgacctcgtggcaaagtacaacaccagtaacggggctcccaaggatttcctccccagccccctccacgccctgctgcgggaatggaccacctaccctgagagcacagtgggcaccctcatgtccaaactgagggagctgggtcgccgggatgccgcagactttttgctgaaggcatcctctgtgttcaaaatcaacctggatggcaatggccaggaggcctatgcctcgagctgcaacagcggcacctcttacaattccattagctctgttgtatcccggtgagggcagcctctggcttgggcagggtctgtttggactgcagaagcaagggggtgatgtagcccatccttccctttggagatgctgagggtgtttcttcctgcacccacagccagggggatgccactcctccctccggcttgacctgtttctctgccgctacctccctccccgtctcattccgttgtctgtggatggtcattgcagtttaagagcagaacagatcttttactttggccgcttgaaaagctagtgtacctcctctcagtgttttggactccatctctcatcctccagtaccttgcttcttactgataattttgctggaattcctaacttttcaatgacattttttttaactactatattgattgtcctttaaaaaagaaaagtgcatatttatccaaaatgtgtatttcttatacgcttttctttgttataccatttcctcagcttatctcttttatatttgtaggagaaactcccatgtatggaatcccactgtatgatttataaacagacaatatgtgagtgccttttgcagaagagggtgtgtttgaaatcatcggagtcagccaggagctgtcaccaaggaaacgctacctctctgtcccttgctgtatgctgatcatcgccagaggtgcttcaccctgagttttgttttgtattgttttctgacagtttttctgttttgtttggcaaggaaaggggagaagggaatcctcctccagggtgattttatgatcagtgttgttgctctaggaagacatttttccgtttgcttttgttccaatgtcaatgtgaacgtccacatgaaacctacacactgtcatgcttcatcattccctctcatctcaggtagaaggttgacacagttgtagggttacagagacctatgtaagaattcagaagacccctgactcatcatttgtggcagtcccttataattggtgcatagcagatggtttccacatttagatcctggtttcataacttcctgtacttgaagtctaaaagcagaaaataaaggaagcaagttttcttccatgattttaaattgtgatcgagttttaaattgataggagggaacatgtcctaattcttctgtcctgagaagcatgtaatgttaatgttatatcatatgtatatatatatatgcactatgtatatacatatatattaatactggtatttttacttaatctataaaatgtcgttaaaaagttgtttgtttttttctttttttataaataaactgttgctcgtt

SEQ ID NO: 1318 - DNA, 6012 bp, Homo sapiens
  source 1..6012: mol_type = genomic DNA
aaaaggcggcaaggagccgagaggctgcttcggagtgtgaggaggacagccggaccgagccaacgccggggactttgttccctccgcggaggggactcggcaactcgcagcggcagggtctggggccggcgcctgggagggatctgcgccccccactcactccctagctgtgttcccgccgccgccccggctagtctccggcgctggcgcctatggtcggcctccgacagcgctccggagggaccgggggagctcccaggcgcccgggactggagactgatgcatgagggggctacggaggcgcaggagcggtggtgatggtctgggaagcggagctgaagtgccctgggctttggtgaggcgtgacagtttatcatgaccgtgttcaggcaggaaaacgtggatgattactacgacaccggcgaggaacttggcagtggacagtttgcggttgtgaagaaatgccgtgagaaaagcaccggcctccagtatgccgccaaattcatcaagaaaaggaggactaagtccagccggcggggtgtgagccgcgaggacatcgagcgggaggtcagcatcctgaaggagatccagcaccccaatgtcatcaccctgcacgaggtctatgagaacaagacggacgtcatcctgatcttggaactcgttgcaggtggcgagctgtttgacttcttagctgaaaaggaatctttaactgaagaggaagcaactgaatttctcaaacaaattcttaatggtgtttactacctgcactcccttcaaatcgcccactttgatcttaagcctgagaacataatgcttttggatagaaatgtccccaaacctcggatcaagatcattgactttgggttggcccataaaattgactttggaaatgaatttaaaaacatatttgggactccagagtttgtcgctcctgagatagtcaactatgaacctcttggtcttgaggcagatatgtggagtatcggggtaataacctatatcctcctaagtggggcctccccatttcttggagacactaagcaagaaacgttagcaaatgtatccgctgtcaactacgaatttgaggatgaatacttcagtaataccagtgccctagccaaagatttcataagaagacttctggtcaaggatccaaagaagagaatgacaattcaagatagtttgcagcatccctggatcaagcctaaagatacacaacaggcacttagtagaaaagcatcagcagtaaacatggagaaattcaagaagtttgcagcccggaaaaaatggaaacaatccgttcgcttgatatcactgtgccaaagattatccaggtcattcctgtccagaagtaacatgagtgttgccagaagcgatgatactctggatgaggaagactcctttgtgatgaaagccatcatccatgccatcaacgatgacaatgtcccaggcctgcagcaccttctgggctcattatccaactatgatgttaaccaacccaacaagcacgggacacctccattactcattgctgctggctgtgggaatattcaaatactacagttgctcattaaaagaggctcgagaatcgatgtccaggataagggcgggtccaatgccgtctactgggctgctcggcatggccacgtcgataccttgaaatttctcagtgagaacaaatgccctttggatgtgaaagacaagtctggagagatggccctccacgtggcagctcgctatggccatgctgacgtggctcagttactgtgcagcttcggctcaaatcccaatatccaggacaaggaagaagaaacccccctgcactgtgctgcttggcacggctattactctgtggccaaagccctttgtgaagccggctgtaacgtgaacatcaagaaccgagaaggagagacgcccctcctgacagcctctgccaggggctaccacgacatcgtggagtgtctggccgaacatggagccgaccttaatgcttgcgacaaggacggacacattgcccttcatctggctgtaagacggtgtcagatggaggtaatcaagactctcctcagccaagggtgtttcgtcgattatcaagacaggcacggcaatactcccctccatgtggcatgtaaagatggcaacatgcctatcgtggtggccctctgtgaagcaaactgcaatttggacatctccaacaagtatgggcgaacgcctctgcaccttgcggccaacaacggaatcctagacgtggtccggtatctctgtctgatgggagccagcgttgaggcgctgaccacggacggaaagacggcagaagatcttgctagatcggaacagcacgagcacgtagcaggtctccttgcaagacttcgaaaggatacgcaccgaggactcttcatccagcagctccgacccacacagaacctgcagccaagaattaagctcaagctgtttggccactcgggatccgggaaaaccacccttgtagaatctctcaagtgtgggctgctgaggagctttttcagaaggcgtcggcccagactgtcttccaccaactccagcaggttcccaccttcacccctggcttctaagcccacagtctcagtgagcatcaacaacctgtacccaggctgcgagaacgtgagtgtgaggagccgcagcatgatgttcgagccgggtcttaccaaagggatgctggaggtgtttgtggccccgacccaccacccgcactgctcggccgatgaccagtccaccaaggccatcgacatccagaacgcttatttgaatggagttggcgatttcagcgtgtgggagttctctggaaatcctgtgtatttctgctgttatgactattttgctgcaaatgatcccacgtcaatccatgttgttgtctttagtctagaagagccctatgagatccagctgaaccaagtgattttctggctcagtttcctgaagtcccttgtcccagttgaagaacccatagccttcggtggcaagctgaagaacccactccaagttgtcctggtggccacccacgctgacatcatgaatgttcctcgaccggctggaggcgagtttggatatgacaaagacacatcgttgctgaaagagattaggaacaggtttggaaatgatcttcacatttcaaataagctgtttgttctggatgctggggcttctgggtcaaaggacatgaaggtacttcgaaatcatctgcaagaaatacgaagccagattgtttcgaaaaccctgcccttcacaccagatatcctcgttggggtcccactgtggcatcatcagaagatagggggtagtccggtctgtcctcccatgactcacctgtgtgagaaaatcatctccacgctgccttcctggaggaagctcaatggacccaaccagctgatgtcgctgcagcagtttgtgtacgacgtgcaggaccagctgaaccccctggccagcgaggaggacctcaggcgcattgctcagcagctccacagcacaggcgagatcaacatcatgcaaagtgaaacagttcaggacgtgctgctcctggacccccgctggctctgcacaaacgtcctggggaagttgctgtccgtggagaccccacgggcgctgcaccactaccggggccgctacaccgtggaggacatccagcgcctggtgcccgacagcgacgtggaggagctgctgcagatcctcgatgccatggacatctgcgcccgggacctgagcagcgggaccatggtggacgtcccagccctgatcaagacagacaacctgcaccgctcctgggctgatgaggaggacgaggtgatggtgtatggtggcgtgcgcatcgtgcccgtggaacacctcacccccttcccatgtggcatctttcacaaggtccaggtgaacctgtgccggtggatccaccagcaaagcacagagggcgacgcggacatccgcctgtgggtgaatggctgcaagctggccaaccgtggggccgagctgctggtgctgctggtcaaccacggccagggcattgaggtccaggtccgcggcctggagacggagaagatcaagtgctgcctgctgctggactcggtgtgcagcaccattgagaacgtcatggccaccacgctgccagggctcctgaccgtgaagcattacctgagcccccagcagctgcgggagcaccatgagcccgtcatgatctaccagccacgggacttcttccgggcacagactctgaaggaaacctcactgaccaacaccatgggggggtacaaggaaagcttcagcagcatcatgtgcttcgggtgtcacgacgtctactcacaggccagcctcggcatggacatccatgcatcagacctgaacctcctcactcggaggaaactgagtcgcctgctggacccgcccgaccccctggggaaggactggtgccttctcgccatgaacttaggcctccctgacctcgtggcaaagtacaacaccagtaacggggctcccaaggatttcctccccagccccctccacgccctgctgcgggaatggaccacctaccctgagagcacagtgggcaccctcatgtccaaactgagggagctgggtcgccgggatgccgcagactttttgctgaaggcatcctctgtgttcaaaatcaacctggatggcaatggccaggaggcctatgcctcgagctgcaacagcggcacctcttacaattccattagctctgttgtatcccggtgagggcagcctctggcttgggcagggtctgtttggactgcagaagcaagggggtgatgtagcccatccttccctttggagatgctgagggtgtttcttcctgcacccacagccagggggatgccactcctccctccggcttgacctgtttctctgccgctacctccctccccgtctcattccgttgtctgtggatggtcattgcagtttaagagcagaacagatcttttactttggccgcttgaaaagctagtgtacctcctctcagtgttttggactccatctctcatcctccagtaccttgcttcttactgataattttgctggaattcctaacttttcaatgacattttttttaactactatattgattgtcctttaaaaaagaaaagtgcatatttatccaaaatgtgtatttcttatacgcttttctttgttataccatttcctcagcttatctcttttatatttgtaggagaaactcccatgtatggaatcccactgtatgatttataaacagacaatatgtgagtgccttttgcagaagagggtgtgtttgaaatcatcggagtcagccaggagctgtcaccaaggaaacgctacctctctgtcccttgctgtatgctgatcatcgccagaggtgcttcaccctgagttttgttttgtattgttttctgacagtttttctgttttgtttggcaaggaaaggggagaagggaatcctcctccagggtgattttatgatcagtgttgttgctctaggaagacatttttccgtttgcttttgttccaatgtcaatgtgaacgtccacatgaaacctacacactgtcatgcttcatcattccctctcatctcaggtagaaggttgacacagttgtagggttacagagacctatgtaagaattcagaagacccctgactcatcatttgtggcagtcccttataattggtgcatagcagatggtttccacatttagatcctggtttcataacttcctgtacttgaagtctaaaagcagaaaataaaggaagcaagttttcttccatgattttaaattgtgatcgagttttaaattgataggagggaacatgtcctaattcttctgtcctgagaagcatgtaatgttaatgttatatcatatgtatatatatatatgcactatgtatatacatatatattaatactggtatttttacttaatctataaaatgtcgttaaaaagttgtttgtttttttctttttttataaataaactgttgctcgttgcatt

SEQ ID NO: 1319 - DNA, 5759 bp, Homo sapiens
  source 1..5759: mol_type = genomic DNA
agagcgcgccagcgagcccggagcgcggagctgggaggagcagcgagcgccgcgcagaacccgcagcgccggcctggcagggcagctcggaggactggagactgatgcatgagggggctacggaggcgcaggagcggtggtgatggtctgggaagcggagctgaagtgccctgggctttggtgaggcgtgacagtttatcatgaccgtgttcaggcaggaaaacgtggatgattactacgacaccggcgaggaacttggcagtggacagtttgcggttgtgaagaaatgccgtgagaaaagcaccggcctccagtatgccgccaaattcatcaagaaaaggaggactaagtccagccggcggggtgtgagccgcgaggacatcgagcgggaggtcagcatcctgaaggagatccagcaccccaatgtcatcaccctgcacgaggtctatgagaacaagacggacgtcatcctgatcttggaactcgttgcaggtggcgagctgtttgacttcttagctgaaaaggaatctttaactgaagaggaagcaactgaatttctcaaacaaattcttaatggtgtttactacctgcactcccttcaaatcgcccactttgatcttaagcctgagaacataatgcttttggatagaaatgtccccaaacctcggatcaagatcattgactttgggttggcccataaaattgactttggaaatgaatttaaaaacatatttgggactccagagtttgtcgctcctgagatagtcaactatgaacctcttggtcttgaggcagatatgtggagtatcggggtaataacctatatcctcctaagtggggcctccccatttcttggagacactaagcaagaaacgttagcaaatgtatccgctgtcaactacgaatttgaggatgaatacttcagtaataccagtgccctagccaaagatttcataagaagacttctggtcaaggatccaaagaagagaatgacaattcaagatagtttgcagcatccctggatcaagcctaaagatacacaacaggcacttagtagaaaagcatcagcagtaaacatggagaaattcaagaagtttgcagcccggaaaaaatggaaacaatccgttcgcttgatatcactgtgccaaagattatccaggtcattcctgtccagaagtaacatgagtgttgccagaagcgatgatactctggatgaggaagactcctttgtgatgaaagccatcatccatgccatcaacgatgacaatgtcccaggcctgcagcaccttctgggctcattatccaactatgatgttaaccaacccaacaagcacgggacacctccattactcattgctgctggctgtgggaatattcaaatactacagttgctcattaaaagaggctcgagaatcgatgtccaggataagggcgggtccaatgccgtctactgggctgctcggcatggccacgtcgataccttgaaatttctcagtgagaacaaatgccctttggatgtgaaagacaagtctggagagatggccctccacgtggcagctcgctatggccatgctgacgtggctcagttactgtgcagcttcggctcaaatcccaatatccaggacaaggaagaagaaacccccctgcactgtgctgcttggcacggctattactctgtggccaaagccctttgtgaagccggctgtaacgtgaacatcaagaaccgagaaggagagacgcccctcctgacagcctctgccaggggctaccacgacatcgtggagtgtctggccgaacatggagccgaccttaatgcttgcgacaaggacggacacattgcccttcatctggctgtaagacggtgtcagatggaggtaatcaagactctcctcagccaagggtgtttcgtcgattatcaagacaggcacggcaatactcccctccatgtggcatgtaaagatggcaacatgcctatcgtggtggccctctgtgaagcaaactgcaatttggacatctccaacaagtatgggcgaacgcctctgcaccttgcggccaacaacggaatcctagacgtggtccggtatctctgtctgatgggagccagcgttgaggcgctgaccacggacggaaagacggcagaagatcttgctagatcggaacagcacgagcacgtagcaggtctccttgcaagacttcgaaaggatacgcaccgaggactcttcatccagcagctccgacccacacagaacctgcagccaagaattaagctcaagctgtttggccactcgggatccgggaaaaccacccttgtagaatctctcaagtgtgggctgctgaggagctttttcagaaggcgtcggcccagactgtcttccaccaactccagcaggttcccaccttcacccctggcttctaagcccacagtctcagtgagcatcaacaacctgtacccaggctgcgagaacgtgagtgtgaggagccgcagcatgatgttcgagccgggtcttaccaaagggatgctggaggtgtttgtggccccgacccaccacccgcactgctcggccgatgaccagtccaccaaggccatcgacatccagaacgcttatttgaatggagttggcgatttcagcgtgtgggagttctctggaaatcctgtgtatttctgctgttatgactattttgctgcaaatgatcccacgtcaatccatgttgttgtctttagtctagaagagccctatgagatccagctgaaccaagtgattttctggctcagtttcctgaagtcccttgtcccagttgaagaacccatagccttcggtggcaagctgaagaacccactccaagttgtcctggtggccacccacgctgacatcatgaatgttcctcgaccggctggaggcgagtttggatatgacaaagacacatcgttgctgaaagagattaggaacaggtttggaaatgatcttcacatttcaaataagctgtttgttctggatgctggggcttctgggtcaaaggacatgaaggtacttcgaaatcatctgcaagaaatacgaagccagattgtttcggtctgtcctcccatgactcacctgtgtgagaaaatcatctccacgctgccttcctggaggaagctcaatggacccaaccagctgatgtcgctgcagcagtttgtgtacgacgtgcaggaccagctgaaccccctggccagcgaggaggacctcaggcgcattgctcagcagctccacagcacaggcgagatcaacatcatgcaaagtgaaacagttcaggacgtgctgctcctggacccccgctggctctgcacaaacgtcctggggaagttgctgtccgtggagaccccacgggcgctgcaccactaccggggccgctacaccgtggaggacatccagcgcctggtgcccgacagcgacgtggaggagctgctgcagatcctcgatgccatggacatctgcgcccgggacctgagcagcgggaccatggtggacgtcccagccctgatcaagacagacaacctgcaccgctcctgggctgatgaggaggacgaggtgatggtgtatggtggcgtgcgcatcgtgcccgtggaacacctcacccccttcccatgtggcatctttcacaaggtccaggtgaacctgtgccggtggatccaccagcaaagcacagagggcgacgcggacatccgcctgtgggtgaatggctgcaagctggccaaccgtggggccgagctgctggtgctgctggtcaaccacggccagggcattgaggtccaggtccgcggcctggagacggagaagatcaagtgctgcctgctgctggactcggtgtgcagcaccattgagaacgtcatggccaccacgctgccagggctcctgaccgtgaagcattacctgagcccccagcagctgcgggagcaccatgagcccgtcatgatctaccagccacgggacttcttccgggcacagactctgaaggaaacctcactgaccaacaccatgggggggtacaaggaaagcttcagcagcatcatgtgcttcgggtgtcacgacgtctactcacaggccagcctcggcatggacatccatgcatcagacctgaacctcctcactcggaggaaactgagtcgcctgctggacccgcccgaccccctggggaaggactggtgccttctcgccatgaacttaggcctccctgacctcgtggcaaagtacaacaccagtaacggggctcccaaggatttcctccccagccccctccacgccctgctgcgggaatggaccacctaccctgagagcacagtgggcaccctcatgtccaaactgagggagctgggtcgccgggatgccgcagactttttgctgaaggcatcctctgtgttcaaaatcaacctggatggcaatggccaggaggcctatgcctcgagctgcaacagcggcacctcttacaattccattagctctgttgtatcccggtgagggcagcctctggcttgggcagggtctgtttggactgcagaagcaagggggtgatgtagcccatccttccctttggagatgctgagggtgtttcttcctgcacccacagccagggggatgccactcctccctccggcttgacctgtttctctgccgctacctccctccccgtctcattccgttgtctgtggatggtcattgcagtttaagagcagaacagatcttttactttggccgcttgaaaagctagtgtacctcctctcagtgttttggactccatctctcatcctccagtaccttgcttcttactgataattttgctggaattcctaacttttcaatgacattttttttaactactatattgattgtcctttaaaaaagaaaagtgcatatttatccaaaatgtgtatttcttatacgcttttctttgttataccatttcctcagcttatctcttttatatttgtaggagaaactcccatgtatggaatcccactgtatgatttataaacagacaatatgtgagtgccttttgcagaagagggtgtgtttgaaatcatcggagtcagccaggagctgtcaccaaggaaacgctacctctctgtcccttgctgtatgctgatcatcgccagaggtgcttcaccctgagttttgttttgtattgttttctgacagtttttctgttttgtttggcaaggaaaggggagaagggaatcctcctccagggtgattttatgatcagtgttgttgctctaggaagacatttttccgtttgcttttgttccaatgtcaatgtgaacgtccacatgaaacctacacactgtcatgcttcatcattccctctcatctcaggtagaaggttgacacagttgtagggttacagagacctatgtaagaattcagaagacccctgactcatcatttgtggcagtcccttataattggtgcatagcagatggtttccacatttagatcctggtttcataacttcctgtacttgaagtctaaaagcagaaaataaaggaagcaagttttcttccatgattttaaattgtgatcgagttttaaattgataggagggaacatgtcctaattcttctgtcctgagaagcatgtaatgttaatgttatatcatatgtatatatatatatgcactatgtatatacatatatattaatactggtatttttacttaatctataaaatgtcgttaaaaagttgtttgtttttttctttttttataaataaactgttgctcgttgc

SEQ ID NO: 1320 - DNA, 4186 bp, Homo sapiens
  source 1..4186: mol_type = genomic DNA
gcaggagcggtggtgatggtctgggaagcggagctgaagtgccctgggctttggtgaggcgtgacagtttatcatgaccgtgttcaggcaggaaaacgtggatgattactacgacaccggcgaggaacttggcagtggacagtttgcggttgtgaagaaatgccgtgagaaaagcaccggcctccagtatgccgccaaattcatcaagaaaaggaggactaagtccagccggcggggtgtgagccgcgaggacatcgagcgggaggtcagcatcctgaaggagatccagcaccccaatgtcatcaccctgcacgaggtctatgagaacaagacggacgtcatcctgatcttggaactcgttgcaggtggcgagctgtttgacttcttagctgaaaaggaatctttaactgaagaggaagcaactgaatttctcaaacaaattcttaatggtgtttactacctgcactcccttcaaatcgcccactttgatcttaagcctgagaacataatgcttttggatagaaatgtccccaaacctcggatcaagatcattgactttgggttggcccataaaattgactttggaaatgaatttaaaaacatatttgggactccagagtttgtcgctcctgagatagtcaactatgaacctcttggtcttgaggcagatatgtggagtatcggggtaataacctatatcctcctaagtggggcctccccatttcttggagacactaagcaagaaacgttagcaaatgtatccgctgtcaactacgaatttgaggatgaatacttcagtaataccagtgccctagccaaagatttcataagaagacttctggtcaaggatccaaagaagagaatgacaattcaagatagtttgcagcatccctggatcaagcctaaagatacacaacaggcacttagtagaaaagcatcagcagtaaacatggagaaattcaagaagtttgcagcccggaaaaaatggaaacaatccgttcgcttgatatcactgtgccaaagattatccaggtcattcctgtccagaagtaacatgagtgttgccagaagcgatgatactctggatgaggaagactcctttgtgatgaaagccatcatccatgccatcaacgatgacaatgtcccaggcctgcagcaccttctgggctcattatccaactatgatgttaaccaacccaacaagcacgggacacctccattactcattgctgctggctgtgggaatattcaaatactacagttgctcattaaaagaggctcgagaatcgatgtccaggataagggcgggtccaatgccgtctactgggctgctcggcatggccacgtcgataccttgaaatttctcagtgagaacaaatgccctttggatgtgaaagacaagtctggagagatggccctccacgtggcagctcgctatggccatgctgacgtggctcagttactgtgcagcttcggctcaaatcccaatatccaggacaaggaagaagaaacccccctgcactgtgctgcttggcacggctattactctgtggccaaagccctttgtgaagccggctgtaacgtgaacatcaagaaccgagaaggagagacgcccctcctgacagcctctgccaggggctaccacgacatcgtggagtgtctggccgaacatggagccgaccttaatgcttgcgacaaggacggacacattgcccttcatctggctgtaagacggtgtcagatggaggtaatcaagactctcctcagccaagggtgtttcgtcgattatcaagacaggcacggcaatactcccctccatgtggcatgtaaagatggcaacatgcctatcgtggtggccctctgtgaagcaaactgcaatttggacatctccaacaagtatgggcgaacgcctctgcaccttgcggccaacaacggaatcctagacgtggtccggtatctctgtctgatgggagccagcgttgaggcgctgaccacggacggaaagacggcagaagatcttgctagatcggaacagcacgagcacgtagcaggtctccttgcaagacttcgaaaggatacgcaccgaggactcttcatccagcagctccgacccacacagaacctgcagccaagaattaagctcaagctgtttggccactcgggatccgggaaaaccacccttgtagaatctctcaagtgtgggctgctgaggagctttttcagaaggcgtcggcccagactgtcttccaccaactccagcaggttcccaccttcacccctggcttctaagcccacagtctcagtgagcatcaacaacctgtacccaggctgcgagaacgtgagtgtgaggagccgcagcatgatgttcgagccgggtcttaccaaagggatgctggaggtgtttgtggccccgacccaccacccgcactgctcggccgatgaccagtccaccaaggccatcgacatccagaacgcttatttgaatgccttcggtggcaagctgaagaacccactccaagttgtcctggtggccacccacgctgacatcatgaatgttcctcgaccggctggaggcgagtttggatatgacaaagacacatcgttgctgaaagagattaggaacaggtttggaaatgatcttcacatttcaaataagctgtttgttctggatgctggggcttctgggtcaaaggacatgaaggtacttcgaaatcatctgcaagaaatacgaagccagattgtttcggtctgtcctcccatgactcacctgtgtgagaaaatcatctccacgctgccttcctggaggaagctcaatggacccaaccagctgatgtcgctgcagcagtttgtgtacgacgtgcaggaccagctgaaccccctggccagcgaggaggacctcaggcgcattgctcagcagctccacagcacaggcgagatcaacatcatgcaaagtgaaacagttcaggacgtgctgctcctggacccccgctggctctgcacaaacgtcctggggaagttgctgtccgtggagaccccacgggcgctgcaccactaccggggccgctacaccgtggaggacatccagcgcctggtgcccgacagcgacgtggaggagctgctgcagatcctcgatgccatggacatctgcgcccgggacctgagcagcgggaccatggtggacgtcccagccctgatcaagacagacaacctgcaccgctcctgggctgatgaggaggacgaggtgatggtgtatggtggcgtgcgcatcgtgcccgtggaacacctcacccccttcccatgtggcatctttcacaaggtccaggtgaacctgtgccggtggatccaccagcaaagcacagagggcgacgcggacatccgcctgtgggtgaatggctgcaagctggccaaccgtggggccgagctgctggtgctgctggtcaaccacggccagggcattgaggtccaggtccgcggcctggagacggagaagatcaagtgctgcctgctgctggactcggtgtgcagcaccattgagaacgtcatggccaccacgctgccagggctcctgaccgtgaagcattacctgagcccccagcagctgcgggagcaccatgagcccgtcatgatctaccagccacgggacttcttccgggcacagactctgaaggaaacctcactgaccaacaccatgggggggtacaaggaaagcttcagcagcatcatgtgcttcgggtgtcacgacgtctactcacaggccagcctcggcatggacatccatgcatcagacctgaacctcctcactcggaggaaactgagtcgcctgctggacccgcccgaccccctggggaaggactggtgccttctcgccatgaacttaggcctccctgacctcgtggcaaagtacaacaccagtaacggggctcccaaggatttcctccccagccccctccacgccctgctgcgggaatggaccacctaccctgagagcacagtgggcaccctcatgtccaaactgagggagctgggtcgccgggatgccgcagactttttgctgaaggcatcctctgtgttcaaaatcaacctggatggcaatggccaggaggcctatgcctcgagctgcaacagcggcacctcttacaattccattagctctgttgtatcccggtgagggcagcctctggcttgg

SEQ ID NO: 1321 - DNA, 2606 bp, Homo sapiens
  source 1..2606: mol_type = genomic DNA
atatggcggcgcttagttgcatgaaggcggaaactctgtgacttccggtccgtagtggggcctgcggtgggagtgggaaggaaggcggagggaaccatgcgaggttctgagaattgcggcgagggtcgcctcgagagacggtttctgaggaattctgaaatccccaccacttcctccctccgggggatttgatcccctatggccaccgctaacagcatcatcgtgctggatgatgatgacgaagatgaagcagctgctcagccagggccctcccacccactccccaatgcggcctcacctggggcagaagcccctagctcctctgagcctcatggggccagaggaagcagtagttcgggcggcaagaaatgctacaagctggagaatgagaagctgttcgaagagttccttgaactttgtaagatgcagacagcagaccaccctgaggtggtcccattcctctataaccggcagcaacgtgcccactctctgtttttggcctcggcggagttctgcaacatcctctctagggtcctgtctcgggcccggagccggccagccaagctctatgtctacatcaatgagctctgcactgttctcaaggcccactcagccaaaaagaagctgaacttggcccctgccgccaccacctccaatgagccctctgggaataaccctcccacacacctctccttggaccccacaaatgctgaaaacactgcctctcagtctccaaggacccgtggttcccggcggcagatccagcgtttggagcagctgctggcgctctatgtggcagagatccggcggctgcaggaaaaggagttggatctctcagaattggatgacccagactccgcatacctgcaggaggcacggttgaagcgtaagctgatccgcctctttgggcgactatgtgagctgaaagactgctcttcactgaccggccgtgtcatagagcagcgcatcccctaccgtggcacccgctacccagaggttaacaggcgcattgagcggctcatcaacaagccagggcctgataccttccctgactatggggatgtgcttcgggctgtagagaaggcagctgcccgacacagccttggcctcccccgacagcagctccagctcatggctcaggatgccttccgagatgtgggcatcaggttacaggagcgacgtcacctcgatctcatctacaactttggctgccacctcacagatgactataggccaggcgttgaccctgcactatcagatcctgtgttggcccggcgccttcgggaaaaccggagtttggccatgagtcggctggatgaggtcatctccaaatatgcaatgttgcaagacaaaagtgaggagggcgagagaaaaaagagaagagctcggctccaaggcacctcttcccactctgcagacacccccgaagcctccttggattctggtgagggccctagtggaatggcatcccaggggtgcccttctgcctccagagctgagacagatgacgaagacgatgaggagagtgatgaggaagaggaggaggaggaggaagaagaagaggaggaggccacagattctgaagaggaggaggatctggaacagatgcaggagggtcaggaggatgatgaagaggaggacgaagaggaagaagcagcagcaggtaaagatggagacaagagccccatgtcctcactacagatctccaatgaaaagaacctggaacctggcaaacagatcagcagatcttcaggggagcagcaaaacaaaggacgcatagtgtcaccatcgttactgtcagaagaacccctggccccctccagcatagatgctgaaagcaatggagaacagcctgaggagctgaccctggaggaagaaagccctgtgtctcagctctttgagctagagattgaagctttgcccctggataccccttcctctgtggagacggacatttcctcttccaggaagcaatcagaggagcccttcaccactgtcttagagaatggagcaggcatggtctcttctacttccttcaatggaggcgtctctcctcacaactggggagattctggtcccccctgcaaaaaatctcggaaggagaagaagcaaacaggatcagggccattaggaaacagctatgtggaaaggcaaaggtcagtgcatgagaagaatgggaaaaagatatgtaccctgcccagcccaccttcccccttggcttccttggccccagttgctgattcctccacgagggtggactctcccagccatggcctggtgaccagctccctctgcatcccttctccagcccggctgtcccaaaccccccattcacagcctcctcggcctggtacttgcaagacaagtgtggccacacaatgcgatccagaagagatcatcgtgctctcagactctgattagctgcctccccttctccctgcctccagaatgttctgggataacatttggaggaaggtgggaagcagatgactgaggaagggatggactaagctaatccccttttggtggtgtttctttaaaaaaaaaaaaaagcttaagttttacacagaaacattaataaacaataaagttcttttcttactgta

SEQ ID NO: 1322 - DNA, 2613 bp, Homo sapiens
  source 1..2613: mol_type = genomic DNA
gacaatatggcggcgcttagttgcatgaaggcggaaactctgtgacttccggtccgtagtggggcctgcggtgggagtgggaaggaaggcggagggaaccatgcgaggttctgagaattgcggcgagggtcgcctcgagagacggtttctgagcaggaattctgaaatccccaccacttcctccctccgggggatttgatcccctatggccaccgctaacagcatcatcgtgctggatgatgatgacgaagatgaagcagctgctcagccagggccctcccacccactccccaatgcggcctcacctggggcagaagcccctagctcctctgagcctcatggggccagaggaagcagtagttcgggcggcaagaaatgctacaagctggagaatgagaagctgttcgaagagttccttgaactttgtaagatgcagacagcagaccaccctgaggtggtcccattcctctataaccggcagcaacgtgcccactctctgtttttggcctcggcggagttctgcaacatcctctctagggtcctgtctcgggcccggagccggccagccaagctctatgtctacatcaatgagctctgcactgttctcaaggcccactcagccaaaaagaagctgaacttggcccctgccgccaccacctccaatgagccctctgggaataaccctcccacacacctctccttggaccccacaaatgctgaaaacactgcctctcagtctccaaggacccgtggttcccggcggcagatccagcgtttggagcagctgctggcgctctatgtggcagagatccggcggctgcaggaaaaggagttggatctctcagaattggatgacccagactccgcatacctgcaggaggcacggttgaagcgtaagctgatccgcctctttgggcgactatgtgagctgaaagactgctcttcactgaccggccgtgtcatagagcagcgcatcccctaccgtggcacccgctacccagaggttaacaggcgcattgagcggctcatcaacaagccagggcctgataccttccctgactatggggatgtgcttcgggctgtagagaaggcagctgcccgacacagccttggcctcccccgacagcagctccagctcatggctcaggatgccttccgagatgtgggcatcaggttacaggagcgacgtcacctcgatctcatctacaactttggctgccacctcacagatgactataggccaggcgttgaccctgcactatcagatcctgtgttggcccggcgccttcgggaaaaccggagtttggccatgagtcggctggatgaggtcatctccaaatatgcaatgttgcaagacaaaagtgaggagggcgagagaaaaaagagaagagctcggctccaaggcacctcttcccactctgcagacacccccgaagcctccttggattctggtgagggccctagtggaatggcatcccaggggtgcccttctgcctccagagctgagacagatgacgaagacgatgaggagagtgatgaggaagaggaggaggaggaggaagaagaagaggaggaggccacagattctgaagaggaggaggatctggaacagatgcaggagggtcaggaggatgatgaagaggaggacgaagaggaagaagcagcagcaggtaaagatggagacaagagccccatgtcctcactacagatctccaatgaaaagaacctggaacctggcaaacagatcagcagatcttcaggggagcagcaaaacaaaggacgcatagtgtcaccatcgttactgtcagaagaacccctggccccctccagcatagatgctgaaagcaatggagaacagcctgaggagctgaccctggaggaagaaagccctgtgtctcagctctttgagctagagattgaagctttgcccctggataccccttcctctgtggagacggacatttcctcttccaggaagcaatcagaggagcccttcaccactgtcttagagaatggagcaggcatggtctcttctacttccttcaatggaggcgtctctcctcacaactggggagattctggtcccccctgcaaaaaatctcggaaggagaagaagcaaacaggatcagggccattaggaaacagctatgtggaaaggcaaaggtcagtgcatgagaagaatgggaaaaagatatgtaccctgcccagcccaccttcccccttggcttccttggccccagttgctgattcctccacgagggtggactctcccagccatggcctggtgaccagctccctctgcatcccttctccagcccggctgtcccaaaccccccattcacagcctcctcggcctggtacttgcaagacaagtgtggccacacaatgcgatccagaagagatcatcgtgctctcagactctgattagctgcctccccttctccctgcctccagaatgttctgggataacatttggaggaaggtgggaagcagatgactgaggaagggatggactaagctaatccccttttggtggtgtttctttaaaaaaaaaaaaaagcttaagttttacacagaaacattaataaacaataaagttcttttcttactgta

SEQ ID NO: 1323 - DNA, 2152 bp, Homo sapiens
  source 1..2152: mol_type = genomic DNA
gtgacttccggtccgtagtggggcctgcggtgggagtgggaaggaaggcggagggaaccatgcgaggttctgagaattgcggcgagggtcgcctcgagagacggtttctgagttccttgaactttgtaagatgcagacagcagaccaccctgaggtggtcccattcctctataaccggcagcaacgtgcccactctctgtttttggcctcggcggagttctgcaacatcctctctagggtcctgtctcgggcccggagccggccagccaagctctatgtctacatcaatgagctctgcactgttctcaaggcccactcagccaaaaagaagctgaacttggcccctgccgccaccacctccaatgagccctctgggaataaccctcccacacacctctccttggaccccacaaatgctgaaaacactgcctctcagtctccaaggacccgtggttcccggcggcagatccagcgtttggagcagctgctggcgctctatgtggcagagatccggcggctgcaggaaaaggagttggatctctcagaattggatgacccagactccgcatacctgcaggaggcacggttgaagcgtaagctgatccgcctctttgggcgactatgtgagctgaaagactgctcttcactgaccggccgtgtcatagagcagcgcatcccctaccgtggcacccgctacccagaggttaacaggcgcattgagcggctcatcaacaagccagggcctgataccttccctgactatggggatgtgcttcgggctgtagagaaggcagctgcccgacacagccttggcctcccccgacagcagctccagctcatggctcaggatgccttccgagatgtgggcatcaggttacaggagcgacgtcacctcgatctcatctacaactttggctgccacctcacagatgactataggccaggcgttgaccctgcactatcagatcctgtgttggcccggcgccttcgggaaaaccggagtttggccatgagtcggctggatgaggtcatctccaaatatgcaatgttgcaagacaaaagtgaggagggcgagagaaaaaagagaagagctcggctccaaggcacctcttcccactctgcagacacccccgaagcctccttggattctggtgagggccctagtggaatggcatcccaggggtgcccttctgcctccagagctgagacagatgacgaagacgatgaggagagtgatgaggaagaggaggaggaggaggaagaagaagaggaggaggccacagattctgaagaggaggaggatctggaacagatgcaggagggtcaggaggatgatgaagaggaggacgaagaggaagaagcagcagcaggtaaagatggagacaagagccccatgtcctcactacagatctccaatgaaaagaacctggaacctggcaaacagatcagcagatcttcaggggagcagcaaaacaaaggacgcatagtgtcaccatcgttactgtcagaagaacccctggccccctccagcatagatgctgaaagcaatggagaacagcctgaggagctgaccctggaggaagaaagccctgtgtctcagctctttgagctagagattgaagctttgcccctggataccccttcctctgtggagacggacatttcctcttccaggaagcaatcagaggagcccttcaccactgtcttagagaatggagcaggcatggtctcttctacttccttcaatggaggcgtctctcctcacaactggggagattctggtcccccctgcaaaaaatctcggaaggagaagaagcaaacaggatcagggccattaggaaacagctatgtggaaaggcaaaggtcagtgcatgagaagaatgggaaaaagatatgtaccctgcccagcccaccttcccccttggcttccttggccccagttgctgattcctccacgagggtggactctcccagccatggcctggtgaccagctccctctgcatcccttctccagcccggctgtcccaaaccccccattcacagcctcctcggcctggtacttgcaagacaagtgtggccacacaatgcgatccagaagagatcatcgtgctctcagactctgattagctgcctccccttctccctgcctcc

SEQ ID NO: 1324 - DNA, 283 bp, Homo sapiens
  source 1..283: mol_type = genomic DNA
caggatggcagaggaaggtgatgtggacgaggcggatgtgttcctggcatttgcccagggtccctcccctcccaggggtcccgtgcgacgtgccttggacaaggctttctttatcttcctggccctcttcctgacactgctgatgctggaggctgcttataagctgctgtggttactactatgggcaaagttaggggactggctcctggggacacctcagaaggaggaggagctggaattgtgaccacctttcctataaacatcttctttccccaccaaggag

SEQ ID NO: 1325 - DNA, 250 bp, Homo sapiens
  source 1..250: mol_type = genomic DNA
ggatgtgttcctggcatttgcccagggtccctcccctcccaggggtcccgtgcgacgtgccttggacaaggctttctttatcttcctggccctcttcctgacactgctgatgctggaggctgcttataagctgctgtggttactactatgggcaaagttaggggactggctcctggggacacctcagaaggaggaggagctggaattgtgaccacctttcctataaacatcttctttccccaccaaggag

SEQ ID NO: 1326 - DNA, 702 bp, Homo sapiens
  source 1..702: mol_type = genomic DNA
ggtgggagtgggaaggaaggcggagggaaccatgcgaggttctgagaattgcggcgagggtcgcctcgagagacggtttctgaggggctcattctgaggccccatccccttccagcaggaattctgaaatccccaccacttcctccctccgggggatttgatcccctatggccaccgctaacagcatcatcgtgctggatgatgatgacgaagatgaagcagctgctcagccagggccctcccacccactccccaatgcggcctcacctggggcagaagcccctagctcctctgagcctcatggggccagaggaagcagtagttcgggcggcaagaaatgctacaagctggagaatgagaagctgttcgaagagttccttgaactttgtaagatgcagacagcagaccaccctgaggtggtcccattcctctataaccggcagcaacgtgcccactctctgtttttggcctcggcggagttctgcaacatcctctctagggtcctgtctcgggcccggagccggccagccaagctctatgtctacatcaatgagctctgcactgttctcaaggcccactcagccaaaaagaagctgaacttggcccctgccgccaccacctccaatgagccctctgggaataaccctcccacacacctctccttggaccccacaaatgctgaaaacactgcctctcagtctc

SEQ ID NO: 1327 - DNA, 371 bp, Homo sapiens
  source 1..371: mol_type = genomic DNA
ttggggagagctgggcgctgagtctgaggggaaagctgtggtaccttcctgtccctgaaagggagtggagcggccgggggctgaactgggggagggggatttggcgggaagcgcatctagcggaccggccggacccacggttgggatctaagaggaatcgcgagagcgtagcgcgcaggaattctgaaatccccaccacttcctccctccgggggatttgatcccctatggccaccgctaacagcatcatcgtgctggatgatgatgacgaagatgaagcagctgctcagccagggccctcccacccactccccaatgcggcctcacctggggcagaagcccctagctcctctgagcctcatggggccaga

SEQ ID NO: 1328 - DNA, 751 bp, Homo sapiens
  source 1..751: mol_type = genomic DNA
ggatgtgttcctggcatttgcccagggtccctcccctcccaggggtcccgtgcgacgtgccttggacaaggctttctttatcttcctggccctcttcctgacactgctgatgctggaggctgcttataagctgctgtggttactactatgggcaaagttaggggactggctcctggggacacctcagaaggaggaggagctggaattgtgaccacctttcctataaacatcttctttccccaccaaggagctcacctctggacccagccttgcctccacgagtccctccagcctccctaaacacaacgagcaggaattctgaaatccccaccacttcctccctccgggggatttgatcccctatggccaccgctaacagcatcatcgtgctggatgatgatgacgaagatgaagcagctgctcagccagggccctcccacccactccccaatgcggcctcacctggggcagaagcccctagctcctctgagcctcatggggccagaggaagcagtagttcgggcggcaagaaatgctacaagctggagaatgagaagctgttcgaagagttccttgaactttgtaagatgcagacagcagaccaccctgaggtggtcccattcctctataaccggcagcaacgtgcccactctctgtttttggcctcggcggagttctgcaacatcctctctagggtcctgtctcgggcccggagccggccagccaagctctatgtctacatcaatgagct

SEQ ID NO: 1329 - DNA, 2874 bp, Homo sapiens
  source 1..2874: mol_type = genomic DNA
ggagttccagtgatcaagtggaagaaagatggcattcatctggccttgggaatggatgaaaggaagcagcaactttcaaatgggtctctgctgatacaaaacatacttcattccagacaccacaagccagatgagggactttaccaatgtgaggcatctttaggagattctggctcaattattagtcggacagcaaaagttgcagtagcaggaccactgaggttcctttcacagacagaatctgtcacagccttcatgggagacacagtgctactcaagtgtgaagtcattggggagcccatgccaacaatccactggcagaagaaccaacaagacctgactccaatcccaggtgactcccgagtggtggtcttgccctctggagcattgcagatcagccgactccaaccgggggacattggaatttaccgatgctcagctcgaaatccagccagctcaagaacaggaaatgaagcagaagtcagaattttatcagatccaggactgcatagacagctgtattttctgcaaagaccatccaatgtagtagccattgaaggaaaagatgctgtcctggaatgttgtgtttctggctatcctccaccaagttttacctggttacgaggcgaggaagtcatccaactcaggtctaaaaagtattctttattgggtggaagcaacttgcttatctccaatgtgacagatgatgacagtggaatgtatacctgtgttgtcacatataaaaatgagaatattagtgcctctgcagagctcacagtcttggttccgccatggtttttaaatcatccttccaacctgtatgcctatgaaagcatggatattgagtttgaatgtacagtctctggaaagcctgtgcccactgtgaattggatgaagaatggagatgtggtcattcctagtgattattttcagatagtgggaggaagcaacttacggatacttggggtggtgaagtcagatgaaggcttttatcaatgtgtggctgaaaatgaggctggaaatgcccagaccagtgcacagctcattgtccctaagcctgctatcccaagctccagtgtcctcccttcggctcccagagatgtggtccctgtcttggtttccagccgatttgtccgtctcagctggcgcccacctgcagaagcgaaagggaacattcaaactttcacggtctttttctccagagaaggtgacaacagggaacgagcattgaatacaacacagcctgggtcccttcagctcactgtgggaaacctgaagccagaagccatgtacacctttcgagttgtggcttacaatgaatggggaccgggagagagttctcaacccatcaaggtggccacacagcctgagttgcaagttccagggccagtagaaaacctgcaagctgtatctacctcacctacctcaattcttattacctgggaaccccctgcctatgcaaacggtccagtccaaggttacagattgttctgcactgaggtgtccacaggaaaagaacagaatatagaggttgatggactatcttataaactggaaggcctgaaaaaattcaccgaatatagtcttcgattcttagcttataatcgctatggtccgggcgtctctactgatgatataacagtggttacactttctgacgtgccaagtgccccgcctcagaacgtctccctggaagtggtcaattcaagaagtatcaaagttagctggctgcctcctccatcaggaacacaaaatggatttattaccggctataaaattcgacacagaaagacgacccgcaggggtgagatggaaacactggagccaaacaacctctggtacctattcacaggactggagaaaggaagtcagtacagtttccaggtgtcagccatgacagtcaatggtactggaccaccttccaactggtatactgcagagactccagagaatgatctagatgaatctcaagttcctgatcaaccaagctctcttcatgtgaggccccagactaactgcatcatcatgagttggactcctcccttgaacccaaacatcgtggtgcgaggttatattatcggttatggcgttgggagcccttacgctgagacagtgcgtgtggacagcaagcagcgatattattccattgagaggttagagtcaagttcccattatgtaatctccctaaaagcttttaacaatgccggagaaggagttcctctttatgaaagtgccaccaccaggtctataaccgtcagaagacacaacatctctaagttacacagcaacaggcctcaaaccaaacacaatgtatgaattctcggtcatggtaacaaaaaacagaaggtccagtacttggagcatgactgcacatgccaccacgtatgaagcagcccccacctctgctcccaaggacttgacagtcattactagggaagggaagcctcgtgccgtcattgtgagttggcagcctcccttggaagccaatgggaaaattactgcttacatcttattttataccttggacaagaacatcccaattgatgactggattatggaaacaatcagtggtgataggcttactcatcaaatcatggatctcaaccttgatactatgtattactttcgaattcaagcacgaaattcaaaaggagtggggccactctctgatcctatcctcttcaggactctgaaagtggaacaccctgacaaaatggctaatgaccaagacactggcgtgacgattaatcttgttaatgaagttctgcttggctgaggctgcggctctgataaggaagatgtaaattttcttgagaggaaattgttttgtctccattctgaaggaccaattaaaatgtcaagcttctttgtatg

SEQ ID NO: 1330 - DNA, 3169 bp, Homo sapiens
  source 1..3169: mol_type = genomic DNA
gttccagtgatcaagtggaagaaagatggcattcatctggccttgggaatggatgaaaggaagcagcaactttcaaatgggtctctgctgatacaaaacatacttcattccagacaccacaagccagatgagggactttaccaatgtgaggcatctttaggagattctggctcaattattagtcggacagcaaaagttgcagtagcagactaggtgtcatgtgatataactggacccaggagaatgaccccacaactgaaagatttttatgaaggatgatttactattctccaacgtactgacatttttctacagcccaatcattgctggggagaccactgaggttcctttcacagacagaatctgtcacagccttcatgggagacacagtgctactcaagtgtgaagtcattggggagcccatgccaacaatccactggcagaagaaccaacaagacctgactccaatcccaggtgactcccgagtggtggtcttgccctctggagcattgcagatcagccgactccaaccgggggacattggaatttaccgatgctcagctcgaaatccagccagctcaagaacaggaaatgaagcagaagtcagaattttatcagatccaggactgcatagacagctgtattttctgcaaagaccatccaatgtagtagccattgaaggaaaagatgctgtcctggaatgttgtgtttctggctatcctccaccaagttttacctggttacgaggcgaggaagtcatccaactcaggtctaaaaagtattctttattgggtggaagcaacttgcttatctccaatgtgacagatgatgacagtggaatgtatacctgtgttgtcacatataaaaatgagaatattagtgcctctgcagagctcacagtcttggttccgccatggtttttaaatcatccttccaacctgtatgcctatgaaagcatggatattgagtttgaatgtacagtctctggaaagcctgtgcccactgtgaattggatgaagaatggagatgtggtcattcctagtgattattttcagatagtgggaggaagcaacttacggatacttggggtggtgaagtcagatgaaggcttttatcaatgtgtggctgaaaatgaggctggaaatgcccagaccagtgcacagctcattgtccctaagcctgctatcccaagctccagtgtcctcccttcggctcccagagatgtggtccctgtcttggtttccagccgatttgtccgtctcagctggcgcccacctgcagaagcgaaagggaacattcaaactttcacggtctttttctccagagaaggtgacaacagggaacgagcattgaatacaacacagcctgggtcccttcagctcactgtgggaaacctgaagccagaagccatgtacacctttcgagttgtggcttacaatgaatggggaccgggagagagttctcaacccatcaaggtggccacacagcctgagttgcaagttccagggccagtagaaaacctgcaagctgtatctacctcacctacctcaattcttattacctgggaaccccctgcctatgcaaacggtccagtccaaggttacagattgttctgcactgaggtgtccacaggaaaagaacagaatatagaggttgatggactatcttataaactggaaggcctgaaaaaattcaccgaatatagtcttcgattcttagcttataatcgctatggtccgggcgtctctactgatgatataacagtggttacactttctgacgtgccaagtgccccgcctcagaacgtctccctggaagtggtcaattcaagaagtatcaaagttagctggctgcctcctccatcaggaacacaaaatggatttattaccggctataaaattcgacacagaaagacgacccgcaggggtgagatggaaacactggagccaaacaacctctggtacctattcacaggactggagaaaggaagtcagtacagtttccaggtgtcagccatgacagtcaatggtactggaccaccttccaactggtatactgcagagactccagagaatgatctagatgaatctcaagttcctgatcaaccaagctctcttcatgtgaggccccagactaactgcatcatcatgagttggactcctcccttgaacccaaacatcgtggtgcgaggttatattatcggttatggcgttgggagcccttacgctgagacagtgcgtgtggacagcaagcagcgatattattccattgagaggttagagtcaagttcccattatgtaatctccctaaaagcttttaacaatgccggagaaggagttcctctttatgaaagtgccaccaccaggtctataaccgatctctccacccccatgctcccaccagtaggtgtacaggctgtggctcttacccatgatgctgtgagggtcagctgggcagacaactctgtccctaagaaccaaaagacgtctgaggtgcgactttacaccgtccggtggagaaccagcttttctgcaagtgcaaaatacaagtcagaagacacaacatctctaagttacacagcaacaggcctcaaaccaaacacaatgtatgaattctcggtcatggtaacaaaaaacagaaggtccagtacttggagcatgactgcacatgccaccacgtatgaagcagcccccacctctgctcccaaggacttgacagtcattactagggaagggaagcctcgtgccgtcattgtgagttggcagcctcccttggaagccaatgggaaaattactgcttacatcttattttataccttggacaagaacatcccaattgatgactggattatggaaacaatcagtggtgataggcttactcatcaaatcatggatctcaaccttgatactatgtattactttcgaattcaagcacgaaattcaaaaggagtggggccactctctgatcctatcctcttcaggactctgaaagtggaacaccctgacaaaatggctaatgaccaagacactggcgtgacgattaatcttgttaatgaagttctgcttggctgaggctgcggctctgataaggaagatgtaaattttcttgagaggaaattgttttgtctccattctgaaggaccaattaaaatgtcaagcttctttgtatg

SEQ ID NO: 1331 - DNA, 9590 bp, Homo sapiens
  source 1..9590: mol_type = genomic DNA
atggagaatagtcttagatgtgtttgggtacccaagctggcttttgtactcttcggagcttccttgttcagcgcgcatcttcaagtaaccggttttcaaattaaagctttcacagcactgcgcttcctctcagaaccttctgatgccgtcacaatgcggggaggaaatgtcctcctcgactgctccgcggagtccgaccgaggagttccagtgatcaagtggaagaaagatggcattcatctggccttgggaatggatgaaaggaagcagcaactttcaaatgggtctctgctgatacaaaacatacttcattccagacaccacaagccagatgagggactttaccaatgtgaggcatctttaggagattctggctcaattattagtcggacagcaaaagttgcagtagcaggaccactgaggttcctttcacagacagaatctgtcacagccttcatgggagacacagtgctactcaagtgtgaagtcattggggagcccatgccaacaatccactggcagaagaaccaacaagacctgactccaatcccaggtgactcccgagtggtggtcttgccctctggagcattgcagatcagccgactccaaccgggggacattggaatttaccgatgctcagctcgaaatccagccagctcaagaacaggaaatgaagcagaagtcagaattttatcagatccaggactgcatagacagctgtattttctgcaaagaccatccaatgtagtagccattgaaggaaaagatgctgtcctggaatgttgtgtttctggctatcctccaccaagttttacctggttacgaggcgaggaagtcatccaactcaggtctaaaaagtattctttattgggtggaagcaacttgcttatctccaatgtgacagatgatgacagtggaatgtatacctgtgttgtcacatataaaaatgagaatattagtgcctctgcagagctcacagtcttggttccgccatggtttttaaatcatccttccaacctgtatgcctatgaaagcatggatattgagtttgaatgtacagtctctggaaagcctgtgcccactgtgaattggatgaagaatggagatgtggtcattcctagtgattattttcagatagtgggaggaagcaacttacggatacttggggtggtgaagtcagatgaaggcttttatcaatgtgtggctgaaaatgaggctggaaatgcccagaccagtgcacagctcattgtccctaagcctgctatcccaagctccagtgtcctcccttcggctcccagagatgtggtccctgtcttggtttccagccgatttgtccgtctcagctggcgcccacctgcagaagcgaaagggaacattcaaactttcacggtctttttctccagagaaggtgacaacagggaacgagcattgaatacaacacagcctgggtcccttcagctcactgtgggaaacctgaagccagaagccatgtacacctttcgagttgtggcttacaatgaatggggaccgggagagagttctcaacccatcaaggtggccacacagcctgagttgcaagttccagggccagtagaaaacctgcaagctgtatctacctcacctacctcaattcttattacctgggaaccccctgcctatgcaaacggtccagtccaaggttacagattgttctgcactgaggtgtccacaggaaaagaacagaatatagaggttgatggactatcttataaactggaaggcctgaaaaaattcaccgaatatagtcttcgattcttagcttataatcgctatggtccgggcgtctctactgatgatataacagtggttacactttctgacgtgccaagtgccccgcctcagaacgtctccctggaagtggtcaattcaagaagtatcaaagttagctggctgcctcctccatcaggaacacaaaatggatttattaccggctataaaattcgacacagaaagacgacccgcaggggtgagatggaaacactggagccaaacaacctctggtacctattcacaggactggagaaaggaagtcagtacagtttccaggtgtcagccatgacagtcaatggtactggaccaccttccaactggtatactgcagagactccagagaatgatctagatgaatctcaagttcctgatcaaccaagctctcttcatgtgaggccccagactaactgcatcatcatgagttggactcctcccttgaacccaaacatcgtggtgcgaggttatattatcggttatggcgttgggagcccttacgctgagacagtgcgtgtggacagcaagcagcgatattattccattgagaggttagagtcaagttcccattatgtaatctccctaaaagcttttaacaatgccggagaaggagttcctctttatgaaagtgccaccaccaggtctataaccgatcccactgacccagttgattattatcctttgcttgatgatttccccacctcggtcccagatctctccacccccatgctcccaccagtaggtgtacaggctgtggctcttacccatgatgctgtgagggtcagctgggcagacaactctgtccctaagaaccaaaagacgtctgaggtgcgactttacaccgtccggtggagaaccagcttttctgcaagtgcaaaatacaagtcagaagacacaacatctctaagttacacagcaacaggcctcaaaccaaacacaatgtatgaattctcggtcatggtaacaaaaaacagaaggtccagtacttggagcatgactgcacatgccaccacgtatgaagcagcccccacctctgctcccaaggacttgacagtcattactagggaagggaagcctcgtgccgtcattgtgagttggcagcctcccttggaagccaatgggaaaattactgcttacatcttattttataccttggacaagaacatcccaattgatgactggattatggaaacaatcagtggtgataggcttactcatcaaatcatggatctcaaccttgatactatgtattactttcgaattcaagcacgaaattcaaaaggagtggggccactctctgatcctatcctcttcaggactctgaaagtggaacaccctgacaaaatggctaatgaccaaggtcgtcatggagatggaggttattggccagttgatactaatttgattgatagaagcaccctaaatgagccgccaattggacaaatgcaccccccgcatggcagtgtcactcctcagaagaacagcaacctgcttgtgatcattgtggtcaccgttggtgtcatcacagtgctggtagtggtcatcgtggctgtgatttgcacccgacgctcttcagcccagcagagaaagaaacgggccacccacagtgctggcaaaaggaagggcagccagaaggacctccgaccccctgatctttggatccatcatgaagaaatggagatgaaaaatattgaaaagccatctggcactgaccctgcaggaagggactctcccatccaaagttgccaagacctcacaccagtcagccacagccagtcagaaacccaactgggaagcaaaagcacctctcattcaggtcaagacactgaggaagcagggagctctatgtccactctggagaggtcgctggctgcacgccgagccccccgggccaagctcatgattcccatggatgcccagtccaacaatcctgctgtcgtgagcgccatcccggtgccaacgctagaaagtgcccagtacccaggaatcctcccgtctcccacctgtggatatccccacccgcagttcactctccggcctgtgccattcccaacactctcagtggaccgaggtttcggagcaggaagaagtcagtcagtgagtgaaggaccaactacccaacaaccacctatgctgcccccatctcagcctgagcattctagcagcgaggaggcaccaagcagaaccatccccacagcttgtgttcgaccaactcacccactccgcagctttgctaatcctttgctacctccaccaatgagtgcaatagaaccgaaagtcccttacacaccacttttgtctcagccagggcccactcttcctaagacccatgtgaaaacagcctcccttgggttggctggaaaagcaagatcccctttgcttcctgtgtctgtgccaacagcccctgaagtgtctgaggagagccacaaaccaacagaggattcagccaatgtgtatgaacaggatgatctgagtgaacaaatggcaagtttggaaggactcatgaagcagcttaatgccatcacaggctcagccttttaacatgtatttctgaatggatgaggtgaattttccgggaactttgcagcataccaattacccataaacagcacacctgtgtccaagaactctaaccagtgtacaggtcacccatcaggaccactcagttaaggaagatcctgaagcagttcagaaggaataagcattccttctttcacaggcatcaggaattgtcaaatgatgattatgagttccctaaacaaaagcaaagatgcattttcactgcaatgtcaaagtttaagctgctagaatagtcatgggcctttgtcactgcagtgaccacactgtcataactaatacctatgttttcctttgtcaaggcctgttgtttaatgtgtaggtctagtcttacaaaatgcaagtgcattatttaagcctgtaccatgccatggcaaaccagtgcaagctcactattttgttttcaacttaaacatacaaagcacccatgggaatctctcatgccatagcaccaaaggattggatgttttccttacagcacaaaaagtaaatagtaaacaaacaaaaggcagagaatgcttatgtttgtaactcagtcattcatcttgcacaagtggtggatattagtgagtggctaaaaattcacctattttggcaagtatttgtaaatccacccttggttaatatgtatgtctggagtccaggaatataaaaatctgcaactagtggcattctgccagcagcagtacatttctggaaagaggatataatatgcaatcttctcagacacatggtaattatatgcttaagcttgtaataggacagttttcaatttgggtggcttttgtgccataccacactgtgatacaatttcaaagcttcactaaggccatcttccttaggagtttggccagaagaatgcccccaccccttcaccccatccctccctgagttctccttggcaactagcgttgggtgaaatggccagctccacatgtcatatggtgcactggccaatgtcgcctgtcttctaatcccgtagaaatggcagactccctgagagcaggaagagaaggaaaataaaaggtagcttctaacagtaccttctcttaaagaatgccaactctgcctacagggtcagtgttggcaagcattggccaccagacccttttgttaagggaaacttttacactacacctgtgtcagagtcagggggaagcagaggggcaggtgccacctgacacttccgacatgtaaatccagcagatacttttcaaagcagcatcttaaactgtggactacagttttaaacttctattgccatgtttatctacagcttggaactagctaaaattaagaacattttgtatgcagcattttagtttctgaattttcagctgcatttggagttaatccctgtttatgcagctgaatcgccaaaagggagctagtttgcatatttatcagttaggtgacttgaaaacccaatgagagagtttcagctgaattattcctttcagctctgcctttgatttcaagcttgagtaggtcataattttaaaagagcatggaagggataggatctttacaacctaatagctccttttattaggtgggtaattatatatgaatccctgaataaaatattttgagcaaaatggcactgtaacagaagtaataattcagtttatttttttacagttttatgtcgggaaggaaatctgatgtcaaagagagggctgttcaaatggttcattagaaagtccggtccatttgcgaatttgttccttcaacaagagtgctcattcaagttactcagattttctggaagtcttttctgaagagctatgtgatgttgttctatgggacagactactcttatttaacatctgggcacttaggtagacaaccttctactgacctggaataaagtgtttcctaacataatattgaattattcagaaataatccattacttcaaaaaagaaaatattcattgggctagcccaaccttctctaggccctaagaattattacctcccctttctaattctagcaaacatggaacattctccttaggcacttgacacccacgagggtaatcctgagtgctcagtttggaataggttgcaaatctcagattttagggattgagtcacaccttcaatctatagaatgaagttgaccaattaaaaaaaaaaaaaaaacctatcattttcacaaatttctagatccttctagtcaaaaataattatttaggaaataaaatttttaaaaatccatttaaatacatgttatttgtcttcagtggaagttatatttctgctgcatgcttttgaaactttcttcattaaatagaatggtttgtcttagtaactggcaatgccagtattagcaccatgcatttaatctataatacaatcaatttaaacatcctcaaaaaactctagtatcatttacctggtagtattaatatacaatgatgtcaccacaacttttgtataactctgttccctttaccctcaaatgattcatatatgtatataattgcctgcccaagttttcaggtaacttattaatttcccagtctcctgatctcttgacaagaagaaacctgtgaatactgcaaactagcctctgacttcctcctactgagtctagttcatggtatccaggactctttatgctcataactctctctgattcccattgggtgatacctgacagccaaccagccgctctgccaccagaactcatttctccctgaaaaagaagaaaatcatatttggcagagcattctctggtctgccctgtaatgtgcttaaatgtcaggcaacatcctcttttttttaaaaaaaatggtatttttctttaaatttcaccctaataagaaagctattttctctcctctgcagaaatttctgcatttgtgaaacttataaaaatttagatagttcaaatgtataaagaatatttggatgatgctctagccaaaagttaaatatttcgtagtgaatcatagccaataagaaaccagtcatacttgcctctttgaataacagagatataagcttctagaatatttaaataatgaagttttacatttgggtattataaaatgcatactcaattgaatgagctgaaaaaaataccaagccagtgatataagtggagatttattaaggattcctgttgagtatattcttagtttcctcaaaatagggattattcaaaattaggtgtatgttcaatctcctgctttggttccagctacacaaggagagccatcctgtgctagtgtgatgtttcagacaacattctgaaactaaaatgtttggcacttattggcttttccaataaagaatctcttaagtacaggtatttctggaagctgttggtgtctgtgcttgaagatgattgctgatacttatccaccctttgggtacttctgttgactttgtttaaataatcatcttatggttgtccccaaatgtaatatggtatctcagatatagcagctggactgtaattacaacaaaaggttacctctaaagataacatcttaccattttagataaaattgtgtcccagaattcttatggtttcggaatgtacatttctagtcaatgaaagaaagaaaaatggaaaaattgtctagtttcaggcatgtttaaagaaaacaaagtcatctgaactttaaaatagatgcagagcagggttactttccctttcactcagttcccttcatgcaaccacaggcagtcctgcaggccagaggttactatcctaacctgctcataaccatatactatacagagcccacaactttctggagatgcagaagcagccatacactcaagtctctgtttttgtaaatcacattcaaagcaacattttactcataatttgcatttctctggtgactttcagaaatcactttagtattgtacagaaaagctttttatttgagtctagtgtttaaaattaaattggatacttgggaaaatcatagataggtgttttgtatgatattccattccaatgcaaaatatatgtacccatgcctcaatgtatcttgctatctaaatacctgttgccaaaaagtattgatttgggaaaaaaaatgccaatttcctggtcagtgaggttatgtaaaagacaaaataccacacccatatcagcaaatgaatattactactcatctggactcttcgttgccactattgcataacgttcacgtggcagacttccagttgcactctctgaaggacttttttctcttactctcaatagagagcctttgtacattgtcatcctatgattgttgttggtagaagagcaagagcaaaactctgcaagatttaataaacacaggggcatgggccaagggatctcactgtgtgctgaacatgtattttcagatgcaagaaaggaatgatggagaggaggagaaatgctgttttttattattgtagggtaaatctgacaattctgaactttgtgaattgtcagcttgtttgggggaagggtgggcgggtatggggtgtactttttataagtaatatttaatttattatttagagtggcttctttttggataatttatgataaaaagggagatctggttgggatctagatacggctgttaaagctgcagtgttccatacctcagagggaccactttggaaatgaattgtccattgctgagtatgaagagatgtccagtccaggcaaagccttcactgaagttccatcatcgccacttctccctttttagggtcattcaaagaagataacaccaaacctaaataattctgaaagcattttgcagatcagtgctactcattcaaagggctttgcaactcaaacagattgttagtgtgctagtgataagtttatttggtagaaatgggtatactacagctttaactagccttagtgagaaaagaaattttttgttgttacaaaacaccttttttaacaaaaaggtattttgagcctacaaaaagtttctttaaactgtcagattctagcattgttaaccaaattagactagtgattgcaatatttaagtgtaaatcttgttctacaagaaaggaaacttgcttacagtttaaaacaatgactgtttctacacatgatcttgtatactactacacaaggaaaagggggttttgtaaacactgtagaacagtctcatattcatttttttatagaaatgttattccaatggtgcattttttgtttaataaataaagttttgatacaaa

SEQ ID NO: 1332 - DNA, 1251 bp, Homo sapiens
  source 1..1251: mol_type = genomic DNA
ctattgtttctacctcaccctggcccaggaagacagatctactgaggaaagccctgaacactctgcggcttctctgagaaaccctatcgaaggggatgtggaatcccagagctactcttgctatcaactcgccgcatgaccttgggaaaatcatttcacctggttcagcaatgatttactgagctattgaaggccttactttccagatccagatccttgtgcatacaactgacttgtgtgggtgaggcttgcagaaaaaatcagctagaacagccttgggggtagtggcaaggtggccagagcaattgactgggagctgggaacaggaatgaagaggaagagctgataagaaacatgcccagagcagatttgatgctactgccaatgtacctgaataagaagacaactctttctggaaaaagggaaaacttgaagggctattgaaggccgctagaaagtacagaaggaactttggatgtgggagagaaagacaaggagaaacctgaaagcagcccagttatgacaatgaatgttctggaggctgggaagtggaagagcattgtgccagcacctggtgagggccttcttgccgtgttacacatgatggtttttactgatgccctgcacagagagaggtctgtaaagtggcaagcaggagtctgctacaatggaggaaaggattttgctgtatctcttgccaggcccaaggctgcagagggaattgcagattgaatgtaagtgacttggaaaaggaagaggagttgccagaaacagctaaaatgtcagtagaagacttgacagcttgagaatagaggaaaaaataaaagcgaagcagacaaaaagaaccttacctcccccacaatacaacattgggctgctgaacccacaaaaatctaaatccgtttagaatcatctatttaactcctcagagacatgcacaaactattctagagaggcttgtgcctacgaagattacttaagaatgtgttgacacatttggagggggttaatttaccagttatcatttactagaaaggctttttctataagaatatatgaaagagtttcctcggagcattcaaccgggcttctttgtagggtatgtgtactgcttggagctacggaagaccacgtcctagaagtgctgtgtccctgaggcacacctatgtgtgttatctctctggcatactttccaacaaggattcttttctagtctatacattctgattaatttgcagtcagaggcaatgc

SEQ ID NO: 1333 - DNA, 2451 bp, Homo sapiens
  source 1..2451: mol_type = genomic DNA
tgggcctggttgtggaggccccttttgcaaaacctcagtctgaatttagtagacagaagtcactaggaatgccttgacaggatcctgccttagctaaggctccctccagctgcagagggtgtttttgttagactcacacactgcgtgaaactgctcagaatagagccatgatctcaaccacgaaatgggaacttagattttggagaaactaacggggacggacttctttcctagcctgagtgttgagcagtgtcatgccttggcgtttcagctcctcgttgtctaggtggtgaaatgacagaactcattcgcttctttgattggtgattttgaaataatctttcatcaagttccatctcctttaccctcatatggaatatatctctctgtctgttgttaaactacgatgacatgtctgtagctatcagaaagagaagctgggaagaacatgtgacccactggatgggacagccttttaattctgatgatcgtaacacagcatgtcatcatggactagtagctgacagcttgcaggcaagtatggaaaaagatgcaactctaaatgtggaccgcaaagagaagtgtgtttcactacctgactgctgtcatggatcagagctgagagattttcctgggaggccaatgggtcatctttcaaaggatgtggacgaaaatgacagccatgaaggtgaagatcagtttctttctctggaagccagcacagaaacactagtgcatgtttctgatgaggataacaatgctgatttatgccttacagatgataaacaggttttaaatacccaagggcagaaaacatcaggccaacatatgatccaaggagcaggctccttagaaaaggcactgcccatcatacaaagtaaccaagtttcttctaactcctggggaatagctggtgaaactgaattagcactggtaaaagaaagtggggagagaaaagttactgactctataagtaaaagcctggagctttgcaatgaaataagcttaagtgaaataaaagatgcacccaaagtaaatgcagtggatactttgaacgtgaaagatattgcacctgagaaacaattgcttaactctgctgtaattgctcagcaacgaaggaaacctgacccccctaaagatgaaaatgaaagaagcacctgcaatgtagtacaaaatgagttcttggatactccttgcacaaacagaggactgccattattaaaaacagattttggaagctgccttctgcagcctccttcctgccccaatggaatgtcagctgaaaatggcctggagaagagtggtttttcacaacatcaaaacaaaagtccaccaaaggtcaaggcagaagatggcatgcagtgtttacaattaaaggagaccctggccacccaggaacccacagataaccaagtcagacttcgtaagagaaaggaaataagagaagatcgagatagggcgcggctggactccatggtgctgctgattatgaaactggaccagcttgatcaggacatagaaaatgccctcagcaccagctcctctccatcaggcacaccaacaaacctgcggcggcacgttcctgatctggaatcaggatctgaaagtggagcagataccatttcagtaaatcagacacgagtaaatttgtcttctgacactgagtccacggacctcccatcttccactccagtagccaattctggaaccaaacccaagactacggctattcaaggtatttcagagaaggaaaaggctggtaagttgacattttggttctgttttctcgccaatctattttagaataaatttcaccttaaaataggcattttattaaatatataaaatgtatacatctcatgaatatatgggaaaatgttgtttaaattctgtaaaagaaatttgttttgctcaatatgtaagaaaaatatacgtggttttctgacataatgacattgtgttagaataagatatgtgtttcttggggtcttccttgtaactgcaaccacaatttttttttcttaagcaaaagaattaaatgttgatcaaggttctggggaatgaatttggaaattagttattaataattaccaaggtttatttttactcttaatgacttagtagccacagaaaaagatgtaattgatgcttaaagctgatgccatactatcaaaaatatagtgatgaagcaatgtgaataattgtattgaagaaaaaaattatagtatttttctgtgttctgtgctttaattataattatttaacagtattatgggaaatggacaaggactgatgagaaatgaaaatatgaaaaattagacatggattggtagatctatgtgtttttaaaaaatcatactatcttatgtgttctgtgtaataaaaacgaaaacagattaaaggtatattatctaacttgaagtacatcacttagtttgtagacatttgtga

SEQ ID NO: 1334 - DNA, 6426 bp, Homo sapiens
  source 1..6426: mol_type = genomic DNA
gttagcggcgtctcggttgccatggagaccaggagctccaaaacgcggaggtctttagcgtcccggaccaacgagtgccaggggacaatgtgggcgccaacttcgccaccagccgggtccagcagccccagccagcccacctggaagtcctccttgtattcctccctcgcctactctgaggccttccactacagcttcgcagcccggccccgccgcctcacgcagcttgcgctggcgcagcgtcccgagcctcagctgcttcgtctgcgcccctcctcgctgcgcacccaagatatctcgcacttgctcaccggcgtcttccgcaacttgtactcagccgaggtcatcggcgacgaagtgagcgcaagcttgatcaaggcccgcggcagcgagaatgagcgccacgaggagttcgtggaccagctgcagcagattcgggagctctataagcagcggctggatgagtttgaaatgttggagagacatatcactcaggcccaagcacgggctattgcggaaaatgagcgggtcatgagccaggctggagtacaggacctcgagagccttgtcaggttgcctccagtgaagagtgtctccagatggtgtatagacagcgagttgctacggaaacatcatttgatctccccagaagattactacaccgatacagtgccgtttcactctgcacctaaaggcatctccctacctggatgttcaaaactgacatttagctgtgagaagcgttccgtccagaagaaagagctgaacaagaagcttgaagattcatgcaggaagaagcttgctgagttcgaagatgagttagaccacactgtggacagcctgacatggaatttaactcctaaggccaaagaaaggaccagagaacctctcaagaaagcaagtcaaccaaggaataaaaactggatgaaccacttacgtgtgccacagagagagctagacagacttctgcttgccagaatggagagtcggaaccacttcctaaaaaatccccgtttttttcctcctaacactcgatatggaggcaagtctcttgtttttcctccaaagaagccagcaccgataggagaattccagagtacagagccagaacagagttgtgctgatactccagtgtttctagctaagccaccaattgggtttttcacagattatgaaattggtccagtttatgagatggtaattgcgctgcagaacaccaccacgaccagccgctacctgcgagtcctcccgccttccacgccatacttcgctctgggactggggatgttcccaggaaaaggtggaatggtggctcctggaatgacctgccagtacattgtccagttttttcccgactgccttggggattttgatgattttattttagtggagacccagtcagcccacacacttctgatccccctgcaggcccggaggccgccccccgtgctgacattgtcaccggtgttggactgtggttactgcctcattgggggagtcaagatgaccagattcatctgcaaaaatgtgggtttcagtgttggcaggttctgcattatgcccaaaacaagctggccaccactaagtttcaaggccattgcaaccgtcggctttgttgaacaacctccttttggaatcctgccttcggtgtttgagctggccccgggacatgctatattagtggaggtcttgttttccccaaagagcctaggaaaggcagagcagaccttcatcatcatgtgcgacaactgccagataaaggagctggtgaccataggaattgggcagctgattgctttggatctgatctatatttctggtgaaaaaagccagccagaccctggagagctcacagacttaacagcccagcacttcatacgatttgagcctgaaaaccttcggtccacggctaggaagcagctgattattagaaatgctacgcacgtggagctggccttctactggcagatcatgaagcccaacctgcagcccctcatgcctggagaaaccttcagcatggacagcatcaagtgctaccccgacaaggagactgccttctccatcatgcccagaaagggggttctaagcccccacacagaccacgagttcatcctgagcttttctcctcatgagctgagggattttcacagtgtgctccagatggtgctagaggaagtcccagagcctgtaagttcagaagcggagagcctggggcactcctcctactctgtggatgatgtgattgtcctggaaatcgaggtgaaaggctcagtagaacctttccaggttctcttagagccatatgccctcatcatcccaggggagaactacattgggataaatgtgaagaaggcttttaagatgtggaacaacagcaagtcacccatcagatacctgtgggggaagatcagcgactgccacatcattgaagtggagcccggcacaggggtcatagagcccagtgaggtcggggattttgagttgaactttactgggggtgtccctggccccacaagccaggacctgctgtgtgaaatcgaagactcgccctcgccagtggtgttacacattgaggctgtctttaaggggcctgccctcatcatcaacgtctcagcccttcagtttggtctgctccgcctggggcagaaagccacaaactccatccagatccggaacgtcagccagctcccagccacatggcgcatgaaggagagcccagtctccctccaggaaaggcctgaggatgtgtctcccttcgacattgagccttcgagtggccagcttcactctctgggggagtgcagggtggacatcaccttggaggccctgcactgccagcatctggagaccgtcctggagctggaggtggaaaatggtgcctggagctaccttcctgtgtatgctgaggtacagaagccccatgtgtacctacagagcagccaggtggaggttagaaatctctacctgggtgtgcccacgaagacaaccatcacacttatcaatggcacgctcctgcctacccagttccactggggcaagctcctcggacaccaagcagaattctgcatggtgacagtctcccccaaacatggcctgctgggcccaagtgaggagtgccagctcaagttggagttgactgctcatacccaggaagagctgacccatctggccctcccttgtcacgtgtcaggcatgaagaagccactggttctaggcatttctgggaagccccagggactgcaagtggccattaccatctctaaggagagctctgattgcagcacagagcagtggccaggccacccaaaggagctccgcctggactttggctcagcggtgccactgaggacccgtgtgactcgccagctcattctcaccaatcgctccccaatacggacccgtttctccctcaagtttgagtatttcgggagcccccaaaacagcctgagcaaaaagaccagccttcccaacatgcctcctgccctgctaaagacagtgcggatgcaagagcacctggccaagcgagagcagctggattttatggagagcatgctatcccacgggaaaggagctgctttcttccctcacttttcccagggcatgctggggccctaccagcagctgtgcattgacatcacaggctgtgccaacatgtggggcgagtactgggacaacctcatctgcacggtgggagacctgctgccggaagtcatcccagtgcacatggcagcggtgggctgccccatcagctccctgaggaccacctcctacactattgaccaggcccagaaggaaccagccatgaggttcggcacccaggtctccggaggagacacagttacccgaacccttcgcctgaataactccagcccctgtgacatccgcctggattgggagacctatgttccagaagacaaggaagaccggctggtggagctgctggtgttttatgggccacctttcccgctgcgggaccaagccgggaatgagcttgtgtgccctgatacccctgagggtggctgcctcctctggtccccaggcccctccagttcatcggaattcagccatgaaactgactcatcagttgagggcagctccagtgccagcaatagggtggcacagaagctcatctcagtcatcctgcaggcacatgagggggtgccctccggccacctgtactgtatcagccccaagcaggtggtggtccctgctgggggcagcagtaccatctacatctccttcacccctatggtgctcagccctgagatcctgcacaaggtggagtgtactggctacgccctgggtttcatgagcttggacagcaaggtggaaagggagattccagggaagaggcatcgcctgcaggactttgcggtgggacccctgaaactggacctgcatagctacgtgaggcctgcacagctaagtgtggagctggactacggcggcagtatggaattccagtgccaggccagtgacctcattcccgagcagccctgctctggggtgctgagtgagctggtgaccacccaccacctgaagctgaccaacactacagagatcccacactacttccggcttatggtctccaggcccttctccgtttctcaagatggggcgagccaggaccacagagctcctggccctggccagaagcaggagtgtgaggaggagacagcctcagcggacaagcagctggtgctccaagcacaggagaacatgctggtgaacgtgtccttctcactctccctggagctgctctcctatcagaagctcccagctgaccagacactgcctggggtggacattcagcagagtgcgagtggagagagagagatggtgtttactcagaacctgctcctggagtacaccaaccagaccactcaggtggtgcccctgcgggctgtggtggccgtgcctgagctgcagctctccaccagctgggtggactttgggacctgctttgtgagccagcagcgagtccgggaggtctacctgatgaacctgagcgggtgccgaagctactggactatgctgatgggccagcaggagccagccaaggccgctgtggccttcagggtctccccaaacagtgggctgctagaagcacgatccgccaatgcacccccaacctccatcgccttgcaggttttcttcactgccaggagtagtgagctgtacgagtccacgatggtggtggaaggtgtgctcggtgagaagtcctgcaccctgcggctccggggccaaggctcctatgatgagagatacatgttgcctcaccagccctgaggctccgccccagccctcagccccaggccccagctggagaaaaaacattgcccagggattaggagcagctcttcagcacaaagacacagacttggggacctggggacctctgggcagctcctggaatggaagaacccccttccacaatggtctcagcctaggccctcatgatatgtcctcagagctaacataaaggacaggccacaccacagcagagaccaccacattgagatcactactcagtgcatagcgaagaccagtatggcaaaattagtcttggaaaaaaaccacagccactaagataaattcatgcacttttactatgcccattgcacttctcatccatggatttgccttgccttaagaattaaccatggccttgtggcctgggtgacccaggctgcttttatcttgcacagctaaagagggtctgatgggtggctcaacaccccacccactcctataccatgtcatcagtgttcacattttccaaatgagttgaagtgccttgatctgtccactgccaccaccaccagtgctgagttttcccatgtggttttgcttttgtggtgttactgccttgctgctagagcagcaggactgtctgcgtagcgcctccagcctgggacctcactcagttcccagggtattcaaagacggcagcggctcccattccagtcccgatgcacatggacaccactccgtatgccctgtgaaaacaaaacttaattggctgggcaaaggcacccaccaaattacctccagaccaggctgacccagaaggacgtcatggacaagtaggatgcaaaaccatcagaccagatctgtgggcaagcggtaccctggcctcccacttgggcacacacacggtgacagatgcccactgcaggctagtatccctttcaaggctggcccttaaggaaaacagggatcatgcccctacatcctaagttcagggtgtttctgtgtgcatgttcccctccccagggatcgatcataatcccaaaagacacaatcccaaacacaatcatcccaaatgttgaaatcctggaagaacaaaatccctaaagtctaaaatcctgaaaatcacaatcctaaaagatcaaaatcctgaaaatataattctggaaaaaataa

SEQ ID NO: 1335 - DNA, 5491 bp, Homo sapiens
  source 1..5491: mol_type = genomic DNA
gttagcggcgtctcggttgccatggagaccaggagctccaaaacgcggaggtctttagcgtcccggaccaacgagtgccaggggacaatgtgggcgccaacttcgccaccagccgggtccagcagccccagccagcccacctggaagtcctccttgtattcctccctcgcctactctgaggccttccactacagcttcgcagcccggccccgccgcctcacgcagcttgcgctggcgcagcgtcccgagcctcagctgcttcgtctgcgcccctcctcgctgcgcacccaagatatctcgcacttgctcaccggcgtcttccgcaacttgtactcagccgaggtcatcggcgacgaagtgagcgcaagcttgatcaaggcccgcggcagcgagaatgagcgccacgaggagttcgtggaccagctgcagcagattcgggagctctataagcagcggctggatgagtttgaaatgttggagagacatatcactcaggcccaagcacgggctattgcggaaaatgagcgggtcatgagccaggctggagtacaggacctcgagagccttgtcaggttgcctccagtgaagagtgtctccagatggtgtatagacagcgagttgctacggaaacatcatttgatctccccagaagattactacaccgatacagtgccgtttcactctgcacctaaaggcatctccctacctggatgttcaaaactgacatttagctgtgagaagcgttccgtccagaagaaagagctgaacaagaagcttgaagattcatgcaggaagaagcttgctgagttcgaagatgagttagaccacactgtggacagcctgacatggaatttaactcctaaggccaaagaaaggaccagagaacctctcaagaaagcaagtcaaccaaggaataaaaactggatgaaccacttacgtgtgccacagagagagctagacagacttctgcttgccagaatggagagtcggaaccacttcctaaaaaatccccgtttttttcctcctaacactcgatatggaggcaagtctcttgtttttcctccaaagaagccagcaccgataggagaattccagagtacagagccagaacagagttgtgctgatactccagtgtttctagctaagccaccaattgggtttttcacagattatgaaattggtccagtttatgagatggtaattgcgctgcagaacaccaccacgaccagccgctacctgcgagtcctcccgccttccacgccatacttcgctctgggactggggatgttcccaggaaaaggtggaatggtggctcctggaatgacctgccagtacattgtccagttttttcccgactgccttggggattttgatgattttattttagtggagacccagtcagcccacacacttctgatccccctgcaggcccggaggccgccccccgtgctgacattgtcaccggtgttggactgtggttactgcctcattgggggagtcaagatgaccagattcatctgcaaaaatgtgggtttcagtgttggcaggttctgcattatgcccaaaacaagctggccaccactaagtttcaaggccattgcaaccgtcggctttgttgaacaacctccttttggaatcctgccttcggtgtttgagctggccccgggacatgctatattagtggaggtcttgttttccccaaagagcctaggaaaggcagagcagaccttcatcatcatgtgcgacaactgccagataaaggagctggtgaccataggaattgggcagctgattgctttggatctgatctatatttctggtgaaaaaagccagccagaccctggagagctcacagacttaacagcccagcacttcatacgatttgagcctgaaaaccttcggtccacggctaggaagcagctgattattagaaatgctacgcacgtggagctggccttctactggcagatcatgaagcccaacctgcagcccctcatgcctggagaaaccttcagcatggacagcatcaagtgctaccccgacaaggagactgccttctccatcatgcccagaaagggggttctaagcccccacacagaccacgagttcatcctgagcttttctcctcatgagctgagggattttcacagtgtgctccagatggtgctagaggaagtcccagagcctgtaagttcagaagcggagagcctggggcactcctcctactctgtggatgatgtgattgtcctggaaatcgaggtgaaaggctcagtagaacctttccaggttctcttagagccatatgccctcatcatcccaggggagaactacattgggataaatgtgaagaaggcttttaagatgtggaacaacagcaagtcacccatcagatacctgtgggggaagatcagcgactgccacatcattgaagtggagcccggcacaggggtcatagagcccagtgaggtcggggattttgagttgaactttactgggggtgtccctggccccacaagccaggacctgctgtgtgaaatcgaagactcgccctcgccagtggtgttacacattgaggctgtctttaaggggcctgccctcatcatcaacgtctcagcccttcagtttggtctgctccgcctggggcagaaagccacaaactccatccagatccggaacgtcagccagctcccagccacatggcgcatgaaggagagcccagtctccctccaggaaaggcctgaggatgtgtctcccttcgacattgagccttcgagtggccagcttcactctctgggggagtgcagggtggacatcaccttggaggccctgcactgccagcatctggagaccgtcctggagctggaggtggaaaatggtgcctggagctaccttcctgtgtatgctgaggtacagaagccccatgtgtacctacagagcagccaggtggaggttagaaatctctacctgggtgtgcccacgaagacaaccatcacacttatcaatggcacgctcctgcctacccagttccactggggcaagctcctcggacaccaagcagaattctgcatggtgacagtctcccccaaacatggcctgctgggcccaagtgaggagtgccagctcaagttggagttgactgctcatacccaggaagagctgacccatctggccctcccttgtcacgtgtcaggcatgaagaagccactggttctaggcatttctgggaagccccagggactgcaagtggccattaccatctctaaggagagctctgattgcagcacagagcagtggccaggccacccaaaggagctccgcctggactttggctcagcggtgccactgaggacccgtgtgactcgccagctcattctcaccaatcgctccccaatacggacccgtttctccctcaagtttgagtatttcgggagcccccaaaacagcctgagcaaaaagaccagccttcccaacatgcctcctgccctgctaaagacagtgcggatgcaagagcacctggccaagcgagagcagctggattttatggagagcatgctatcccacgggaaaggagctgctttcttccctcacttttcccagggcatgctggggccctaccagcagctgtgcattgacatcacaggctgtgccaacatgtggggcgagtactgggacaacctcatctgcacggtgggagacctgctgccggaagtcatcccagtgcacatggcagcggtgggctgccccatcagctccctgaggaccacctcctacactattgaccaggcccagaaggaaccagccatgaggttcggcacccaggtctccggaggagacacagttacccgaacccttcgcctgaataactccagcccctgtgacatccgcctggattgggagacctatgttccagaagacaaggaagaccggctggtggagctgctggtgttttatgggccacctttcccgctgcgggaccaagccgggaatgagcttgtgtgccctgatacccctgagggtggctgcctcctctggtccccaggcccctccagttcatcggaattcagccatgaaactgactcatcagttgagggcagctccagtgccagcaatagggtggcacagaagctcatctcagtcatcctgcaggcacatgagggggtgccctccggccacctgtactgtatcagccccaagcaggtggtggtccctgctgggggcagcagtaccatctacatctccttcacccctatggtgctcagccctgagatcctgcacaaggtggagtgtactggctacgccctgggtttcatgagcttggacagcaaggtggaaagggagattccagggaagaggcatcgcctgcaggactttgcggtgggacccctgaaactggacctgcatagctacgtgaggcctgcacagctaagtgtggagctggactacggcggcagtatggaattccagtgccaggccagtgacctcattcccgagcagccctgctctggggtgctgagtgagctggtgaccacccaccacctgaagctgaccaacactacagagatcccacactacttccggcttatggtctccaggcccttctccgtttctcaagatggggcgagccaggaccacagagctcctggccctggccagaagcaggagtgtgaggaggagacagcctcagcggacaagcagctggtgctccaagcacaggagaacatgctggtgaacgtgtccttctcactctccctggagctgctctcctatcagaagctcccagctgaccagacactgcctggggtggacattcagcagagtgcgagtggagagagagagatggtgtttactcagaacctgctcctggagtacaccaaccagaccactcaggtggtgcccctgcgggctgtggtggccgtgcctgagctgcagctctccaccagctgggtggactttgggacctgctttgtgagccagcagcgagtccgggaggtctacctgatgaacctgagcgggtgccgaagctactggactatgctgatgggagtagtgagctgtacgagtccacgatggtggtggaaggtgtgctcggtgagaagtcctgcaccctgcggctccggggccaaggctcctatgatgagagatacatgttgcctcaccagccctgaggctccgccccagccctcagccccaggccccagctggagaaaaaacattgcccagggattaggagcagctcttcagcacaaagacacagacttggggacctggggacctctgggcagctcctggaatggaagaacccccttccacaatggtctcagcctaggccctcatgatatgtcctcagagctaacataaaggacaggccacaccacagcagagaccaccacattgagatcactactcagtgcatagcgaagaccagtatggcaaaattagtcttggaaaaaaaccacagccactaagataaattcatgcacttttactatgc

SEQ ID NO: 1336 - DNA, 5624 bp, Homo sapiens
  source 1..5624: mol_type = genomic DNA
gttagcggcgtctcggttgccatggagaccaggagctccaaaacgcggaggtctttagcgtcccggaccaacgagtgccaggggacaatgtgggcgccaacttcgccaccagccgggtccagcagccccagccagcccacctggaagtcctccttgtattcctccctcgcctactctgaggccttccactacagcttcgcagcccggccccgccgcctcacgcagcttgcgctggcgcagcgtcccgagcctcagctgcttcgtctgcgcccctcctcgctgcgcacccaagatatctcgcacttgctcaccggcgtcttccgcaacttgtactcagccgaggtcatcggcgacgaagtgagcgcaagcttgatcaaggcccgcggcagcgagaatgagcgccacgaggagttcgtggaccagctgcagcagattcgggagctctataagcagcggctggatgagtttgaaatgttggagagacatatcactcaggcccaagcacgggctattgcggaaaatgagcgggtcatgagccaggctggagtacaggacctcgagagccttgtcaggttgcctccagtgaagagtgtctccagatggtgtatagacagcgagttgctacggaaacatcatttgatctccccagaagattactacaccgatacagtgccgtttcactctgcacctaaaggcatctccctacctggatgttcaaaactgacatttagctgtgagaagcgttccgtccagaagaaagagctgaacaagaagcttgaagattcatgcaggaagaagcttgctgagttcgaagatgagttagaccacactgtggacagcctgacatggaatttaactcctaaggccaaagaaaggaccagagaacctctcaagaaagcaagtcaaccaaggaataaaaactggatgaaccacttacgtgtgccacagagagagctagacagacttctgcttgccagaatggagagtcggaaccacttcctaaaaaatccccgtttttttcctcctaacactcgatatggaggcaagtctcttgtttttcctccaaagaagccagcaccgataggagaattccagagtacagagccagaacagagttgtgctgatactccagtgtttctagctaagccaccaattgggtttttcacagattatgaaattggtccagtttatgagatggtaattgcgctgcagaacaccaccacgaccagccgctacctgcgagtcctcccgccttccacgccatacttcgctctgggactggggatgttcccaggaaaaggtggaatggtggctcctggaatgacctgccagtacattgtccagttttttcccgactgccttggggattttgatgattttattttagtggagacccagtcagcccacacacttctgatccccctgcaggcccggaggccgccccccgtgctgacattgtcaccggtgttggactgtggttactgcctcattgggggagtcaagatgaccagattcatctgcaaaaatgtgggtttcagtgttggcaggttctgcattatgcccaaaacaagctggccaccactaagtttcaaggccattgcaaccgtcggctttgttgaacaacctccttttggaatcctgccttcggtgtttgagctggccccgggacatgctatattagtggaggtcttgttttccccaaagagcctaggaaaggcagagcagaccttcatcatcatgtgcgacaactgccagataaaggagctggtgaccataggaattgggcagctgattgctttggatctgatctatatttctggtgaaaaaagccagccagaccctggagagctcacagacttaacagcccagcacttcatacgatttgagcctgaaaaccttcggtccacggctaggaagcagctgattattagaaatgctacgcacgtggagctggccttctactggcagatcatgaagcccaacctgcagcccctcatgcctggagaaaccttcagcatggacagcatcaagtgctaccccgacaaggagactgccttctccatcatgcccagaaagggggttctaagcccccacacagaccacgagttcatcctgagcttttctcctcatgagctgagggattttcacagtgtgctccagatggtgctagaggaagtcccagagcctgtaagttcagaagcggagagcctggggcactcctcctactctgtggatgatgtgattgtcctggaaatcgaggtgaaaggctcagtagaacctttccaggttctcttagagccatatgccctcatcatcccaggggagaactacattgggataaatgtgaagaaggcttttaagatgtggaacaacagcaagtcacccatcagatacctgtgggggaagatcagcgactgccacatcattgaagtggagcccggcacaggggtcatagagcccagtgaggtcggggattttgagttgaactttactgggggtgtccctggccccacaagccaggacctgctgtgtgaaatcgaagactcgccctcgccagtggtgttacacattgaggctgtctttaaggggcctgccctcatcatcaacgtctcagcccttcagtttggtctgctccgcctggggcagaaagccacaaactccatccagatccggaacgtcagccagctcccagccacatggcgcatgaaggagagcccagtctccctccaggaaaggcctgaggatgtgtctcccttcgacattgagccttcgagtggccagcttcactctctgggggagtgcagggtggacatcaccttggaggccctgcactgccagcatctggagaccgtcctggagctggaggtggaaaatggtgcctggagctaccttcctgtgtatgctgaggtacagaagccccatgtgtacctacagagcagccaggtggaggttagaaatctctacctgggtgtgcccacgaagacaaccatcacacttatcaatggcacgctcctgcctacccagttccactggggcaagctcctcggacaccaagcagaattctgcatggtgacagtctcccccaaacatggcctgctgggcccaagtgaggagtgccagctcaagttggagttgactgctcatacccaggaagagctgacccatctggccctcccttgtcacgtgtcaggcatgaagaagccactggttctaggcatttctgggaagccccagggactgcaagtggccattaccatctctaaggagagctctgattgcagtgttttcagcacagagcagtggccaggccacccaaaggagctccgcctggactttggctcagcggtgccactgaggacccgtgtgactcgccagctcattctcaccaatcgctccccaatacggacccgtttctccctcaagtttgagtatttcgggagcccccaaaacagcctgagcaaaaagaccagccttcccaacatgcctcctgccctgctaaagacagtgcggatgcaagagcacctggccaagcgagagcagctggattttatggagagcatgctatcccacgggaaaggagctgctttcttccctcacttttcccagggcatgctggggccctaccagcagctgtgcattgacatcacaggctgtgccaacatgtggggcgagtactgggacaacctcatctgcacggtgggagacctgctgccggaagtcatcccagtgcacatggcagcggtgggctgccccatcagctccctgaggaccacctcctacactattgaccaggcccagaaggaaccagccatgaggttcggcacccaggtctccggaggagacacagttacccgaacccttcgcctgaataactccagcccctgtgacatccgcctggattgggagacctatgttccagaagacaaggaagaccggctggtggagctgctggtgttttatgggccacctttcccgctgcgggaccaagccgggaatgagcttgtgtgccctgatacccctgagggtggctgcctcctctggtccccaggcccctccagttcatcggaattcagccatgaaactgactcatcagttgagggcagctccagtgccagcaatagggtggcacagaagctcatctcagtcatcctgcaggcacatgagggggtgccctccggccacctgtactgtatcagccccaagcaggtggtggtccctgctgggggcagcagtaccatctacatctccttcacccctatggtgctcagccctgagatcctgcacaaggtggagtgtactggctacgccctgggtttcatgagcttggacagcaaggtggaaagggagattccagggaagaggcatcgcctgcaggactttgcggtgggacccctgaaactggacctgcatagctacgtgaggcctgcacagctaagtgtggagctggactacggcggcagtatggaattccagtgccaggccagtgacctcattcccgagcagccctgctctggggtgctgagtgagctggtgaccacccaccacctgaagctgaccaacactacagagatcccacactacttccggcttatggtctccaggcccttctccgtttctcaagatggggcgagccaggaccacagagctcctggccctggccagaagcaggagtgtgaggaggagacagcctcagcggacaagcagctggtgctccaagcacaggagaacatgctggtgaacgtgtccttctcactctccctggagctgctctcctatcagaagctcccagctgaccagacactgcctggggtggacattcagcagagtgcgagtggagagagagagatggtgtttactcagaacctgctcctggagtacaccaaccagaccactcaggtggtgcccctgcgggctgtggtggccgtgcctgagctgcagctctccaccagctgggtggactttgggacctgctttgtgagccagcagcgagtccgggaggtctacctgatgaacctgagcgggtgccgaagctactggactatgctgatgggccagcaggagccagccaaggccgctgtggccttcagggtctccccaaacagtgggctgctagaagcacgatccgccaatgcacccccaacctccatcgccttgcaggttttcttcactgccaggagtagtgagctgtacgagtccacgatggtggtggaaggtgtgctcggtgagaagtcctgcaccctgcggctccggggccaaggctcctatgatgagagatacatgttgcctcaccagccctgaggctccgccccagccctcagccccaggccccagctggagaaaaaacattgcccagggattaggagcagctcttcagcacaaagacacagacttggggacctggggacctctgggcagctcctggaatggaagaacccccttccacaatggtctcagcctaggccctcatgatatgtcctcagagctaacataaaggacaggccacaccacagcagagaccaccacattgagatcactactcagtgcatagcgaagaccagtatggcaaaattagtcttggaaaaaaaccacagccactaagataaattcatgcacttttactatgc

SEQ ID NO: 1337 - DNA, 981 bp, Homo sapiens
  source 1..981: mol_type = genomic DNA
gcacatgcgcagaatcatcgtggtgcacggctctccctttgcttcttcggttgcagtcctcttgcttcttgcgcgtgcgtgtagcgcttttgcaaagccgcggaggtgaagtgaacttagaggttgtggggccgaggggtcgtcttatagctaccagcccacaggcatttagtctacgttggaggtaaacaaatacgggtcctgcttaggagaaaagaaaaacgtcttacagccagtgtctaaactccaaacaacggaatgtatcaatgagaccttgtatatggatacacgtgcatttaaaaccgccctgccggcttgtagagcttttgccgttctccagcgctttacaggggttatcgcacttaagcctcggaacaactttaccagtgattctaccagaaaggaatgaagaacagaaccttcaggaattgagtcacaatgcagacaaatatcaaatgggagattgttgcaaggaagagattgatgatagtattttctactagccattgggaagataaaaggagacagaagattgaagcctttgccagccattctttccctttttgcttccaaactcctcaactgggaaccttcatatgtgcagtatttatattggatcatactggtgattataaaagttcctaggaggctagaagagccaaccaacagagaagggaaagcagtctgttctgaacatagggacataagttcattcatgccaagtatctttccagcatgtttctcccatttagaatatctagcatgtaaggcctttcaatattaatataagcccaatatcagctctttctctttgtatttcatctctttctactctcctatttgtattttgtgttcctatcaaagtgtcgtatctgggagatgacctgccttatcctgttctataacagttttgtttgctgctgtgtctttagaacagtgcctggcacacagtaagcactcaataaatctttgatgaatgaa

SEQ ID NO: 1338 - DNA, 1294 bp, Homo sapiens
  source 1..1294: mol_type = genomic DNA
gccattttcgagtgatgcctgatctcatcaatctagcgggagagacaggataacctgtccgagagtatagcgccactatgactccgccggaaaaattactttaaaaatcgccaaaaattacttggagcaaagggcagtcggcggagcttcgccaaggctggcgcagtcggttttgacctgtagcagagaaccaattctggagaacagcctcacttctttgattgaatacttacataatgcattggaacatgacatgagattaaggtttaataatgatagaatgaagaccacaataaaagagacctctacttagctcagcaattcttacctttcatttcatgtttttcccttgatgtgaagtcttacctatttgatgaagatgtcttttgaaaggtgtactgcaaggaacaaaatgtttgtaaattctccttttaccaaggtggataattactgtaccttcctcatggaaaaagttttatttaaagtgttatttctcattgaatactatcaaaaaggaaaaaaaaatgacctaaacttttgagatagatttggctctagtaagtatttagttatatcacttgcatatctgggagaagaaataagagactatcatcagtacattcccatctactaaaaaaatttattttacacatgtcaagggattacttataacttccattttattactaatagcttgaacccttttaatgaagacctaactcctccaccagaaatttaagtttatgttcttactttgtttacttataaaatacatctcaggtatttcggatgtcttttttttttctaagcctatatgaaatgaaaaatatattggcaaaataaatgtttaaaccttttacgttaaaattactttgaaagatgaaaagttagtgctgtttttgtctacgttatactgaaattaaatgtttataatttatattttgggtttatgtataaatcatggaatttatgcaaaaatatgagtagtacagattctcctctaattctgtaggactttgaataatgtgatatttttcttataattggacccttgtgttttgaagaaatgccaactgcttgaagaatctccttgttatttgtattatttgctatagggttagatgttgagaaattctgctgacaaaaaattttaagccagttttacactaaatgttcctcagtctgattaatttgttattggatgtattctgtatctttcttttgtaatttgtaacttttatccacttagcacgaatgattctattaaagaaaatcattaggaagtggtagaaac

SEQ ID NO: 1339 - DNA, 1116 bp, Homo sapiens
  source 1..1116: mol_type = genomic DNA
gatgcctgatctcatcaatctagcgggagagacaggataacctgtccgagagtatagcgccactatgactccgccggaaaaattactttaaaaatcgccaaaaattacttggagcaaagggcagtcggcggagcttcgccaaggctggcgcagtcggttttgacctgtagcagagaaccaattctggagaacagcctcacttctttgattgaatacttacataatgcattggaacatgacatgagattaaggtttaataatgatagaatgaagaccacaataaaagagacctctacttagctcagcaattcttacctttcttacctatttgatgaagatgtcttttgaaaggtgtactgcaaggaacaaaatgtttgtaaattctccttttaccaaggtttcttttttaattgatgccaaagagttccaatattgaacatcttaagtctgttacttggattacggattgagtttggagcttactcagaggactacaggagagtatccaggaagtagcaagaaatgtggataattactgtaccttcctcatggaaaaagttttatttaaagtgttatttctcattgaatactatcaaaaaggaaaaaaaaatgacctaaacttttgagatagatttggctctagtaagtatttagttatatcacttgcatatctgggagaagaaataagagactatcatcagtacattcccatctactaaaaaaatttattttacacatgtcaagggattacttataacttccattttattacgaattgcttgaacctgggaggtggaggttgcagtgggctaagatggcaccactgcactccagcctgggtgagagagcaagaccctgcctcagaaaaaaaaaaaaaaaaaatctaagacctgtatatcaaattttgagtttgtttcttcttttgtacctcaatagttacatttatcaaaaagctgagctgttgtaaaattgtggaattcacattggatattcaaaaacatttcttactattaatgacaaccaatagttatggatatttcattttaaacatggttataaaatgtaaacatgacactaataagctcaataaatgtttggcctgtctagtataataaa

SEQ ID NO: 1340 - DNA, 692 bp, Homo sapiens
  source 1..692: mol_type = genomic DNA
ctgatctcatcaatctagcgggagagacaggataacctgtccgagagtatagcgccactatgactccgccggaaaaattactttaaaaatcgccaaaaattacttggagcaaagggcagtcggcggagcttcgccaaggctggcgcagtcggtttaataatgatagaatgaagaccacaataaaagagacctctacttagctcagcaattcttacctttcttacctatttgatgaagatgtcttttgaaaggtgtactgcaaggaacaaaatgtttgtaaattctccttttaccaaggtaaagatcaaattttataaatttacttgtttgtttatacaaggaaaaataacttcatatattgaatatattcaaaagtttaagcatttagttgtattgccctgttaagttggcatagcaaataaatgcttttcttttcctcattttattctttgtgtttcctaacctatagcactgtgctgggcacagaatggacttcagttaagtttttgatgtagaaatgttttattattctacttaaaatctccttaaaaataattatgcatattacatcaatgttataatgtttaaacatagatttttttacatgcattctttttttcctgaaagaaaatattttttatattctttaggcgcgaatgtgtgtttaaaaaaaataaaaccttggagtaaag

SEQ ID NO: 1341 - DNA, 1267 bp, Homo sapiens
  source 1..1267: mol_type = genomic DNA
ggggagcagaaggccgcgggcgggcggctggcgcgctgtgtacttaggtcgtgtgctggggcttttctctcccaggagccggcggggggaggggagggggaggggccaccgctccgccttctccttttcgcaatgttgacgcaatctataaatagtggaacaaaaggaccaacttcctcggagctttgctgaaactgcacaaaaaatcgagccggggggttccctggtccccggcgatggggcggggagcgctgcgccgggggagggggcgggcgcggcggcgcgggccccgccgaggggggacacctggctgaggcacagctgccgccgtgcctttccgcgcgagcccagagctccgatccctgcgcgggctcgagagctcgccccgaacgggggtcttcctcctccgccgttgacaggttttgacctgtagcagagaaccaattctggagaacagcctcacttctttgattgaatacttacataatgcattggaacatgacatgagattaaggtttaataatgatagaatgaagaccacaataaaagagacctctacttagctcagcaattcttacctttcttacctatttgatgaagatgtcttttgaaaggtgtactgcaaggaacaaaatgtttgtaaattctccttttaccaaggtggataattactgtaccttcctcatggaaaaagttttatttaaagtgttatttctcattgaatactatcaaaaaggaaaaaaaaatgacctaaacttttgagatagatttggctctaggcctactctaggtgcggtacttcactatagtttataaaagatggtccctgtcagcaaagaactgtaacctgtatgagaatattatactaacatacaagaaacaagtagagaataatggaatgtaaactctggcttgctaacttaagtgtggtagaagcttgaaggaaatgtggacttaaacttatcagagaagacttataagaggatatgaaaggtgtaaattttgataccaccattgccgccttcccctcaaaaaaggtgagaactgactaaactactggtacttagaccatgtggagaaggaactgaaaatggaaacagaaacacgtctgtacagagcagagtgtcagataatagctcattttagtagagggcaataaatgccacatgagatgatcacctcagcagaaaactgtaagtaactggggacttacaggagaattgaacagttgtttctgctgactcagtaaaaagtcttcattttataa

SEQ ID NO: 1342 - DNA, 699 bp, Homo sapiens
  source 1..699: mol_type = genomic DNA
cgccattttcgagtgatgcctgatctcatcaatctagcgggagagacaggataacctgtccgagagtatagcgccactatgactccgccggaaaaattactttaaaaatcgccaaaaattacttggagcaaagggcagtcggcggagcttcgccaaggctggcgcagtcgggtttaataatgatagaatgaagaccacaataaaagagacctctacttagctcagcaattcttacctttcttacctatttgatgaagatgtcttttgaaaggtgtactgcaaggaacaaaatgtttgtaaattctccttttaccaaggtggataattactgtaccttcctcatggaaaaagttttatttaaagtgttatttctcattgaatactatcaaaaaggaaaaaaaaatgacctaaacttttgagatagatttggctctagtaagtatttagttatatcacttgcatatctgggagaagaaataagagactatcatcagtacattcccatctactaaaaaaatttattttacacatgtcaagggattacttataacttccattttattactaatagcttgaacccttttaatgaagacctaactcctccaccagaaatttaagtttatgttcttactttgtttacttataaaatacatctcaggtatttcggatgtcttttttttttctaagcctatatgaaat

SEQ ID NO: 1343 - DNA, 2090 bp, Homo sapiens
  source 1..2090: mol_type = genomic DNA
gatgcctgatctcatcaatctagcgggagagacaggataacctgtccgagagtatagcgccactatgactccgccggaaaaattactttaaaaatcgccaaaaattacttggagcaaagggcagtcggcggagcttcgccaaggctggcgcagtcgccgttttctcgacccggtgatggccgtcatctcgtgacaagaaacttaaggtcgacagaaaattcaggacccggagtcatgggtccctccggtgggtcgtggcaacagtcccccccgccaccgcccggcacccatctatctatattgtcttttgacgctgaagcgtgaggtgccccaggaaagagtttcccaagccctggctgccctcccccggcgcgctgggtcccggtgaggtctctaggtaggttttgacctgtagcagagaaccaattctggagaacagcctcacttctttgattgaatacttacataatgcattggaacatgacatgagattaaggtttaataatgatagaatgaagaccacaataaaagagacctctacttagctcagcaattcttacctttcttacctatttgatgaagatgtcttttgaaaggtgtactgcaaggaacaaaatgtttgtaaattctccttttaccaaggtttcttttttaattgatgccaaagagttccaatattgaacatcttaagtctgttacttggattacggattgagtttggagcttactcagaggactacaggagagtatccaggaagtggataattactgtaccttcctcatggaaaaagttttatttaaagtgttatttctcattgaatactatcaaaaaggaaaaaaaaatgacctaaacttttgagatagatttggctctagtaagtatttagttatatcacttgcatatctgggagaagaaataagagactatcatcagtacattcccatctactaaaaaaatttattttacacatgtcaagggattacttataacttccattttattactaatagcttgaacccttttaatgaagacctaactcctccaccagaaatttaagtttatgttcttactttgtttacttataaaatacatctcaggtatttcggatgtcttttttttttctaagcctatatgaaatgaaaaatatattggcaaaataaatgtttaaaccttttacgttaaaattactttgaaagatgaaaagttagtgctgtttttgtctacgttatactgaaattaaatgtttataatttatattttgggtttatgtataaatcatggaatttatgcaaaaatatgagtagtacagattctcctctaattctgtaggactttgaataatgtgatatttttcttataattggacccttgtgttttgaagaaatgccaactgcttgaagaatctccttgttatttgtattatttgctatagggttagatgttgagaaattctgctgacaaaaaattttaagccagttttacactaaatgttcctcagtctgattaatttgttattggatgtattctgtatctttcttttgtaatttgtaacttttatccacttagcacgaatgattctattaaagaaaatcattaggaagtggtagaaactttaaatcgccccagagtttgcctgtttccatattttattatcttataatcttcgggagtgcttacacttatggagctaacattttcagagatacagcttcttatagtaacactaaaactttcttcctctttggactgaatacctataattataactatatggtagtttaagtttccttgtgattagtcaaaaataccattttagtatgaagcaatgaagtctattatttgttgtcccataattgagaaagcttaaatacaccttttattaagagtttgtaaattctagcttagtctacacagatttttatatcaatttgtttatatttttattaatgtcatttctggaagtgtgaaaatgttaatgttcaacaagcaacattaaaaatagatttgaaacatttatatatagagaggtacacatttatttactgtttaggtactgaagattatcacttaataaaaaatatatatccca

SEQ ID NO: 1344 - DNA, 705 bp, Homo sapiens
  source 1..705: mol_type = genomic DNA
tgatctcatcaatctagcgggagagacaggataacctgtccgagagtatagcgccactatgactccgccggaaaaattactttaaaaatcgccaaaaattacttggagcaaagggcagtcggcggagcttcgccaaggctggcgcagtcggttttgacctgtagcagagaaccaattctggagaacagcctcacttctttgattgaatacttacataatgcattggaacatgacatgagattaagtgtataaagccaaatgtcccatttaaagtttgacatttgcaatagcattctatttaaaaggtttaataatgatagaatgaagaccacaataaaagagacctctacttagctcagcaattcttacctttcttacctatttgatgaagatgtcttttgaaaggtgtactgcaaggaacaaaatgtttgtaaattctccttttaccaaggtggataattactgtaccttcctcatggaaaaagttttatttaaagtgttatttctcattgaatactatcaaaaaggaaaaaaaaatgacctaaacttttgagatagatttggctctagtaagtatttagttatatcacttgcatatctgggagaagaaataagagactatcatcagtacattcccatctactaaaaaaatttattttacacatgtcaagggattacttataacttccattttattactaatag

SEQ ID NO: 1345 - DNA, 791 bp, Homo sapiens
  source 1..791: mol_type = genomic DNA
gatgcctgatctcatcaatctagcgggagagacaggataacctgtccgagagtatagcgccactatgactccgccggaaaaattactttaaaaatcgccaaaaattacttggagcaaagggcagtcggcggagcttcgccaaggctggcgcagtcggttttgacctgtagcagagaaccaattctggagaacagcctcacttctttgattgaatacttacataatgcattggaacatgacatgagattaaggtttaataatgatagaatgaagaccacaataaaagagacctctacttagctcagcaattcttacctttcttacctatttgatgaagatgtcttttgaaaggtgtactgcaaggaacaaaatgtttgtaaattctccttttaccaaggtaaagatcaaattttataaatttacttgtttgtttatacaaggaaaaataacttcatatattgaatatattcaaaagtttaagcatttagttgtattgccctgttaagttggcatagcaaataaatgcttttcttttcctcattttattctttgtgtttcctaacctatagcactgtgctgggcacagaatggacttcagttaagtttttgatgtagaaatgttttattattctacttaaaatctccttaaaaataattatgcatattacatcaatgttataatgtttaaacatagatttttttacatgcattctttttttcctgaaagaaaatattttttatattctttaggcgcgaatgtgtgtttaaaaaaaataaaaccttggagtaaa

SEQ ID NO: 1346 - DNA, 1251 bp, Homo sapiens
  source 1..1251: mol_type = genomic DNA
gatgcctgatctcatcaatctagcgggagagacaggataacctgtccgagagtatagcgccactatgactccgccggaaaaattactttaaaaatcgccaaaaattacttggagcaaagggcagtcggcggagcttcgccaaggctggcgcagtcggttttgacctgtagcagagaaccaattctggagaacagcctcacttctttgattgaatacttacataatgcattggaacatgacatgagattaaggtttaataatgatagaatgaagaccacaataaaagagacctctacttagctcagcaattcttacctttcttacctatttgatgaagatgtcttttgaaaggtgtactgcaaggaacaaaatgtttgtaaattctccttttaccaaggtggataattactgtaccttcctcatggaaaaagttttatttaaagtgttatttctcattgaatactatcaaaaaggaaaaaaaaatgacctaaacttttgagatagatttggctctagtaagtatttagttatatcacttgcatatctgggagaagaaataagagactatcatcagtacattcccatctactaaaaaaatttattttacacatgtcaagggattacttataacttccattttattactaatagcttgaacccttttaatgaagacctaactcctccaccagaaatttaagtttatgttcttactttgtttacttataaaatacatctcaggtatttcggatgtcttttttttttctaagcctatatgaaatgaaaaatatattggcaaaataaatgtttaaaccttttacgttaaaattactttgaaagatgaaaagttagtgctgtttttgtctacgttatactgaaattaaatgtttataatttatattttgggtttatgtataaatcatggaatttatgcaaaaatatgagtagtacagattctcctctaattctgtaggactttgaataatgtgatatttttcttataattggacccttgtgttttgaagaaatgccaactgcttgaagaatctccttgttatttgtattatttgctatagggttagatgttgagaaattctgctgacaaaaaattttaagccagttttacactaaatgttcctcagtctgattaatttgttattggatgtattctgtatctttcttttgtaatttgtaacttttatccacttagcacgaatgattctattaaagaaaatcattaggaagtggtagaaa

SEQ ID NO: 1347 - DNA, 5802 bp, Homo sapiens
  source 1..5802: mol_type = genomic DNA
tttatagcagcagtagaaatataccaccctagaggacacacctccttttagctaggtacctataaatgtccaggattttctattcaattgagaagaacccagcaaaatggggatctccacagtcatccttgaaatgtgtcttttatggggacaagttctatctacaggtgggtggatcccaaggactacagactacgcttcactgattccctcggaggtgcccttggatccaactgtagcagaaggttctccatttccctcggagtcgaccctggagtcaactgtagcagaaggttctccgatttccttggagtcaaccctggagtcaaccgtagcagaaggttctctgattccctcagagtcaaccctggagtcaactgtagcagaaggatctgattctggtttggccctgaggctggtgaatggagatggcaggtgtcagggccgagtggagatcctataccgaggctcctggggcaccgtgtgtgatgacagctgggacaccaatgatgccaacgtggtctgtaggcagctgggttgtggctgggccatgtcagctccaggaaatgcctggtttggccagggctcaggacccattgccctggatgatgtgcgctgctcaggacacgaatcctacctgtggagctgcccccacaatggctggctctcccataactgtggccatggtgaagatgctggtgttatctgctcagctgcccagcctcagtcaacactcaggccagaaagttggcctgtcaggatatcaccacctgtacccacagaaggatctgaatccagtttggccctgaggctggtgaatggaggcgacaggtgtcgaggccgagtggaggtcctataccgaggctcctggggcaccgtgtgtgatgactactgggacaccaatgatgccaatgtggtctgcaggcagctgggctgtggctgggccatgtcagccccaggaaatgcccagtttggccagggctcaggacccattgtcctggatgatgtgcgctgctcaggacatgagtcctacctgtggagctgcccccacaatggctggctcacccacaactgtggccatagtgaagacgctggtgtcatctgctcagctccccagtcccggccgacacccagcccagatacttggccgacctcacatgcatcaacagcaggacctgaatccagtttggccctgaggctggtgaatggaggtgacaggtgtcagggccgagtggaggtcctataccgaggctcctggggcaccgtgtgtgatgatagctgggacaccagtgacgccaatgtggtctgccggcagctgggctgtggctgggccacgtcagccccaggaaatgcccggtttggccagggttcaggacccattgtcctggatgacgtgcgctgctcaggctatgagtcctacctgtggagctgcccccacaatggctggctctcccataactgtcagcacagtgaagacgctggtgtcatctgctcagctgcccactcctggtcgacgcccagtccagacacattgccgaccatcaccttgcctgcatcgacagtaggatctgaatccagtttggccctgaggctggtgaatggaggtgacaggtgtcagggccgagtggaggtcctataccaaggctcctggggcaccgtgtgcgatgacagctgggacaccaatgatgccaatgtcgtctgcaggcaactgggctgtggctgggccatgtcagccccaggaaatgcccggtttggtcagggctcaggacccattgtcctggatgatgtgcgctgctcaggacacgagtcttacctgtggagctgcccccacaatggctggctctcccacaactgtggccatagtgaagacgctggtgtcatctgctcagcttcccagtcccggccaacacctagtccagacacttggccaacctcacatgcatcaacagcaggatctgaatccagtttggccctgaggctggtgaatggaggtgacaggtgtcagggccgagtggaggtcctataccgaggctcctggggcaccgtgtgtgatgactactgggacaccaatgatgccaatgtggtttgcaggcagctgggctgtggctgggccatgtcagccccaggaaatgcccggtttggccagggttcaggacccattgtcctggatgatgtgcgctgctcaggacatgagtcctatctgtggagctgcccccacaatggctggctctcccacaactgtggccatcatgaagacgctggtgtcatctgctcagcttcccagtcccagccgacacccagcccagacacttggccaacctcacatgcatcaacagcaggatctgaatccagtttggccctgaggctggtgaatggaggtgacaggtgtcagggccgagtggaggtcctataccgaggctcctggggcaccgtgtgtgatgactactgggacaccaatgatgccaatgtggtttgcaggcagctgggctgtggctgggccacgtcagccccaggaaatgcccggtttggccagggttcaggacccattgtcctggatgatgtgcgctgctcaggacatgagtcctatctgtggagctgcccccacaatggctggctctcccacaactgtggccatcatgaagacgctggtgtcatctgctcagcttcccagtcccagccgacacccagcccagacacttggccaacctctcgtgcatcaacagcaggatctgaatccactttggccctgagactggtgaatggaggtgacaggtgtcgaggccgagtggaggtcctataccaaggctcctggggcaccgtgtgtgatgactactgggacaccaatgatgccaacgtggtctgcaggcagctgggctgtggctgggccatgtcagccccaggaaatgcccagtttggccagggctcaggacccattgtcctggatgatgtgcgctgctcaggacacgagtcttacctgtggagctgcccccacaatggctggctctcccacaactgtggccatcatgaagatgctggtgtcatctgctcagctgctcagtcccagtcaacgcccaggccagatacttggctgaccaccaacttaccggcattgacagtaggatctgaatccagtttggctctgaggctggtgaatggaggtgacaggtgtcgaggccgagtggaggtcctgtatcgaggctcctggggaaccgtgtgtgatgacagctgggacaccaatgatgccaatgtggtctgcaggcagctgggctgtggctgggccatgtcggccccaggaaatgcccggtttggccagggctcaggacccattgtcctggatgatgtgcgctgctcagggaatgagtcctacctgtggagctgcccccacaaaggctggctcacccacaactgtggccatcacgaagacgctggtgtcatctgctcagccacccaaataaattctactacgacagattggtggcatccaacaactacaaccactgcaagaccctcttcaaattgtggtggcttcttattctatgccagtgggacattctccagcccatcctaccctgcatactaccccaacaatgctaagtgtgtttgggaaatagaagtgaattctggttatcgcataaacctgggcttcagtaatctgaaattggaggcacaccataactgcagttttgattatgttgaaatctttgatggatcattgaatagcagtctcctgctggggaaaatctgtaatgataccaggcaaatatttacatcttcttacaaccgaatgaccattcactttcgaagtgacatcagtttccaaaacactggctttttggcttggtataactccttcccaagcgatgccaccttgaggttggtcaatttaaattcatcctatggtctatgtgccgggcgtgtagaaatttaccatggtggcacctgggggacagtttgtgatgactcctggaccattcaggaagctgaggtggtctgcagacagctagggtgtggacgtgcagtttcagcccttggaaatgcatattttggctctggctctggccccatcaccctggacgatgtagagtgctcagggacggaatccactctctggcagtgccggaaccgaggctggttctcccacaactgtaatcatcgtgaagatgctggtgtcatctgctcaggaaaccatctatcgacacctgctccttttctcaacatcacccgtccaaacacagattattcctgcggaggcttcctatcccaaccatcaggggacttttccagcccattctatcccgggaactatccaaacaatgccaagtgtgtgtgggacattgaggtgcaaaacaactaccgtgtgactgtgatcttcagagatgtccagcttgaaggtggctgcaactatgattatattgaagttttcgatggcccctaccgcagttcccctctcattgctcgagtttgtgatggggccagaggctccttcacttcttcctccaacttcatgtccattcgcttcatcagtgaccacagcatcacaaggagagggttccgggctgagtactactccagtccctccaatgacagcaccaacctgctctgtctgccaaatcacatgcaagccagtgtgagcaggagctatctccaatccttgggcttttctgccagtgaccttgtcatttccacctggaatggatactacgagtgtcggccccagataacgccgaacctggtgatattcacaattccctactcaggctgcggcaccttcaagcaggcagacaatgacaccatcgactattccaacttcctcacagcagctgtctcaggtggcatcatcaagaggaggacagacctccgtattcacgtcagctgcagaatgcttcagaacacctgggtcgacaccatgtacattgctaatgacaccatccacgttgctaataacaccatccaggtcgaggaagtccagtatggcaattttgacgtgaacatttccttttatacttcctcatctttcttgtatcctgtgaccagccgcccttactacgtggacctgaaccaggacttgtacgttcaggctgaaatcctccattctgatgctgtactgaccttgtttgtggacacctgcgtggcatcaccatactccaatgacttcacgtctttgacttatgatctaatccggagtggatgcgtgagggatgacacctacggaccctactcctcgccatctcttcgcattgcccgcttccggttcagggccttccacttcctgaaccgcttcccctccgtgtacctgcgttgtaaaatggtggtgtgcagagcgtatgacccctcttcccgctgctaccgaggctgtgtgttgaggtcgaagagggatgtgggctcctaccaggaaaaggtggacgtcgtcctgggtcccatccagctgcagacccccccacgccgagaagaggagcctcggtaggtggtcgctctcagaccccactgtccaccggggcgcagacccctgactcggggacttgggatgttcctcttggtgtcatattccaactcagattgagccctacattgtgctgcacctggtcatacggagttgaatcagacctggttcccgcctcccccaaggctcatggtccttggaggacccgttgcagggtgaggtcaagagagttctgacctggatggcccatagacctgacgtcccagaatccatgcttctcatctgcaaaatgaaaatgtcaatacttacttcttagcactgttgagagggttacttacataaaggaattttggtgaaactgc

SEQ ID NO: 1348 - DNA, 5802 bp, Homo sapiens; identical to SEQ ID NO: 1347
  source 1..5802: mol_type = genomic DNA

SEQ ID NO: 1349 - DNA, 7686 bp, Homo sapiens
  source 1..7686: mol_type = genomic DNA
tttatagcagcagtagaaatataccaccctagaggacacacctccttttagctaggtacctataaatgtccaggattttctattcaattgagaagaacccagcaaaatggggatctccacagtcatccttgaaatgtgtcttttatggggacaagttctatctacaggtgggtggatcccaaggactacagactacgcttcactgattccctcggaggtgcccttggatccaactgtagcagaaggttctccatttccctcggagtcgaccctggagtcaactgtagcagaaggttctccgatttccttggagtcaaccctggagtcaaccgtagcagaaggttctctgattccctcagagtcaaccctggagtcaactgtagcagaaggatctgattctggtttggccctgaggctggtgaatggagatggcaggtgtcagggccgagtggagatcctataccgaggctcctggggcaccgtgtgtgatgacagctgggacaccaatgatgccaacgtggtctgtaggcagctgggttgtggctgggccatgtcagctccaggaaatgcctggtttggccagggctcaggacccattgccctggatgatgtgcgctgctcaggacacgaatcctacctgtggagctgcccccacaatggctggctctcccataactgtggccatggtgaagatgctggtgttatctgctcagctgcccagcctcagtcaacactcaggccagaaagttggcctgtcaggatatcaccacctgtacccacagaaggatctgaatccagtttggccctgaggctggtgaatggaggcgacaggtgtcgaggccgagtggaggtcctataccgaggctcctggggcaccgtgtgtgatgactactgggacaccaatgatgccaatgtggtctgcaggcagctgggctgtggctgggccatgtcagccccaggaaatgcccagtttggccagggctcaggacccattgtcctggatgatgtgcgctgctcaggacatgagtcctacctgtggagctgcccccacaatggctggctcacccacaactgtggccatagtgaagacgctggtgtcatctgctcagctccccagtcccggccgacacccagcccagatacttggccgacctcacatgcatcaacagcaggacctgaatccagtttggccctgaggctggtgaatggaggtgacaggtgtcagggccgagtggaggtcctataccgaggctcctggggcaccgtgtgtgatgatagctgggacaccagtgacgccaatgtggtctgccggcagctgggctgtggctgggccacgtcagccccaggaaatgcccggtttggccagggttcaggacccattgtcctggatgacgtgcgctgctcaggctatgagtcctacctgtggagctgcccccacaatggctggctctcccataactgtcagcacagtgaagacgctggtgtcatctgctcagctgcccactcctggtcgacgcccagtccagacacgttgccgaccatcaccttacctgcatcgacagtaggatctgaatccagtttggccctgaggctggtgaatggaggtgacaggtgtcagggccgagtggaggtcctataccgaggctcctggggcaccgtgtgtgatgacagctgggacaccaatgatgccaatgtggtctgcaggcagctgggctgtggctgggccatgttggccccaggaaatgcccggtttggtcagggctcaggacccattgtcctggatgacgtgcgctgctcagggaatgagtcctacttgtggagctgcccccacaatggctggctctcccataactgtggccatagtgaagacgctggtgtcatctgctcaggacctgaatccagtttggccctgaggctggtgaatggaggtgacaggtgtcagggccgagtggaggtcctataccgaggctcttggggcaccgtgtgtgatgacagctgggacaccaatgatgccaatgtggtctgcaggcagctgggctgtggctgggccacgtcagccccaggaaatgcccggtttggtcagggctcaggacccattgtcctggatgatgtgcgctgctcaggacatgagtcctacctgtggagctgccccaacaatggctggctctcccacaactgtggccatcatgaagatgctggtgtcatctgctcagctgcccagtcccggtcgacgcccaggccagacacgttgtcgaccatcacgttacctccatcgacagtaggatctgaatccagtttgaccctgaggctggtgaatggaagtgacaggtgtcagggccgagtagaggtcctataccgaggctcctggggcaccgtgtgtgatgacagctgggataccaatgatgccaatgtggtctgcaggcagctgggctgtggctgggccacgtcggccccaggaaatgcccggtttggccagggctcaggacccattgttctggatgatgtgcgctgctcaggacacgagtcctacctgtggagctgcccccacaatggctggctctcccacaactgtggccatcatgaagatgctggtgtcatctgctcagtttcccagtcccggccgacacccagtccagatacttggccgacctcacatgcatcaacagcaggacctgaatccagtttggccctgaggctggtgaatggaggtgacaggtgtcagggccgagtggaggtcctataccgaggctcctggggcaccgtgtgtgatgatagctgggacaccagtgacgccaatgtggtctgccggcagctgggctgtggctgggccacgtcagccccaggaaatgcccggtttggccagggttcaggacccattgtcctggatgacgtgcgctgctcaggctatgagtcctacctgtggagctgcccccacaatggctggctctcccataactgtcagcacagtgaagacgctggtgtcatctgctcagctgcccactcctggtcgacgcccagtccagacacattgccgaccatcaccttgcctgcatcgacagtaggatctgaatccagtttggccctgaggctggtgaatggaggtgacaggtgtcagggccgagtggaggtcctataccaaggctcctggggcaccgtgtgcgatgacagctgggacaccaatgatgccaatgtcgtctgcaggcaactgggctgtggctgggccatgtcagccccaggaaatgcccggtttggtcagggctcaggacccattgtcctggatgatgtgcgctgctcaggacacgagtcttacctgtggagctgcccccacaatggctggctctcccacaactgtggccatagtgaagacgctggtgtcatctgctcagcttcccagtcccggccaacacctagtccagacacttggccaacctcacatgcatcaacagcaggatctgaatccagtttggccctgaggctggtgaatggaggtgacaggtgtcagggccgagtggaggtcctataccgaggctcctggggcaccgtgtgtgatgactactgggacaccaatgatgccaatgtggtttgcaggcagctgggctgtggctgggccatgtcagccccaggaaatgcccggtttggccagggttcaggacccattgtcctggatgatgtgcgctgctcaggacatgagtcctatctgtggagctgcccccacaatggctggctctcccacaactgtggccatcatgaagacgctggtgtcatctgctcagcttcccagtcccagccgacacccagcccagacacttggccaacctcacatgcatcaacagcaggatctgaatccagtttggccctgaggctggtgaatggaggtgacaggtgtcagggccgagtggaggtcctataccgaggctcctggggcaccgtgtgtgatgactactgggacaccaatgatgccaatgtggtttgcaggcagctgggctgtggctgggccacgtcagccccaggaaatgcccggtttggccagggttcaggacccattgtcctggatgatgtgcgctgctcaggacatgagtcctatctgtggagctgcccccacaatggctggctctcccacaactgtggccatcatgaagacgctggtgtcatctgctcagcttcccagtcccagccgacacccagcccagacacttggccaacctcacatgcatcaacagcaggatctgaatccagtttggccctgaggctggtgaatggaggtgacaggtgtcagggccgagtggaggtcctataccgaggctcctggggcaccgtgtgtgatgactactgggacaccaatgatgccaatgtggtttgcaggcagctgggctgtggctgggccacgtcagccccaggaaatgcccggtttggccagggttcaggacccattgtcctggatgatgtgcgctgctcaggacatgagtcctatctgtggagctgcccccacaatggctggctctcccacaactgtggccatcatgaagacgctggtgtcatctgctcagcttcccagtcccagccgacacccagcccagacacttggccaacctctcgtgcatcaacagcaggatctgaatccactttggccctgagactggtgaatggaggtgacaggtgtcgaggccgagtggaggtcctataccaaggctcctggggcaccgtgtgtgatgactactgggacaccaatgatgccaacgtggtctgcaggcagctgggctgtggctgggccatgtcagccccaggaaatgcccagtttggccagggctcaggacccattgtcctggatgatgtgcgctgctcaggacacgagtcttacctgtggagctgcccccacaatggctggctctcccacaactgtggccatcatgaagatgctggtgtcatctgctcagctgctcagtcccagtcaacgcccaggccagatacttggctgaccaccaacttaccggcattgacagtaggatctgaatccagtttggctctgaggctggtgaatggaggtgacaggtgtcgaggccgagtggaggtcctgtatcgaggctcctggggaaccgtgtgtgatgacagctgggacaccaatgatgccaatgtggtctgcaggcagctgggctgtggctgggccatgtcggccccaggaaatgcccggtttggccagggctcaggacccattgtcctggatgatgtgcgctgctcagggaatgagtcctacctgtggagctgcccccacaaaggctggctcacccacaactgtggccatcacgaagacgctggtgtcatctgctcagccacccaaataaattctactacgacagattggtggcatccaacaactacaaccactgcaagaccctcttcaaattgtggtggcttcttattctatgccagtgggacattctccagcccatcctaccctgcatactaccccaacaatgctaagtgtgtttgggaaatagaagtgaattctggttatcgcataaacctgggcttcagtaatctgaaattggaggcacaccataactgcagttttgattatgttgaaatctttgatggatcattgaatagcagtctcctgctggggaaaatctgtaatgataccaggcaaatatttacatcttcttacaaccgaatgaccattcactttcgaagtgacatcagtttccaaaacactggctttttggcttggtataactccttcccaagcgatgccaccttgaggttggtcaatttaaattcatcctatggtctatgtgccgggcgtgtagaaatttaccatggtggcacctgggggacagtttgtgatgactcctggaccattcaggaagctgaggtggtctgcagacagctagggtgtggacgtgcagtttcagcccttggaaatgcatattttggctctggctctggccccatcaccctggacgatgtagagtgctcagggacggaatccactctctggcagtgccggaaccgaggctggttctcccacaactgtaatcatcgtgaagatgctggtgtcatctgctcaggaaaccatctatcgacacctgctccttttctcaacatcacccgtccaaacacagattattcctgcggaggcttcctatcccaaccatcaggggacttttccagcccattctatcccgggaactatccaaacaatgccaagtgtgtgtgggacattgaggtgcaaaacaactaccgtgtgactgtgatcttcagagatgtccagcttgaaggtggctgcaactatgattatattgaagttttcgatggcccctaccgcagttcccctctcattgctcgagtttgtgatggggccagaggctccttcacttcttcctccaacttcatgtccattcgcttcatcagtgaccacagcatcacaaggagagggttccgggctgagtactactccagtccctccaatgacagcaccaacctgctctgtctgccaaatcacatgcaagccagtgtgagcaggagctatctccaatccttgggcttttctgccagtgaccttgtcatttccacctggaatggatactacgagtgtcggccccagataacgccgaacctggtgatattcacaattccctactcaggctgcggcaccttcaagcaggcagacaatgacaccatcgactattccaacttcctcacagcagctgtctcaggtggcatcatcaagaggaggacagacctccgtattcacgtcagctgcagaatgcttcagaacacctgggtcgacaccatgtacattgctaatgacaccatccacgttgctaataacaccatccaggtcgaggaagtccagtatggcaattttgacgtgaacatttccttttatacttcctcatctttcttgtatcctgtgaccagccgcccttactacgtggacctgaaccaggacttgtacgttcaggctgaaatcctccattctgatgctgtactgaccttgtttgtggacacctgcgtggcatcaccatactccaatgacttcacgtctttgacttatgatctaatccggagtggatgcgtgagggatgacacctacggaccctactcctcgccatctcttcgcattgcccgcttccggttcagggccttccacttcctgaaccgcttcccctccgtgtacctgcgttgtaaaatggtggtgtgcagagcgtatgacccctcttcccgctgctaccgaggctgtgtgttgaggtcgaagagggatgtgggctcctaccaggaaaaggtggacgtcgtcctgggtcccatccagctgcagacccccccacgccgagaagaggagcctcggtaggtggtcgctctcagaccccactgtccaccggggcgcagacccctgactcggggacttgggatgttcctcttggtgtcatattccaactcagattgagccctacattgtgctgcacctggtcatacggagttgaatcagacctggttcccgcctcccccaaggctcatggtccttggaggacccgttgcagggtgaggtcaagagagttctgacctggatggcccatagacctgacgtcccagaatccatgcttctcatctgcaaaatgaaaatgtcaatacttacttcttagcactgttgagagggttacttacataaaggaattttggtgaaactgc

SEQ ID NO: 1350 - DNA, 5802 bp, Homo sapiens; identical to SEQ ID NO: 1347
  source 1..5802: mol_type = genomic DNA

SEQ ID NO: 1351 - DNA, 7686 bp, Homo sapiens; identical to SEQ ID NO: 1349
  source 1..7686: mol_type = genomic DNA

SEQ ID NO: 1352 - DNA, 7686 bp, Homo sapiens; identical to SEQ ID NO: 1349
  source 1..7686: mol_type = genomic DNA

SEQ ID NO: 1353 - DNA, 7656 bp, Homo sapiens
  source 1..7656: mol_type = genomic DNA
tttatagcagcagtagaaatataccaccctagaggacacacctccttttagctaggtacctataaatgtccaggattttctattcaattgagaagaacccagcaaaatggggatctccacagtcatccttgaaatgtgtcttttatggggacaagttctatctacaggtgggtggatcccaaggactacagactacgcttcactgattccctcggaggtgcccttggatccaactgtagcagaaggttctccatttccctcggagtcgaccctggagtcaactgtagcagaaggttctccgatttccttggagtcaaccctggagtcaaccgtagcagaaggttctctgattccctcagagtcaaccctggagtcaactgtagcagaaggatctgattctggtttggccctgaggctggtgaatggagatggcaggtgtcagggccgagtggagatcctataccgaggctcctggggcaccgtgtgtgatgacagctgggacaccaatgatgccaacgtggtctgtaggcagctgggttgtggctgggccatgtcagctccaggaaatgcctggtttggccagggctcaggacccattgccctggatgatgtgcgctgctcaggacacgaatcctacctgtggagctgcccccacaatggctggctctcccataactgtggccatggtgaagatgctggtgttatctgctcagctgcccagcctcagtcaacactcaggccagaaagttggcctgtcaggatatcaccacctgtacccacagaaggatctgaatccagtttggccctgaggctggtgaatggaggcgacaggtgtcgaggccgagtggaggtcctataccgaggctcctggggcaccgtgtgtgatgactactgggacaccaatgatgccaatgtggtctgcaggcagctgggctgtggctgggccatgtcagccccaggaaatgcccagtttggccagggctcaggacccattgtcctggatgatgtgcgctgctcaggacatgagtcctacctgtggagctgcccccacaatggctggctcacccacaactgtggccatagtgaagacgctggtgtcatctgctcagctccccagtcccggccgacacccagcccagatacttggccgacctcacatgcatcaacagcaggacctgaatccagtttggccctgaggctggtgaatggaggtgacaggtgtcagggccgagtggaggtcctataccgaggctcctggggcaccgtgtgtgatgatagctgggacaccagtgacgccaatgtggtctgccggcagctgggctgtggctgggccacgtcagccccaggaaatgcccggtttggccagggttcaggacccattgtcctggatgacgtgcgctgctcaggctatgagtcctacctgtggagctgcccccacaatggctggctctcccataactgtcagcacagtgaagacgctggtgtcatctgctcagacacgttgccgaccatcaccttacctgcatcgacagtaggatctgaatccagtttggccctgaggctggtgaatggaggtgacaggtgtcagggccgagtggaggtcctataccgaggctcctggggcaccgtgtgtgatgacagctgggacaccaatgatgccaatgtggtctgcaggcagctgggctgtggctgggccatgttggccccaggaaatgcccggtttggtcagggctcaggacccattgtcctggatgacgtgcgctgctcagggaatgagtcctacttgtggagctgcccccacaatggctggctctcccataactgtggccatagtgaagacgctggtgtcatctgctcaggacctgaatccagtttggccctgaggctggtgaatggaggtgacaggtgtcagggccgagtggaggtcctataccgaggctcttggggcaccgtgtgtgatgacagctgggacaccaatgatgccaatgtggtctgcaggcagctgggctgtggctgggccacgtcagccccaggaaatgcccggtttggtcagggctcaggacccattgtcctggatgatgtgcgctgctcaggacatgagtcctacctgtggagctgccccaacaatggctggctctcccacaactgtggccatcatgaagatgctggtgtcatctgctcagctgcccagtcccggtcgacgcccaggccagacacgttgtcgaccatcacgttacctccatcgacagtaggatctgaatccagtttgaccctgaggctggtgaatggaagtgacaggtgtcagggccgagtagaggtcctataccgaggctcctggggcaccgtgtgtgatgacagctgggataccaatgatgccaatgtggtctgcaggcagctgggctgtggctgggccacgtcggccccaggaaatgcccggtttggccagggctcaggacccattgttctggatgatgtgcgctgctcaggacacgagtcctacctgtggagctgcccccacaatggctggctctcccacaactgtggccatcatgaagatgctggtgtcatctgctcagtttcccagtcccggccgacacccagtccagatacttggccgacctcacatgcatcaacagcaggacctgaatccagtttggccctgaggctggtgaatggaggtgacaggtgtcagggccgagtggaggtcctataccgaggctcctggggcaccgtgtgtgatgatagctgggacaccagtgacgccaatgtggtctgccggcagctgggctgtggctgggccacgtcagccccaggaaatgcccggtttggccagggttcaggacccattgtcctggatgacgtgcgctgctcaggctatgagtcctacctgtggagctgcccccacaatggctggctctcccataactgtcagcacagtgaagacgctggtgtcatctgctcagctgcccactcctggtcgacgcccagtccagacacattgccgaccatcaccttgcctgcatcgacagtaggatctgaatccagtttggccctgaggctggtgaatggaggtgacaggtgtcagggccgagtggaggtcctataccaaggctcctggggcaccgtgtgcgatgacagctgggacaccaatgatgccaatgtcgtctgcaggcaactgggctgtggctgggccatgtcagccccaggaaatgcccggtttggtcagggctcaggacccattgtcctggatgatgtgcgctgctcaggacacgagtcttacctgtggagctgcccccacaatggctggctctcccacaactgtggccatagtgaagacgctggtgtcatctgctcagcttcccagtcccggccaacacctagtccagacacttggccaacctcacatgcatcaacagcaggatctgaatccagtttggccctgaggctggtgaatggaggtgacaggtgtcagggccgagtggaggtcctataccgaggctcctggggcaccgtgtgtgatgactactgggacaccaatgatgccaatgtggtttgcaggcagctgggctgtggctgggccatgtcagccccaggaaatgcccggtttggccagggttcaggacccattgtcctggatgatgtgcgctgctcaggacatgagtcctatctgtggagctgcccccacaatggctggctctcccacaactgtggccatcatgaagacgctggtgtcatctgctcagcttcccagtcccagccgacacccagcccagacacttggccaacctcacatgcatcaacagcaggatctgaatccagtttggccctgaggctggtgaatggaggtgacaggtgtcagggccgagtggaggtcctataccgaggctcctggggcaccgtgtgtgatgactactgggacaccaatgatgccaatgtggtttgcaggcagctgggctgtggctgggccacgtcagccccaggaaatgcccggtttggccagggttcaggacccattgtcctggatgatgtgcgctgctcaggacatgagtcctatctgtggagctgcccccacaatggctggctctcccacaactgtggccatcatgaagacgctggtgtcatctgctcagcttcccagtcccagccgacacccagcccagacacttggccaacctcacatgcatcaacagcaggatctgaatccagtttggccctgaggctggtgaatggaggtgacaggtgtcagggccgagtggaggtcctataccgaggctcctggggcaccgtgtgtgatgactactgggacaccaatgatgccaatgtggtttgcaggcagctgggctgtggctgggccacgtcagccccaggaaatgcccggtttggccagggttcaggacccattgtcctggatgatgtgcgctgctcaggacatgagtcctatctgtggagctgcccccacaatggctggctctcccacaactgtggccatcatgaagacgctggtgtcatctgctcagcttcccagtcccagccgacacccagcccagacacttggccaacctctcgtgcatcaacagcaggatctgaatccactttggccctgagactggtgaatggaggtgacaggtgtcgaggccgagtggaggtcctataccaaggctcctggggcaccgtgtgtgatgactactgggacaccaatgatgccaacgtggtctgcaggcagctgggctgtggctgggccatgtcagccccaggaaatgcccagtttggccagggctcaggacccattgtcctggatgatgtgcgctgctcaggacacgagtcttacctgtggagctgcccccacaatggctggctctcccacaactgtggccatcatgaagatgctggtgtcatctgctcagctgctcagtcccagtcaacgcccaggccagatacttggctgaccaccaacttaccggcattgacagtaggatctgaatccagtttggctctgaggctggtgaatggaggtgacaggtgtcgaggccgagtggaggtcctgtatcgaggctcctggggaaccgtgtgtgatgacagctgggacaccaatgatgccaatgtggtctgcaggcagctgggctgtggctgggccatgtcggccccaggaaatgcccggtttggccagggctcaggacccattgtcctggatgatgtgcgctgctcagggaatgagtcctacctgtggagctgcccccacaaaggctggctcacccacaactgtggccatcacgaagacgctggtgtcatctgctcagccacccaaataaattctactacgacagattggtggcatccaacaactacaaccactgcaagaccctcttcaaattgtggtggcttcttattctatgccagtgggacattctccagcccatcctaccctgcatactaccccaacaatgctaagtgtgtttgggaaatagaagtgaattctggttatcgcataaacctgggcttcagtaatctgaaattggaggcacaccataactgcagttttgattatgttgaaatctttgatggatcattgaatagcagtctcctgctggggaaaatctgtaatgataccaggcaaatatttacatcttcttacaaccgaatgaccattcactttcgaagtgacatcagtttccaaaacactggctttttggcttggtataactccttcccaagcgatgccaccttgaggttggtcaatttaaattcatcctatggtctatgtgccgggcgtgtagaaatttaccatggtggcacctgggggacagtttgtgatgactcctggaccattcaggaagctgaggtggtctgcagacagctagggtgtggacgtgcagtttcagcccttggaaatgcatattttggctctggctctggccccatcaccctggacgatgtagagtgctcagggacggaatccactctctggcagtgccggaaccgaggctggttctcccacaactgtaatcatcgtgaagatgctggtgtcatctgctcaggaaaccatctatcgacacctgctccttttctcaacatcacccgtccaaacacagattattcctgcggaggcttcctatcccaaccatcaggggacttttccagcccattctatcccgggaactatccaaacaatgccaagtgtgtgtgggacattgaggtgcaaaacaactaccgtgtgactgtgatcttcagagatgtccagcttgaaggtggctgcaactatgattatattgaagttttcgatggcccctaccgcagttcccctctcattgctcgagtttgtgatggggccagaggctccttcacttcttcctccaacttcatgtccattcgcttcatcagtgaccacagcatcacaaggagagggttccgggctgagtactactccagtccctccaatgacagcaccaacctgctctgtctgccaaatcacatgcaagccagtgtgagcaggagctatctccaatccttgggcttttctgccagtgaccttgtcatttccacctggaatggatactacgagtgtcggccccagataacgccgaacctggtgatattcacaattccctactcaggctgcggcaccttcaagcaggcagacaatgacaccatcgactattccaacttcctcacagcagctgtctcaggtggcatcatcaagaggaggacagacctccgtattcacgtcagctgcagaatgcttcagaacacctgggtcgacaccatgtacattgctaatgacaccatccacgttgctaataacaccatccaggtcgaggaagtccagtatggcaattttgacgtgaacatttccttttatacttcctcatctttcttgtatcctgtgaccagccgcccttactacgtggacctgaaccaggacttgtacgttcaggctgaaatcctccattctgatgctgtactgaccttgtttgtggacacctgcgtggcatcaccatactccaatgacttcacgtctttgacttatgatctaatccggagtggatgcgtgagggatgacacctacggaccctactcctcgccatctcttcgcattgcccgcttccggttcagggccttccacttcctgaaccgcttcccctccgtgtacctgcgttgtaaaatggtggtgtgcagagcgtatgacccctcttcccgctgctaccgaggctgtgtgttgaggtcgaagagggatgtgggctcctaccaggaaaaggtggacgtcgtcctgggtcccatccagctgcagacccccccacgccgagaagaggagcctcggtaggtggtcgctctcagaccccactgtccaccggggcgcagacccctgactcggggacttgggatgttcctcttggtgtcatattccaactcagattgagccctacattgtgctgcacctggtcatacggagttgaatcagacctggttcccgcctcccccaaggctcatggtccttggaggacccgttgcagggtgaggtcaagagagttctgacctggatggcccatagacctgacgtcccagaatccatgcttctcatctgcaaaatgaaaatgtcaatacttacttcttagcactgttgagagggttacttacataaaggaattttggtgaaactgc

SEQ ID NO: 1354 - DNA, 7686 bp, Homo sapiens; identical to SEQ ID NO: 1349
  source 1..7686: mol_type = genomic DNA

SEQ ID NO: 1355 - DNA, 3826 bp, Homo sapiens
  source 1..3826: mol_type = genomic DNA
ataccaccctagaggacacacctccttttagctaggtacctataaatgtccaggattttctattcaattgagaagaacccagcaaaatggggatctccacagtcatccttgaaatgtgtcttttatggggacaagttctatctacaggtgggtggatcccaaggactacagactacgcttcactgattccctcggaggtgcccttggatccaactgtagcagaaggttctccatttccctcggagtcgaccctggagtcaactgtagcagaaggttctccgatttccttggagtcaaccctggagtcaaccgtagcagaaggttctctgattccctcagagtcaaccctggagtcaactgtagcagaaggatctgattctggtttggccctgaggctggtgaatggagatggcaggtgtcagggccgagtggagatcctataccgaggctcctggggcaccgtgtgtgatgacagctgggacaccaatgatgccaacgtggtctgtaggcagctgggttgtggctgggccatgtcagctccaggaaatgcctggtttggccagggctcaggacccattgccctggatgatgtgcgctgctcaggacacgaatcctacctgtggagctgcccccacaatggctggctctcccataactgtggccatggtgaagatgctggtgttatctgctcagctccccagtcccggccgacacccagcccagatacttggccgacctcacatgcatcaacagcaggatctgaatccagtttggccctgaggctggtgaatggaggtgacaggtgtcagggccgagtggaggtcctataccgaggctcctggggcaccgtgtgtgatgactactgggacaccaatgatgccaatgtggtttgcaggcagctgggctgtggctgggccacgtcagccccaggaaatgcccggtttggccagggttcaggacccattgtcctggatgatgtgcgctgctcaggacatgagtcctatctgtggagctgcccccacaatggctggctctcccacaactgtggccatcatgaagacgctggtgtcatctgctcagcttcccagtcccagccgacacccagcccagacacttggccaacctctcgtgcatcaacagcaggatctgaatccactttggccctgagactggtgaatggaggtgacaggtgtcgaggccgagtggaggtcctataccaaggctcctggggcaccgtgtgtgatgactactgggacaccaatgatgccaacgtggtctgcaggcagctgggctgtggctgggccatgtcagccccaggaaatgcccagtttggccagggctcaggacccattgtcctggatgatgtgcgctgctcaggacacgagtcttacctgtggagctgcccccacaatggctggctctcccacaactgtggccatcatgaagatgctggtgtcatctgctcagccacccaaataaattctactacgacagattggtggcatccaacaactacaaccactgcaagaccctcttcaaattgtggtggcttcttattctatgccagtgggacattctccagcccatcctaccctgcatactaccccaacaatgctaagtgtgtttgggaaatagaagtgaattctggttatcgcataaacctgggcttcagtaatctgaaattggaggcacaccataactgcagttttgattatgttgaaatctttgatggatcattgaatagcagtctcctgctggggaaaatctgtaatgataccaggcaaatatttacatcttcttacaaccgaatgaccattcactttcgaagtgacatcagtttccaaaacactggctttttggcttggtataactccttcccaagcgatgccaccttgaggttggtcaatttaaattcatcctatggtctatgtgccgggcgtgtagaaatttaccatggtggcacctgggggacagtttgtgatgactcctggaccattcaggaagctgaggtggtctgcagacagctagggtgtggacgtgcagtttcagcccttggaaatgcatattttggctctggctctggccccatcaccctggacgatgtagagtgctcagggacggaatccactctctggcagtgccggaaccgaggctggttctcccacaactgtaatcatcgtgaagatgctggtgtcatctgctcaggaaaccatctatcgacacctgctccttttctcaacatcacccgtccaaacacagattattcctgcggaggcttcctatcccaaccatcaggggacttttccagcccattctatcccgggaactatccaaacaatgccaagtgtgtgtgggacattgaggtgcaaaacaactaccgtgtgactgtgatcttcagagatgtccagcttgaaggtggctgcaactatgattatattgaagttttcgatggcccctaccgcagttcccctctcattgctcgagtttgtgatggggccagaggctccttcacttcttcctccaacttcatgtccattcgcttcatcagtgaccacagcatcacaaggagagggttccgggctgagtactactccagtccctccaatgacagcaccaacctgctctgtctgccaaatcacatgcaagccagtgtgagcaggagctatctccaatccttgggcttttctgccagtgaccttgtcatttccacctggaatggatactacgagtgtcggccccagataacgccgaacctggtgatattcacaattccctactcaggctgcggcaccttcaagcaggcagacaatgacaccatcgactattccaacttcctcacagcagctgtctcaggtggcatcatcaagaggaggacagacctccgtattcacgtcagctgcagaatgcttcagaacacctgggtcgacaccatgtacattgctaatgacaccatccacgttgctaataacaccatccaggtcgaggaagtccagtatggcaattttgacgtgaacatttccttttatacttcctcatctttcttgtatcctgtgaccagccgcccttactacgtggacctgaaccaggacttgtacgttcaggctgaaatcctccattctgatgctgtactgaccttgtttgtggacacctgcgtggcatcaccatactccaatgacttcacgtctttgacttatgatctaatccggagtggatgcgtgagggatgacacctacggaccctactcctcgccatctcttcgcattgcccgcttccggttcagggccttccacttcctgaaccgcttcccctccgtgtacctgcgttgtaaaatggtggtgtgcagagcgtatgacccctcttcccgctgctaccgaggctgtgtgttgaggtcgaagagggatgtgggctcctaccaggaaaaggtggacgtcgtcctgggtcccatccagctgcagacccccccacgccgagaagaggagcctcggtaggtggtcgctctcagaccccactgtccaccggggcgcagacccctgactcggggacttgggatgttcctcttggtgtcatattccaactcagattgagccctacattgtgctgcacctggtcatacggagttgaatcagacctggttcccgcctcccccaaggctcatggtccttggaggacccgttgcagggtgaggtcaagagagttctgacctggatggcccatagacctgacgtcccagaatccatgcttctcatctgcaaaatgaaaatgtcaatacttacttcttagcactgttgagagggttacttacataaaggaattttggtgaaactgc

SEQ ID NO: 1356 - DNA, 7686 bp, Homo sapiens; identical to SEQ ID NO: 1349
  source 1..7686: mol_type = genomic DNA

SEQ ID NO: 1357 - DNA, 8073 bp, Homo sapiens
  source 1..8073: mol_type = genomic DNA
tttatagcagcagtagaaatataccaccctagaggacacacctccttttagctaggtacctataaatgtccaggattttctattcaattgagaagaacccagcaaaatggggatctccacagtcatccttgaaatgtgtcttttatggggacaagttctatctacaggtgggtggatcccaaggactacagactacgcttcactgattccctcggaggtgcccttggatccaactgtagcagaaggttctccatttccctcggagtcgaccctggagtcaactgtagcagaaggttctccgatttccttggagtcaaccctggagtcaaccgtagcagaaggttctctgattccctcagagtcaaccctggagtcaactgtagcagaaggatctgattctggtttggccctgaggctggtgaatggagatggcaggtgtcagggccgagtggagatcctataccgaggctcctggggcaccgtgtgtgatgacagctgggacaccaatgatgccaacgtggtctgtaggcagctgggttgtggctgggccatgtcagctccaggaaatgcctggtttggccagggctcaggacccattgccctggatgatgtgcgctgctcaggacacgaatcctacctgtggagctgcccccacaatggctggctctcccataactgtggccatggtgaagatgctggtgttatctgctcagctgcccagcctcagtcaacactcaggccagaaagttggcctgtcaggatatcaccacctgtacccacagaaggatctgaatccagtttggccctgaggctggtgaatggaggcgacaggtgtcgaggccgagtggaggtcctataccgaggctcctggggcaccgtgtgtgatgactactgggacaccaatgatgccaatgtggtctgcaggcagctgggctgtggctgggccatgtcagccccaggaaatgcccagtttggccagggctcaggacccattgtcctggatgatgtgcgctgctcaggacatgagtcctacctgtggagctgcccccacaatggctggctcacccacaactgtggccatagtgaagacgctggtgtcatctgctcagctccccagtcccggccgacacccagcccagatacttggccgacctcacatgcatcaacagcaggacctgaatccagtttggccctgaggctggtgaatggaggtgacaggtgtcagggccgagtggaggtcctataccgaggctcctggggcaccgtgtgtgatgatagctgggacaccagtgacgccaatgtggtctgccggcagctgggctgtggctgggccacgtcagccccaggaaatgcccggtttggccagggttcaggacccattgtcctggatgacgtgcgctgctcaggctatgagtcctacctgtggagctgcccccacaatggctggctctcccataactgtcagcacagtgaagacgctggtgtcatctgctcagctgcccactcctggtcgacgcccagtccagacacgttgccgaccatcaccttacctgcatcgacagtaggatctgaatccagtttggccctgaggctggtgaatggaggtgacaggtgtcagggccgagtggaggtcctataccgaggctcctggggcaccgtgtgtgatgacagctgggacaccaatgatgccaatgtggtctgcaggcagctgggctgtggctgggccatgttggccccaggaaatgcccggtttggtcagggctcaggacccattgtcctggatgacgtgcgctgctcagggaatgagtcctacttgtggagctgcccccacaatggctggctctcccataactgtggccatagtgaagacgctggtgtcatctgctcaggacctgaatccagtttggccctgaggctggtgaatggaggtgacaggtgtcagggccgagtggaggtcctataccgaggctcttggggcaccgtgtgtgatgacagctgggacaccaatgatgccaatgtggtctgcaggcagctgggctgtggctgggccacgtcagccccaggaaatgcccggtttggtcagggctcaggacccattgtcctggatgatgtgcgctgctcaggacatgagtcctacctgtggagctgccccaacaatggctggctctcccacaactgtggccatcatgaagatgctggtgtcatctgctcagctgcccagtcccggtcgacgcccaggccagacacgttgtcgaccatcacgttacctccatcgacagtaggatctgaatccagtttgaccctgaggctggtgaatggaagtgacaggtgtcagggccgagtagaggtcctataccgaggctcctggggcaccgtgtgtgatgacagctgggataccaatgatgccaatgtggtctgcaggcagctgggctgtggctgggccacgtcggccccaggaaatgcccggtttggccagggctcaggacccattgttctggatgatgtgcgctgctcaggacacgagtcctacctgtggagctgcccccacaatggctggctctcccacaactgtggccatcatgaagatgctggtgtcatctgctcagtttcccagtcccggccgacacccagtccagatacttggccgacctcacatgcatcaacagcaggacctgaatccagtttggccctgaggctggtgaatggaggtgacaggtgtcagggccgagtggaggtcctataccgaggctcctggggcaccgtgtgtgatgatagctgggacaccagtgacgccaatgtggtctgccggcagctgggctgtggctgggccacgtcagccccaggaaatgcccggtttggccagggttcaggacccattgtcctggatgacgtgcgctgctcaggctatgagtcctacctgtggagctgcccccacaatggctggctctcccataactgtcagcacagtgaagacgctggtgtcatctgctcagctgcccactcctggtcgacgcccagtccagacacattgccgaccatcaccttgcctgcatcgacagtaggatctgaatccagtttggccctgaggctggtgaatggaggtgacaggtgtcagggccgagtggaggtcctataccaaggctcctggggcaccgtgtgcgatgacagctgggacaccaatgatgccaatgtcgtctgcaggcaactgggctgtggctgggccatgtcagccccaggaaatgcccggtttggtcagggctcaggacccattgtcctggatgatgtgcgctgctcaggacacgagtcttacctgtggagctgcccccacaatggctggctctcccacaactgtggccatagtgaagacgctggtgtcatctgctcagcttcccagtcccggccaacacctagtccagacacttggccaacctcacatgcatcaacagcaggatctgaatccagtttggccctgaggctggtgaatggaggtgacaggtgtcagggccgagtggaggtcctataccgaggctcctggggcaccgtgtgtgatgactactgggacaccaatgatgccaatgtggtttgcaggcagctgggctgtggctgggccatgtcagccccaggaaatgcccggtttggccagggttcaggacccattgtcctggatgatgtgcgctgctcaggacatgagtcctatctgtggagctgcccccacaatggctggctctcccacaactgtggccatcatgaagacgctggtgtcatctgctcagcttcccagtcccagccgacacccagcccagacacttggccaacctcacatgcatcaacagcaggatctgaatccagtttggccctgaggctggtgaatggaggtgacaggtgtcagggccgagtggaggtcctataccgaggctcctggggcaccgtgtgtgatgactactgggacaccaatgatgccaatgtggtttgcaggcagctgggctgtggctgggccacgtcagccccaggaaatgcccggtttggccagggttcaggacccattgtcctggatgatgtgcgctgctcaggacatgagtcctatctgtggagctgcccccacaatggctggctctcccacaactgtggccatcatgaagacgctggtgtcatctgctcagcttcccagtcccagccgacacccagcccagacacttggccaacctcacatgcatcaacagcaggatctgaatccagtttggccctgaggctggtgaatggaggtgacaggtgtcagggccgagtggaggtcctataccgaggctcctggggcaccgtgtgtgatgactactgggacaccaatgatgccaatgtggtttgcaggcagctgggctgtggctgggccacgtcagccccaggaaatgcccggtttggccagggttcaggacccattgtcctggatgatgtgcgctgctcaggacatgagtcctatctgtggagctgcccccacaatggctggctctcccacaactgtggccatcatgaagacgctggtgtcatctgctcagcttcccagtcccagccgacacccagcccagacacttggccaacctcacatgcatcaacagcaggatctgaatccagtttggccctgaggctggtgaatggaggtgacaggtgtcagggccgagtggaggtcctataccgaggctcctggggcaccgtgtgtgatgactactgggacaccaatgatgccaatgtggtttgcaggcagctgggctgtggctgggccacgtcagccccaggaaatgcccggtttggccagggttcaggacccattgtcctggatgatgtgcgctgctcaggacatgagtcctatctgtggagctgcccccacaatggctggctctcccacaactgtggccatcatgaagacgctggtgtcatctgctcagcttcccagtcccagccgacacccagcccagacacttggccaacctctcgtgcatcaacagcaggatctgaatccactttggccctgagactggtgaatggaggtgacaggtgtcgaggccgagtggaggtcctataccaaggctcctggggcaccgtgtgtgatgactactgggacaccaatgatgccaacgtggtctgcaggcagctgggctgtggctgggccatgtcagccccaggaaatgcccagtttggccagggctcaggacccattgtcctggatgatgtgcgctgctcaggacacgagtcttacctgtggagctgcccccacaatggctggctctcccacaactgtggccatcatgaagatgctggtgtcatctgctcagctgctcagtcccagtcaacgcccaggccagatacttggctgaccaccaacttaccggcattgacagtaggatctgaatccagtttggctctgaggctggtgaatggaggtgacaggtgtcgaggccgagtggaggtcctgtatcgaggctcctggggaaccgtgtgtgatgacagctgggacaccaatgatgccaatgtggtctgcaggcagctgggctgtggctgggccatgtcggccccaggaaatgcccggtttggccagggctcaggacccattgtcctggatgatgtgcgctgctcagggaatgagtcctacctgtggagctgcccccacaaaggctggctcacccacaactgtggccatcacgaagacgctggtgtcatctgctcagccacccaaataaattctactacgacagattggtggcatccaacaactacaaccactgcaagaccctcttcaaattgtggtggcttcttattctatgccagtgggacattctccagcccatcctaccctgcatactaccccaacaatgctaagtgtgtttgggaaatagaagtgaattctggttatcgcataaacctgggcttcagtaatctgaaattggaggcacaccataactgcagttttgattatgttgaaatctttgatggatcattgaatagcagtctcctgctggggaaaatctgtaatgataccaggcaaatatttacatcttcttacaaccgaatgaccattcactttcgaagtgacatcagtttccaaaacactggctttttggcttggtataactccttcccaagcgatgccaccttgaggttggtcaatttaaattcatcctatggtctatgtgccgggcgtgtagaaatttaccatggtggcacctgggggacagtttgtgatgactcctggaccattcaggaagctgaggtggtctgcagacagctagggtgtggacgtgcagtttcagcccttggaaatgcatattttggctctggctctggccccatcaccctggacgatgtagagtgctcagggacggaatccactctctggcagtgccggaaccgaggctggttctcccacaactgtaatcatcgtgaagatgctggtgtcatctgctcaggaaaccatctatcgacacctgctccttttctcaacatcacccgtccaaacacagattattcctgcggaggcttcctatcccaaccatcaggggacttttccagcccattctatcccgggaactatccaaacaatgccaagtgtgtgtgggacattgaggtgcaaaacaactaccgtgtgactgtgatcttcagagatgtccagcttgaaggtggctgcaactatgattatattgaagttttcgatggcccctaccgcagttcccctctcattgctcgagtttgtgatggggccagaggctccttcacttcttcctccaacttcatgtccattcgcttcatcagtgaccacagcatcacaaggagagggttccgggctgagtactactccagtccctccaatgacagcaccaacctgctctgtctgccaaatcacatgcaagccagtgtgagcaggagctatctccaatccttgggcttttctgccagtgaccttgtcatttccacctggaatggatactacgagtgtcggccccagataacgccgaacctggtgatattcacaattccctactcaggctgcggcaccttcaagcaggcagacaatgacaccatcgactattccaacttcctcacagcagctgtctcaggtggcatcatcaagaggaggacagacctccgtattcacgtcagctgcagaatgcttcagaacacctgggtcgacaccatgtacattgctaatgacaccatccacgttgctaataacaccatccaggtcgaggaagtccagtatggcaattttgacgtgaacatttccttttatacttcctcatctttcttgtatcctgtgaccagccgcccttactacgtggacctgaaccaggacttgtacgttcaggctgaaatcctccattctgatgctgtactgaccttgtttgtggacacctgcgtggcatcaccatactccaatgacttcacgtctttgacttatgatctaatccggagtggatgcgtgagggatgacacctacggaccctactcctcgccatctcttcgcattgcccgcttccggttcagggccttccacttcctgaaccgcttcccctccgtgtacctgcgttgtaaaatggtggtgtgcagagcgtatgacccctcttcccgctgctaccgaggctgtgtgttgaggtcgaagagggatgtgggctcctaccaggaaaaggtggacgtcgtcctgggtcccatccagctgcagacccccccacgccgagaagaggagcctcggtaggtggtcgctctcagaccccactgtccaccggggcgcagacccctgactcggggacttgggatgttcctcttggtgtcatattccaactcagattgagccctacattgtgctgcacctggtcatacggagttgaatcagacctggttcccgcctcccccaaggctcatggtccttggaggacccgttgcagggtgaggtcaagagagttctgacctggatggcccatagacctgacgtcccagaatccatgcttctcatctgcaaaatgaaaatgtcaatacttacttcttagcactgttgagagggttacttacataaaggaattttggtgaaactgc

SEQ ID NO: 1358 - DNA, 7683 bp, Homo sapiens
  source 1..7683: mol_type = genomic DNA
tttatagcagcagtagaaatataccaccctagaggacacacctccttttagctaggtacctataaatgtccaggattttctattcaattgagaagaacccagcaaaatggggatctccacagtcatccttgaaatgtgtcttttatggggacaagttctatctacaggtgggtggatcccaaggactacagactacgcttcactgattccctcggaggtgcccttggatccaactgtagcagaaggttctccatttccctcggagtcgaccctggagtcaactgtagcagaaggttctccgatttccttggagtcaaccctggagtcaaccgtagcagaaggttctctgattccctcagagtcaaccctggagtcaactgtagcagaaggatctgattctggtttggccctgaggctggtgaatggagatggcaggtgtcagggccgagtggagatcctataccgaggctcctggggcaccgtgtgtgatgacagctgggacaccaatgatgccaacgtggtctgtaggcagctgggttgtggctgggccatgtcagctccaggaaatgcctggtttggccagggctcaggacccattgccctggatgatgtgcgctgctcaggacacgaatcctacctgtggagctgcccccacaatggctggctctcccataactgtggccatggtgaagatgctggtgttatctgctcagctgcccagcctcagtcaacactcaggccagaaagttggcctgtcaggatatcaccacctgtacccacagaaggatctgaatccagtttggccctgaggctggtgaatggaggcgacaggtgtcgaggccgagtggaggtcctataccgaggctcctggggcaccgtgtgtgatgactactgggacaccaatgatgccaatgtggtctgcaggcagctgggctgtggctgggccatgtcagccccaggaaatgcccagtttggccagggctcaggacccattgtcctggatgatgtgcgctgctcaggacatgagtcctacctgtggagctgcccccacaatggctggctcacccacaactgtggccatagtgaagacgctggtgtcatctgctcagctccccagtcccggccgacacccagcccagatacttggccgacctcacatgcatcaacagcaggacctgaatccagtttggccctgaggctggtgaatggaggtgacaggtgtcagggccgagtggaggtcctataccgaggctcctggggcaccgtgtgtgatgatagctgggacaccagtgacgccaatgtggtctgccggcagctgggctgtggctgggccacgtcagccccaggaaatgcccggtttggccagggttcaggacccattgtcctggatgacgtgcgctgctcaggctatgagtcctacctgtggagctgcccccacaatggctggctctcccataactgtcagcacagtgaagacgctggtgtcatctgctcagctgcccactcctggtcgacgcccagtccagacacgttgccgaccatcaccttacctgcatcgacagtaggatctgaatccagtttggccctgaggctggtgaatggaggtgacaggtgtcagggccgagtggaggtcctataccgaggctcctggggcaccgtgtgtgatgacagctgggacaccaatgatgccaatgtggtctgcaggcagctgggctgtggctgggccatgttggccccaggaaatgcccggtttggtcagggctcaggacccattgtcctggatgacgtgcgctgctcagggaatgagtcctacttgtggagctgcccccacaatggctggctctcccataactgtggccatagtgaagacgctggtgtcatctgctcaggacctgaatccagtttggccctgaggctggtgaatggaggtgacaggtgtcagggccgagtggaggtcctataccgaggctcttggggcaccgtgtgtgatgacagctgggacaccaatgatgccaatgtggtctgcaggcagctgggctgtggctgggccacgtcagccccaggaaatgcccggtttggtcagggctcaggacccattgtcctggatgatgtgcgctgctcaggacatgagtcctacctgtggagctgccccaacaatggctggctctcccacaactgtggccatcatgaagatgctggtgtcatctgctcagctgcccagtcccggtcgacgcccaggccagacacgttgtcgaccatcacgttacctccatcgacagtaggatctgaatccagtttgaccctgaggctggtgaatggaagtgacaggtgtcagggccgagtagaggtcctataccgaggctcctggggcaccgtgtgtgatgacagctgggataccaatgatgccaatgtggtctgcaggcagctgggctgtggctgggccacgtcggccccaggaaatgcccggtttggccagggctcaggacccattgttctggatgatgtgcgctgctcaggacacgagtcctacctgtggagctgcccccacaatggctggctctcccacaactgtggccatcatgaagatgctggtgtcatctgctcagtttcccagtcccggccgacacccagtccagatacttggccgacctcacatgcatcaacagcaggacctgaatccagtttggccctgaggctggtgaatggaggtgacaggtgtcagggccgagtggaggtcctataccgaggctcctggggcaccgtgtgtgatgatagctgggacaccagtgacgccaatgtggtctgccggcagctgggctgtggctgggccacgtcagccccaggaaatgcccggtttggccagggttcaggacccattgtcctggatgacgtgcgctgctcaggctatgagtcctacctgtggagctgcccccacaatggctggctctcccataactgtcagcacagtgaagacgctggtgtcatctgctcagctgcccactcctggtcgacgcccagtccagacacattgccgaccatcaccttgcctgcatcgacagtaggatctgaatccagtttggccctgaggctggtgaatggaggtgacaggtgtcagggccgagtggaggtcctataccaaggctcctggggcaccgtgtgcgatgacagctgggacaccaatgatgccaatgtcgtctgcaggcaactgggctgtggctgggccatgtcagccccaggaaatgcccggtttggtcagggctcaggacccattgtcctggatgatgtgcgctgctcaggacacgagtcttacctgtggagctgcccccacaatggctggctctcccacaactgtggccatagtgaagacgctggtgtcatctgctcagcttcccagtcccggccaacacctagtccagacacttggccaacctcacatgcatcaacagcaggatctgaatccagtttggccctgaggctggtgaatggaggtgacaggtgtcagggccgagtggaggtcctataccgaggctcctggggcaccgtgtgtgatgactactgggacaccaatgatgccaatgtggtttgcaggcagctgggctgtggctgggccatgtcagccccaggaaatgcccggtttggccagggttcaggacccattgtcctggatgatgtgcgctgctcaggacatgagtcctatctgtggagctgcccccacaatggctggctctcccacaactgtggccatcatgaagacgctggtgtcatctgctcagcttcccagtcccagccgacacccagcccagacacttggccaacctcacatgcatcaacagcaggatctgaatccagtttggccctgaggctggtgaatggaggtgacaggtgtcagggccgagtggaggtcctataccgaggctcctggggcaccgtgtgtgatgactactgggacaccaatgatgccaatgtggtttgcaggcagctgggctgtggctgggccacgtcagccccaggaaatgcccggtttggccagggttcaggacccattgtcctggatgatgtgcgctgctcaggacatgagtcctatctgtggagctgcccccacaatggctggctctcccacaactgtggccatcatgaagacgctggtgtcatctgctcagcttcccagtcccagccgacacccagcccagacacttggccaacctcacatgcatcaacagcaggatctgaatccagtttggccctgaggctggtgaatggaggtgacaggtgtcagggccgagtggaggtcctataccgaggctcctggggcaccgtgtgtgatgactactgggacaccaatgatgccaatgtggtttgcaggcagctgggctgtggctgggccacgtcagccccaggaaatgcccggtttggccagggttcaggacccattgtcctggatgatgtgcgctgctcaggacatgagtcctatctgtggagctgcccccacaatggctggctctcccacaactgtggccatcatgaagacgctggtgtcatctgctcagcttcccagtcccagccgacacccagcccagacacttggccaacctctcgtgcatcaacagcaggatctgaatccactttggccctgagactggtgaatggaggtgacaggtgtcgaggccgagtggaggtcctataccaaggctcctggggcaccgtgtgtgatgactactgggacaccaatgatgccaacgtggtctgcaggcagctgggctgtggctgggccatgtcagccccaggaaatgcccagtttggccagggctcaggacccattgtcctggatgatgtgcgctgctcaggacacgagtcttacctgtggagctgcccccacaatggctggctctcccacaactgtggccatcatgaagatgctggtgtcatctgctcagctgctcagtcccagtcaacgcccaggccagatacttggctgaccaccaacttaccggcattgacagtaggatctgaatccagtttggctctgaggctggtgaatggaggtgacaggtgtcgaggccgagtggaggtcctgtatcgaggctcctggggaaccgtgtgtgatgacagctgggacaccaatgatgccaatgtggtctgcaggcagctgggctgtggctgggccatgtcggccccaggaaatgcccggtttggccagggctcaggacccattgtcctggatgatgtgcgctgctcagggaatgagtcctacctgtggagctgcccccacaaaggctggctcacccacaactgtggccatcacgaagacgctggtgtcatctgctcagccacccaaataaattctactacgacagattggtggcatccaacaactacaaccactgcaagaccctcttcaaattgtggtggcttcttattctatgccagtgggacattctccagcccatcctaccctgcatactaccccaacaatgctaagtgtgtttgggaaatagaagtgaattctggttatcgcataaacctgggcttcagtaatctgaaattggaggcacaccataactgcagttttgattatgttgaaatctttgatggatcattgaatagcagtctcctgctggggaaaatctgtaatgataccaggcaaatatttacatcttcttacaaccgaatgaccattcactttcgaagtgacatcagtttccaaaacactggctttttggcttggtataactccttcccaagcgatgccaccttgaggttggtcaatttaaattcatcctatggtctatgtgccgggcgtgtagaaatttaccatggtggcacctgggggacagtttgtgatgactcctggaccattcaggaagctgaggtggtctgcagacagctagggtgtggacgtgcagtttcagcccttggaaatgcatattttggctctggctctggccccatcaccctggacgatgtagagtgctcagggacggaatccactctctggcagtgccggaaccgaggctggttctcccacaactgtaatcatcgtgaagatgctggtgtcatctgctcaggaaaccatctatcgacacctgctccttttctcaacatcacccgtccaaacaattattcctgcggaggcttcctatcccaaccatcaggggacttttccagcccattctatcccgggaactatccaaacaatgccaagtgtgtgtgggacattgaggtgcaaaacaactaccgtgtgactgtgatcttcagagatgtccagcttgaaggtggctgcaactatgattatattgaagttttcgatggcccctaccgcagttcccctctcattgctcgagtttgtgatggggccagaggctccttcacttcttcctccaacttcatgtccattcgcttcatcagtgaccacagcatcacaaggagagggttccgggctgagtactactccagtccctccaatgacagcaccaacctgctctgtctgccaaatcacatgcaagccagtgtgagcaggagctatctccaatccttgggcttttctgccagtgaccttgtcatttccacctggaatggatactacgagtgtcggccccagataacgccgaacctggtgatattcacaattccctactcaggctgcggcaccttcaagcaggcagacaatgacaccatcgactattccaacttcctcacagcagctgtctcaggtggcatcatcaagaggaggacagacctccgtattcacgtcagctgcagaatgcttcagaacacctgggtcgacaccatgtacattgctaatgacaccatccacgttgctaataacaccatccaggtcgaggaagtccagtatggcaattttgacgtgaacatttccttttatacttcctcatctttcttgtatcctgtgaccagccgcccttactacgtggacctgaaccaggacttgtacgttcaggctgaaatcctccattctgatgctgtactgaccttgtttgtggacacctgcgtggcatcaccatactccaatgacttcacgtctttgacttatgatctaatccggagtggatgcgtgagggatgacacctacggaccctactcctcgccatctcttcgcattgcccgcttccggttcagggccttccacttcctgaaccgcttcccctccgtgtacctgcgttgtaaaatggtggtgtgcagagcgtatgacccctcttcccgctgctaccgaggctgtgtgttgaggtcgaagagggatgtgggctcctaccaggaaaaggtggacgtcgtcctgggtcccatccagctgcagacccccccacgccgagaagaggagcctcggtaggtggtcgctctcagaccccactgtccaccggggcgcagacccctgactcggggacttgggatgttcctcttggtgtcatattccaactcagattgagccctacattgtgctgcacctggtcatacggagttgaatcagacctggttcccgcctcccccaaggctcatggtccttggaggacccgttgcagggtgaggtcaagagagttctgacctggatggcccatagacctgacgtcccagaatccatgcttctcatctgcaaaatgaaaatgtcaatacttacttcttagcactgttgagagggttacttacataaaggaattttggtgaaactgc

SEQ ID NO: 1359 - DNA, 7686 bp, Homo sapiens; identical to SEQ ID NO: 1349
  source 1..7686: mol_type = genomic DNA

SEQ ID NO: 1360 - DNA, 7656 bp, Homo sapiens; identical to SEQ ID NO: 1353
  source 1..7656: mol_type = genomic DNA

SEQ ID NO: 1361 - DNA, 5802 bp, Homo sapiens; identical to SEQ ID NO: 1347
  source 1..5802: mol_type = genomic DNA

SEQ ID NO: 1362 - DNA, 2769 bp, Homo sapiens
  source 1..2769: mol_type = genomic DNA
ctcgcgacatccgcccagcggcggccggaatctcgcgataaaggctcattgtctcgcgggagcgctgctggcggtcgggcgctcgggcggccctggccggggagacgagttgcatgtgttggttcagctggcgatagcggcgggagcggagccggcggggcctgtgcgaccgcctgggtttgtgaaatggctgctgacatttctgaatccagcggggctgactgcaaaggagacccaaggaacagtgccaagttagatgccgattacccacttcgagtcctttattgtggagtctgttcattaccaacagagtactgtgaatatatgcctgatgttgctaaatgtagacaatggttagagaagaattttccaaatgaatttgcaaaacttactgtagaaaattcacccaaacaagaagctggaattagtgagggtcaaggaacagcaggggaagaagaggagaagaaaaaacagaagagaggtggaaggggtcaaataaaacaaaaaaagaagaccgtaccacaaaaggttactatagccaaaattcccagagcaaagaagaaatatgtgacaagagtatgtggccttgcaacttttgaaattgatcttaaagaagcacaaagattttttgctcaaaaattctcctgtggtgcctcagtaacaggggaggatgaaattatcattcagggagattttacagatgacataattgatgtcattcaggaaaaatggccagaggtagatgatgacagcatcgaagatcttggagaagtaaagaagtgaatttgaaaatttgtctgtatttaatggcctgaactgagagttgatatggccaaagggagagaggccttttaaaatatatatatatatacacatatatatgtatatatacacatatatgtatgtatacacatatacacatgtatatatacatgtgtgtatgtatacatgtatatatatatacatacacatatatgtatacatatatacacatatatgtatacatatatacacatatgtatacatatatatatattctacagtaaaactgtagactgtcctcgtccttggcattttcactgttctgtacaaggctgcttgtttttttattgccaaagtcaaataaacgggagactgtcatgctcatgcatgaatagaatttagtcaaataaaaaattttggtcatttggtactgactttctctctctctctctctctcttttttttttttgacagagtctcgcactgttgcctgggctggaatgcagtggtgcgatctcggctcactgcaacctccgcctcccgggttcaagtgattctcctgcctcagcctcccaagtaggtgggattacaggcgcccgccaccacgcccagctaatttttgtatttttagtagagatggggtttcactatgttggccaggctggtctcgaactcctgacctcgtgattggcccacctcagcctcccaaagtgctggtattacagatgtgagccaccgcacccagcctgagtttctctttctctctttttaactttattttttgaaaaacccggtagactttttgtggggagcatttttgttgataattttactgatctaaagctgagtgattttttaaaagaatttgaatttggcttcctcaccagtaatatgtctccttgcttctttgatgtgatagttttgagatgggtgagaatctaatagatctgtggttgaatttgctgtgttgttatgaagtccaccctgtgggcacaataacataactgttggtaggagttgtttgagctattctggagattatttggtaaagtatactaaaagccttaaaaccatgtatgtgcgctgtttgaacccgtaagccacttctttgacattagaagacattagaagaaataatcagccttgcataaaacttatggatgaaagtattcatcacaatattatttataataaaaaattgcaaatgttataaatgaacaattgggaaatggttaaagaagtgatggtgcattgtgtggtagaatattatgcatatgtttaaagaatcatattttctaagattatttggaagcatgtttggtaatgtcaagtggagtaccccagatacattttagacatttatcgtcatcatctgctctgagtggaaggccgttcagagaggctagaggttcttattctggctataaattatgtgagtaaaattgtgctaaccagttaaaagtactgtacacccatgctcaatatatagtcctggaaatagcaattgaaacatgtcttctcacaagagaaaatgacagttttaatgatgtatttgatgaatttaaactttaagtcaggtgctgcaaattggaaagaagacttgtggtgttttaagttgctgtggacacttttaagaaacttagaacccatggaacccttgtttatcgccatgcaaattacaatcttgaatgagtgttttttaaaaataaagtattagaaaaatgtgtagtaaagatgtaaaattaaaaaatggaattctccattaactgtggattttactaaatagaattactggtgaagcagatttatccatcgagactatctggtatgcgttatgtatgtagtctgttgctgctgaaagatgtctgtgtgcctgtatcaacatgtgacttcatgtaaagtttctttgtgttcacagttcttagcaaatgcagttacaatccatagatagccagcagtggatgttactccaggaaaatgcaggattaaaattgtccttgtgtataa

SEQ ID NO: 1363 - DNA, 1972 bp, Homo sapiens
  source 1..1972: mol_type = genomic DNA
gtgagatgacatcaaaacccttcgtgtaggagggtggcagtctccctcccttctggagacaccaccagatgggccagccagaggcagcagcagcctcttcccatggatccaccacgagcgtcccacttgagccctcggaagaagagaccccggcagacgggtgccttgatggcctcctctcctcaagacatcaaatttcaagatttggtcgtcttcattttggagaagaaaatgggaaccacccgcagagcgttcctcatggagctggcccgcaggaaagggttcagggttgaaaatgagctcagtgattctgtcacccacatcgtagcagagaacaactcgggttcggatgttctggagtggcttcaagcacagaaagtacaagtcagctcacaaccagagctcctcgatgtctcctggctgatcgaatgcataagagcagggaaaccggtggaaatgacaggaaaacaccagcttgttgtgagaagagactattcagatagcaccaacccaggccccccgaagactccaccaattgctgtacaaaagatctcccagtatgcgtgtcagagaagaaccactttaaacaactgtaaccagatattcacggatgcctttgatatactggctgaaaactgtgagtttagagaaaatgaagactcctgtgtgacatttatgagagcagcttctgtattgaaatctctgccattcacaatcatcagtatgaaggacacagaaggaattccctgcctggggtccaaggtgaagggtatcatagaggagattattgaagatggagaaagttctgaagttaaagctgtgttaaatgatgaacgatatcaatccttcaaactctttacttctgtatttggagtggggctgaagacttctgagaagtggttcaggatgggtttcagaactctgagtaaagtaaggtcggacaaaagcctgaaatttacacgaatgcagaaagcaggatttctgtattatgaagaccttgtcagctgtgtgaccagggcagaagcagaggccgtcagtgtgctggttaaagaggctgtctgggcatttcttccggatgctttcgtcaccatgacaggagggttccggaggggtaagaagatggggcatgatgtagattttttaattaccagcccaggatcaacagaggatgaagagcaacttttacagaaagtgatgaacttatgggaaaagaagggattacttttatattatgaccttgtggagtcaacatttgaaaagctcaggttgcctagcaggaaggttgatgctttggatcattttcaaaagtgctttctgattttcaaattgcctcgtcaaagagtggacagtgaccagtccagctggcaggaaggaaagacctggaaggccatccgtgtggatttagttctgtgcccctacgagcgtcgtgcctttgccctgttgggatggactggctcccggcagtttgagagagacctccggcgctatgccacacatgagcggaagatgattctggataaccatgctttatatgacaagaccaagaggatattcctcaaagcagaaagtgaagaagaaatttttgcgcatctgggattggattatattgaaccgtgggaaagaaatgcctaggaaagtgttgtcaacatttttttcctattcttttcaagttaaataaattatgcttcatattagtaaaagatgccataggagagtttggggttatttaggtcttattgaaatgcagattgctactagaaataaataactttggaaacatgggaaggtgccactggtaatgggtaaggttctaataggccatgtttatgactgttgcatagaattcacaatgcatttttcaagagaaatgatgttgtcactggtggctcattcagggaagctcatcaaagcccactttgttcgcagtgtagctgaaatactgtctatctctaataaaaacaggaggaaacaa

SEQ ID NO: 1364 - DNA, 2016 bp, Homo sapiens
  source 1..2016: mol_type = genomic DNA
acactttggcaggaagctgttgccagggcagcacctgtgaagccctggcctggcttcagagtctgctggtgagatgacatcaaaacccttcgtgtaggagggtggcagtctccctcccttctggagacaccaccagatgggccagccagaggcagcagcagcctcttcccatggatccaccacgagcgtcccacttgagccctcggaagaagagaccccggcagacgggtgccttgatggcctcctctcctcaagacatcaaatttcaagatttggtcgtcttcattttggagaagaaaatgggaaccacccgcagagcgttcctcatggagctggcccgcaggaaagggttcagggttgaaaatgagctcagtgattctgtcacccacatcgtagcagagaacaactcgggttcggatgttctggagtggcttcaagcacagaaagtacaagtcagctcacaaccagagctcctcgatgtctcctggctgatcgaatgcataagagcagggaaaccggtggaaatgacaggaaaacaccagcttgttgtgagaagagactattcagatagcaccaacccaggccccccgaagactccaccaattgctgtacaaaagatctcccagtatgcgtgtcagagaagaaccactttaaacaactgtaaccagatattcacggatgcctttgatatactggctgaaaactgtgagtttagagaaaatgaagactcctgtgtgacatttatgagagcagcttctgtattgaaatctctgccattcacaatcatcagtatgaaggacacagaaggaattccctgcctggggtccaaggtgaagggtatcatagaggagattattgaagatggagaaagttctgaagttaaagctgtgttaaatgatgaacgatatcaatccttcaaactctttacttctgtatttggagtggggctgaagacttctgagaagtggttcaggatgggtttcagaactctgagtaaagtaaggtcggacaaaagcctgaaatttacacgaatgcagaaagcaggatttctgtattatgaagaccttgtcagctgtgtgaccagggcagaagcagaggccgtcagtgtgctggttaaagaggctgtctgggcatttcttccggatgctttcgtcaccatgacaggagggttccggaggggtaagaagatggggcatgatgtagattttttaattaccagcccaggatcaacagaggatgaagagcaacttttacagaaagtgatgaacttatgggaaaagaagggattacttttatattatgaccttgtggagtcaacatttgaaaagctcaggttgcctagcaggaaggttgatgctttggatcattttcaaaagtgctttctgattttcaaattgcctcgtcaaagagtggacagtgaccagtccagctggcaggaaggaaagacctggaaggccatccgtgtggatttagttctgtgcccctacgagcgtcgtgcctttgccctgttgggatggactggctcccggtttgagagagacctccggcgctatgccacacatgagcggaagatgattctggataaccatgctttatatgacaagaccaagaggatattcctcaaagcagaaagtgaagaagaaatttttgcgcatctgggattggattatattgaaccgtgggaaagaaatgcctaggaaagtgttgtcaacatttttttcctattcttttcaagttaaataaattatgcttcatattagtaaaagatgccataggagagtttggggttatttaggtcttattgaaatgcagattgctactagaaataaataactttggaaacatgggaaggtgccactggtaatgggtaaggttctaataggccatgtttatgactgttgcatagaattcacaatgcatttttcaagagaaatgatgttgtcactggtggctcattcagggaagctcatcaaagcccactttgttcgcagtgtagctgaaatactgtctatctct

SEQ ID NO: 1365 - DNA, 4826 bp, Homo sapiens
  source 1..4826: mol_type = genomic DNA
cgctcggcccgcgacctgccccgagccctctccatggaggcagcccgcccctccggctcctggaacggagccctctgccggctgctcctgctgaccctcgcgatcttaatatttgccagtgatgcctgcaaaaatgtgacattacatgttccctccaaactagatgccgagaaacttgttggtagagttaacctgaaagagtgctttacagctgcaaatctaattcattcaagtgatcctgacttccaaattttggaggatggttcagtctatacaacaaatactattctattgtcctcggagaagagaagttttaccatattactttccaacactgagaaccaagaaaagaagaaaatatttgtctttttggagcatcaaacaaaggtcctaaagaaaagacatactaaagaaaaagttctaaggcgcgccaagagaagatgggctccaattccttgttcgatgctagaaaactccttgggtccttttccacttttccttcaacaggttcaatctgacacggcccaaaactataccatatactattccataagaggtcctggagttgaccaagaacctcggaatttattttatgtggagagagacactggaaacttgtattgtactcgtcctgtagatcgtgagcagtatgaatcttttgagataattgcctttgcaacaactccagatgggtatactccagaacttccactgcccctaataatcaaaatagaggatgaaaatgataactacccaatttttacagaagaaacttatacttttacaatttttgaaaattgcagagtgggcactactgtgggacaagtgtgtgctactgacaaagatgagcctgacacgatgcacacacgcctgaagtactccatcattgggcaggtgccaccatcacccaccctattttctatgcatccaactacaggcgtgatcaccacaacatcatctcagctagacagagagttaattgacaagtaccagttgaaaataaaagtacaagacatggatggtcagtattttggtctacagacaacttcaacttgtatcattaacattgatgatgtaaatgaccacttgccaacatttactcgtacttcttatgtgacatcagtggaagaaaatacagttgatgtggaaatcttacgagttactgttgaggataaggacttagtgaatactgctaactggagagctaattataccattttaaagggcaatgaaaatggcaattttaaaattgtaacagatgccaaaaccaatgaaggagttctttgtgtagttaagcctttgaattatgaagaaaagcaacagatgatcttgcaaattggtgtagttaatgaagctccattttccagagaggctagtccaagatcagccatgagcacagcaacagttactgttaatgtagaagatcaggatgagggccctgagtgtaaccctccaatacagactgttcgcatgaaagaaaatgcagaagtgggaacaacaagcaatggatataaagcatatgacccagaaacaagaagtagcagtggcataaggtataagaaattaactgatccaacagggtgggtcaccattgatgaaaatacaggatcaatcaaagttttcagaagcctggatagagaggcagagaccatcaaaaatggcatatataatattacagtccttgcatcagaccaaggagggagaacatgtacggggacactgggcattatacttcaagacgtgaatgataacagcccattcatacctaaaaagacagtgatcatctgcaaacccaccatgtcatctgcggagattgttgcggttgatcctgatgagcctatccatggcccaccctttgactttagtctggagagttctacttcagaagtacagagaatgtggagactgaaagcaattaatgatacagcagcacgtctttcctatcagaatgatcctccatttggctcatatgtagtacctataacagtgagagatagacttggcatgtctagtgtcacttcattggatgttacactgtgtgactgcattaccgaaaatgactgcacacatcgtgtagatccaaggattggcggtggaggagtacaacttggaaagtgggccatccttgcaatattgttgggcatagcattgctcttttgcatcctgtttacgctggtctgtggggcttctgggacgtctaaacaaccaaaagtaattcctgatgatttagcccagcagaacctaattgtatcaaacacagaagctcctggagatgacaaagtgtattctgcgaatggcttcacaacccaaactgtgggcgcttctgctcagggagtttgtggcaccgtgggatcaggaatcaaaaacggaggtcaggagaccatcgaaatggtgaaaggaggacaccagacctcggaatcctgccggggggctggccaccatcacaccctggactcctgcaggggaggacacacggaggtggacaactgcagatacacttactcggagtggcacagttttactcagccccgtcttggtgaagaatccattagaggacacactctgattaaaaattaaacaatgaaagaaagtgtatctgtgtaatcaagatgaaaatcacaagcatgcccaagactatgtcctgacatataactatgaaggaagaggatcggtggctgggtctgtaggttgttgcagtgaacgacaagaagaagatgggcttgaatttttggataatttggagcccaaatttaggacactagcagaagcatgcatgaagagatgagtgtgttctaataagtctctgaaagccagtggctttatgacttttaaaaaaaattacaaaccaagaattttttaaagcagaagatgctatttgtgggggtttttctctcattatttggatggaatctctttggtcaaatgcacatttacagagagacactataaacaagtacacaaatttttcaatttttacatatttttaaattacttatcttctatccaaggaggtctacagagaaattaaagtctgccttatttgttacatttgggtataatgacaacagccaatttatagtgcaataaaatgtaattaattcaagtccttattatagactatttgaagcacaacctaatggaaaattgtagagaccttgctttaacattatctccagttaattaagtgttcatgtggtgcttggaaactgttgttttcctgaacatctaaagtgtgtagactgcattcttgctattattttattcttgtaatgtgaccttttcactgtgcaaagggagatttctagccaggcattgactattacaatttcattttggtggagtttagttttaggttttattgtatataaaatcctgcactgaatctgtgtctcctctgttacctacttttgccagtgaaatttaagttttaaaatactttcagaatgtatttttactactgcaagtttttggtctttaaaatgtcaagtagcatctctctctttctctctgtctctttctgtttctctctccagttttttttttttttttaatttccatatgggctaaagaatccaaatattttaaaaatctgtctctcttttcttctctcataaagtgaattattccttttttttgttttatgtaagtgtatatattcttagtttttcttgaaatcattgtaatgttaactttgttgtttcaaatatcttggtgattgcttcattatctcttcaacaaaaaaaacctttaattttgccattgaaactgtagaactatgccatgcttttattagaagcagtgctctgtgttaacaacaagaatggtgtaattagaattgggatgtggatatttactgtatgacaacacatttacagttctgtaatgcaaggatgcagtttaaaaatgtgaagtagtgatggtttttgaaataagctttaaaatatagggatcttgaaggctccctggggtaactattttataacttagataaaatggctagtcatatctgtgtgtttgtaaagttatttttttaatattttaagattacaattttaacaaatgtagaaatgagccaaactatttaaattttaaaacagtaaaacaaaatgaaacttaatagctcacaaaattccagtccatgtttcatgacttattttagtcaatgaattttctatttatactaaacatatggacattttaaatgtgtttctaatatttttgattatctataatgtgcctgtcttcaattcacaagattgggttataacaattatttgccagattaacactagggaattatttgataaccagcttatcttatcagtagttttattgctgatcaggcaaaaatagttttccaaagttatttttaataaagtatatacaaaattcttatatattactagtcatgataaagtaaattaagcagtttttaaaacttagtgtgagtttgttcatcacaggtctgatatgagtttaagggatttcgcactccctgaatcagagaagtaagaccccttccttagattcctgttatacattttttaaaatgtagagtttgttttggagacattttcagtgcattgttattgccatatttatataatatgactattctaaaggctgtgaggccatggggtattggttaagttgcttgcttttgctttgtccattttcatcattttaaaatgggggataataacagaacttgtttcctagggccattgtaagtcacttgaataaaaaatagttttgaagcatgagagtcatacagagcggtccacctaaaaggcactcctgataataataaatgattttaaacaagt

SEQ ID NO: 1366 - DNA, 5124 bp, Homo sapiens
  source 1..5124: mol_type = genomic DNA
ggcttctgctgggcagggccggctgttaatctcgcctggcggagcggacaccggggcgtggtgggggagatgggccttataggtggcgtccgctggtgagaaacaccttgcgcaggtaaaagggtggcggcgagagggagttcccacccgtggctttcttagagaaatgaagtcttaagtcttaaatagacaacaaggaggggccgatcggtgtcttttggacgcgtctggagcccctccctccgccaaaggaaaagccccttggatgagaggcaggcgcttcagagaagctaagaaaagcacctctccgcgcgccccacctcctccgcctcgcgctcctcctgagcagcgggcccagactgcgctccggccgcggccctcgccccgcggagccctcctaccccggcccgacgctcggcccgcgacctgccccgagccctctccatggaggcagcccgcccctccggctcctggaacggagccctctgccggctgctcctgctgaccctcgcgatcttaatatttgccagtgatgcctgcaaaaatgtgacattacatgttccctccaaactagatgccgagaaacttgttggtagagttaacctgaaagagtgctttacagctgcaaatctaattcattcaagtgatcctgacttccaaattttggaggatggttcagtctatacaacaaatactattctattgtcctcggagaagagaagttttaccatattactttccaacactgagaaccaagaaaagaagaaaatatttgtctttttggagcatcaaacaaaggtcctaaagaaaagacatactaaagaaaaagttctaaggcgcgccaagagaagatgggctccaattccttgttcgatgctagaaaactccttgggtccttttccacttttccttcaacaggttcaatctgacacggcccaaaactataccatatactattccataagaggtcctggagttgaccaagaacctcggaatttattttatgtggagagagacactggaaacttgtattgtactcgtcctgtagatcgtgagcagtatgaatcttttgagataattgcctttgcaacaactccagatgggtatactccagaacttccactgcccctaataatcaaaatagaggatgaaaatgataactacccaatttttacagaagaaacttatacttttacaatttttgaaaattgcagagtgggcactactgtgggacaagtgtgtgctactgacaaagatgagcctgacacgatgcacacacgcctgaagtactccatcattgggcaggtgccaccatcacccaccctattttctatgcatccaactacaggcgtgatcaccacaacatcatctcagctagacagagagttaattgacaagtaccagttgaaaataaaagtacaagacatggatggtcagtattttggtctacagacaacttcaacttgtatcattaacattgatgatgtaaatgaccacttgccaacatttactcgtacttcttatgtgacatcagtggaagaaaatacagttgatgtggaaatcttacgagttactgttgaggataaggacttagtgaatactgctaactggagagctaattataccattttaaagggcaatgaaaatggcaattttaaaattgtaacagatgccaaaaccaatgaaggagttctttgtgtagttaagcctttgaattatgaagaaaagcaacagatgatcttgcaaattggtgtagttaatgaagctccattttccagagaggctagtccaagatcagccatgagcacagcaacagttactgttaatgtagaagatcaggatgagggccctgagtgtaaccctccaatacagactgttcgcatgaaagaaaatgcagaagtgggaacaacaagcaatggatataaagcatatgacccagaaacaagaagtagcagtggcataaggtataagaaattaactgatccaacagggtgggtcaccattgatgaaaatacaggatcaatcaaagttttcagaagcctggatagagaggcagagaccatcaaaaatggcatatataatattacagtccttgcatcagaccaaggagggagaacatgtacggggacactgggcattatacttcaagacgtgaatgataacagcccattcatacctaaaaagacagtgatcatctgcaaacccaccatgtcatctgcggagattgttgcggttgatcctgatgagcctatccatggcccaccctttgactttagtctggagagttctacttcagaagtacagagaatgtggagactgaaagcaattaatgatacagcagcacgtctttcctatcagaatgatcctccatttggctcatatgtagtacctataacagtgagagatagacttggcatgtctagtgtcacttcattggatgttacactgtgtgactgcattaccgaaaatgactgcacacatcgtgtagatccaaggattggcggtggaggagtacaacttggaaagtgggccatccttgcaatattgttgggcatagcattgctcttttgcatcctgtttacgctggtctgtggggcttctgggacgtctaaacaaccaaaagtaattcctgatgatttagcccagcagaacctaattgtatcaaacacagaagctcctggagatgacaaagtgtattctgcgaatggcttcacaacccaaactgtgggcgcttctgctcagggagtttgtggcaccgtgggatcaggaatcaaaaacggaggtcaggagaccatcgaaatggtgaaaggaggacaccagacctcggaatcctgccggggggctggccaccatcacaccctggactcctgcaggggaggacacacggaggtggacaactgcagatacacttactcggagtggcacagttttactcagccccgtcttggtgaaaaagtgtatctgtgtaatcaagatgaaaatcacaagcatgcccaagactatgtcctgacatataactatgaaggaagaggatcggtggctgggtctgtaggttgttgcagtgaacgacaagaagaagatgggcttgaatttttggataatttggagcccaaatttaggacactagcagaagcatgcatgaagagatgagtgtgttctaataagtctctgaaagccagtggctttatgacttttaaaaaaaattacaaaccaagaattttttaaagcagaagatgctatttgtgggggtttttctctcattatttggatggaatctctttggtcaaatgcacatttacagagagacactataaacaagtacacaaatttttcaatttttacatatttttaaattacttatcttctatccaaggaggtctacagagaaattaaagtctgccttatttgttacatttgggtataatgacaacagccaatttatagtgcaataaaatgtaattaattcaagtccttattatagactatttgaagcacaacctaatggaaaattgtagagaccttgctttaacattatctccagttaattaagtgttcatgtggtgcttggaaactgttgttttcctgaacatctaaagtgtgtagactgcattcttgctattattttattcttgtaatgtgaccttttcactgtgcaaagggagatttctagccaggcattgactattacaatttcattttggtggagtttagttttaggttttattgtatataaaatcctgcactgaatctgtgtctcctctgttacctacttttgccagtgaaatttaagttttaaaatactttcagaatgtatttttactactgcaagtttttggtctttaaaatgtcaagtagcatctctctctttctctctgtctctttctgtttctctctccagttttttttttttttttaatttccatatgggctaaagaatccaaatattttaaaaatctgtctctcttttcttctctcataaagtgaattattccttttttttgttttatgtaagtgtatatattcttagtttttcttgaaatcattgtaatgttaactttgttgtttcaaatatcttggtgattgcttcattatctcttcaacaaaaaaaacctttaattttgccattgaaactgtagaactatgccatgcttttattagaagcagtgctctgtgttaacaacaagaatggtgtaattagaattgggatgtggatatttactgtatgacaacacatttacagttctgtaatgcaaggatgcagtttaaaaatgtgaagtagtgatggtttttgaaataagctttaaaatatagggatcttgaaggctccctggggtaactattttataacttagataaaatggctagtcatatctgtgtgtttgtaaagttatttttttaatattttaagattacaattttaacaaatgtagaaatgagccaaactatttaaattttaaaacagtaaaacaaaatgaaacttaatagctcacaaaattccagtccatgtttcatgacttattttagtcaatgaattttctatttatactaaacatatggacattttaaatgtgtttctaatatttttgattatctataatgtgcctgtcttcaattcacaagattgggttataacaattatttgccagattaacactagggaattatttgataaccagcttatcttatcagtagttttattgctgatcaggcaaaaatagttttccaaagttatttttaataaagtatatacaaaattcttatatattactagtcatgataaagtaaattaagcagtttttaaaacttagtgtgagtttgttcatcacaggtctgatatgagtttaagggatttcgcactccctgaatcagagaagtaagaccccttccttagattcctgttatacattttttaaaatgtagagtttgttttggagacattttcagtgcattgttattgccatatttatataatatgactattctaaaggctgtgaggccatggggtattggttaagttgcttgcttttgctttgtccattttcatcattttaaaatgggggataataacagaacttgtttcctagggccattgtaagtcacttgaataaaaaatagttttgaagc

SEQ ID NO: 1367 - DNA, 3005 bp, Homo sapiens
  source 1..3005: mol_type = genomic DNA
agactgcgctccggccgcggccctcgccccgcggagccctcctaccccggcccgacgctcggcccgcgacctgccccgagccctctccatggaggcagcccgcccctccggctcctggaacggagccctctgccggctgctcctgctgaccctcgcgatcttaatatttgccagtgatgcctgcaaaaatgtgacattacatgttccctccaaactagatgccgagaaacttgttggtagagttaacctgaaagagtgctttacagctgcaaatctaattcattcaagtgatcctgacttccaaattttggaggatggttcagtctatacaacaaatactattctattgtcctcggagaagagaagttttaccatattactttccaacactgagaaccaagaaaagaagaaaatatttgtctttttggagcatcaaacaaagatctctctgttggttccctggctctgcctagttgctgaggtcctaaagaaaagacatactaaagaaaaagttctaaggcgcgccaagagaagatgggctccaattccttgttcgatgctagaaaactccttgggtccttttccacttttccttcaacaggttcaatctgacacggcccaaaactataccatatactattccataagaggtcctggagttgaccaagaacctcggaatttattttatgtggagagagacactggaaacttgtattgtactcgtcctgtagatcgtgagcagtatgaatcttttgagataattgcctttgcaacaactccagatgggtatactccagaacttccactgcccctaataatcaaaatagaggatgaaaatgataactacccaatttttacagaagaaacttatacttttacaatttttgaaaattgcagagtgggcactactgtgggacaagtgtgtgctactgacaaagatgagcctgacacgatgcacacacgcctgaagtactccatcattgggcaggtgccaccatcacccaccctattttctatgcatccaactacaggcgtgatcaccacaacatcatctcagctagacagagagttaattgacaagtaccagttgaaaataaaagtacaagacatggatggtcagtattttggtctacagacaacttcaacttgtatcattaacattgatgatgtaaatgaccacttgccaacatttactcgtacttcttatgtgacatcagtggaagaaaatacagttgatgtggaaatcttacgagttactgttgaggataaggacttagtgaatactgctaactggagagctaattataccattttaaagggcaatgaaaatggcaattttaaaattgtaacagatgccaaaaccaatgaaggagttctttgtgtagttaagcctttgaattatgaagaaaagcaacagatgatcttgcaaattggtgtagttaatgaagctccattttccagagaggctagtccaagatcagccatgagcacagcaacagttactgttaatgtagaagatcaggatgagggccctgagtgtaaccctccaatacagactgttcgcatgaaagaaaatgcagaagtgggaacaacaagcaatggatataaagcatatgacccagaaacaagaagtagcagtggcataaggtataagaaattaactgatccaacagggtgggtcaccattgatgaaaatacaggatcaatcaaagttttcagaagcctggatagagaggcagagaccatcaaaaatggcatatataatattacagtccttgcatcagaccaaggagggagaacatgtacggggacactgggcattatacttcaagacgtgaatgataacagcccattcatacctaaaaagacagtgatcatctgcaaacccaccatgtcatctgcggagattgttgcggttgatcctgatgagcctatccatggcccaccctttgactttagtctggagagttctacttcagaagtacagagaatgtggagactgaaagcaattaatgatacagcagcacgtctttcctatcagaatgatcctccatttggctcatatgtagtacctataacagtgagagatagacttggcatgtctagtgtcacttcattggatgttacactgtgtgactgcattaccgaaaatgactgcacacatcgtgtagatccaaggattggcggtggaggagtacaacttggaaagtgggccatccttgcaatattgttgggcatagcattgctcttttgcatcctgtttacgctggtctgtggggcttctgggacgtctaaacaaccaaaagtaattcctgatgatttagcccagcagaacctaattgtatcaaacacagaagctcctggagatgacaaagtgtattctgcgaatggcttcacaacccaaactgtgggcgcttctgctcagggagtttgtggcaccgtgggatcaggaatcaaaaacggaggtcaggagaccatcgaaatggtgaaaggaggacaccagacctcggaatcctgccggggggctggccaccatcacaccctggactcctgcaggggaggacacacggaggtggacaactgcagatacacttactcggagtggcacagttttactcagccccgtcttggtgaaaaagtgtatctgtgtaatcaagatgaaaatcacaagcatgcccaagactatgtcctgacatataactatgaaggaagaggatcggtggctgggtctgtaggttgttgcagtgaacgacaagaagaagatgggcttgaatttttggataatttggagcccaaatttaggacactagcagaagcatgcatgaagagatgagtgtgttctaataagtctctgaaagccagtggctttatgacttttaaaaaaaattacaaaccaagaattttttaaagcagaagatgctatttgtgggggtttttctctcattatttggatggaatctctttggtcaaatgcacatttacagagagacactataaacaagtac

SEQ ID NO: 1368 - DNA, 3999 bp, Homo sapiens
  source 1..3999: mol_type = genomic DNA
gcctcgggaacgtgcggctccctgtgcctcgggaacgtgcggctccctgtgcctcagcgcctgcccaggccacggaaaggggaaccgctgggcggccgggacggagagcgagtgtccttgggtgaaaaagggaactgctcgcctttctgggaattgtttactctgagagaagggcggggggaagtggcgggtgggggaggggatcttgaccctttgctcctgaggactgtcgaccggcgagccctagatcttaatatttgccagtgatgcctgcaaaaatgtgacattacatgttccctccaaactagatgccgagaaacttgttggtagagttaacctgaaagagtgctttacagctgcaaatctaattcattcaagtgatcctgacttccaaattttggaggatggttcagtctatacaacaaatactattctattgtcctcggagaagagaagttttaccatattactttccaacactgagaaccaagaaaagaagaaaatatttgtctttttggagcatcaaacaaaggtcctaaagaaaagacatactaaagaaaaagttctaaggcgcgccaagagaagatgggctccaattccttgttcgatgctagaaaactccttgggtccttttccacttttccttcaacaggttcaatctgacacggcccaaaactataccatatactattccataagaggtcctggagttgaccaagaacctcggaatttattttatgtggagagagacactggaaacttgtattgtactcgtcctgtagatcgtgagcagtatgaatcttttgagataattgcctttgcaacaactccagatgggtatactccagaacttccactgcccctaataatcaaaatagaggatgaaaatgataactacccaatttttacagaagaaacttatacttttacaatttttgaaaattgcagagtggggcactactgtgggacaagtgtgtgctactgacaaagatgagcctgacacgatgcacacacgcctgaagtactccatcattgggcaggtgccaccatcacccaccctattttctatgcatccaactacaggcgtgatcaccacaacatcatctcagctagacagagagttaattgacaagtaccagttgaaaataaaagtacaagacatggatggtcagtattttggtctacagacaacttcaacttgtatcattaacattgatgatgtaaatgaccacttgccaacatttactcgtacttcttatgtgacatcagtggaagaaaatacagttgatgtggaaatcttacgagttactgttgaggataaggacttagtgaatactgctaactggagagctaattataccattttaaagggcaatgaaaatggcaattttaaaattgtaacagatgccaaaaccaatgaaggagttctttgtgtagttaagcctttgaattatgaagaaaagcaacagatgatcttgcaaattggtgtagttaatgaagctccattttccagagaggctagtccaagatcagccatgagcacagcaacagttactgttaatgtagaagatcaggatgagggccctgagtgtaaccctccaatacagactgttcgcatgaaagaaaatgcagaagtgggaacaacaagcaatggatataaagcatatgacccagaaacaagaagtagcagtggcataaggtataagaaattaactgatccaacagggtgggtcaccattgatgaaaatacaggatcaatcaaagttttcagaagcctggatagagaggcagagaccatcaaaaatggcatatataatattacagtccttgcatcagaccaaggagggagaacatgtacggggacactgggcattatacttcaagacgtgaatgataacagcccattcatacctaaaaagacagtgatcatctgcaaacccaccatgtcatctgcggagattgttgcggttgatcctgatgagcctatccatggcccaccctttgactttagtctggagagttctacttcagaagtacagagaatgtggagactgaaagcaattaatgatacagcagcacgtctttcctatcagaatgatcctccatttggctcatatgtagtacctataacagtgagagatagacttggcatgtctagtgtcacttcattggatgttacactgtgtgactgcattaccgaaaatgactgcacacatcgtgtagatccaaggattggcggtggaggagtacaacttggaaagtgggccatccttgcaatattgttgggcatagcattgctcttttgcatcctgtttacgctggtctgtggggcttctgggacgtctaaacaaccaaaagtaattcctgatgatttagcccagcagaacctaattgtatcaaacacagaagctcctggagatgacaaagtgtattctgcgaatggcttcacaacccaaactgtgggcgcttctgctcagggagtttgtggcaccgtgggatcaggaatcaaaaacggaggtcaggagaccatcgaaatggtgaaaggaggacaccagacctcggaatcctgccggggggctggccaccatcacaccctggactcctgcaggggaggacacacggaggtggacaactgcagatacacttactcggagtggcacagttttactcagccccgtcttggtgaaaaagtgtatctgtgtaatcaagatgaaaatcacaagcatgcccaagactatgtcctgacatataactatgaaggaagaggatcggtggctgggtctgtaggttgttgcagtgaacgacaagaagaagatgggcttgaatttttggataatttggagcccaaatttaggacactagcagaagcatgcatgaagagatgagtgtgttctaataagtctctgaaagccagtggctttatgacttttaaaaaaaattacaaaccaagaattttttaaagcagaagatgctatttgtgggggtttttctctcattatttggatggaatctctttggtcaaatgcacatttacagagagacactataaacaagtacacaaatttttcaatttttacatatttttaaattacttatcttctatccaaggaggtctacagagaaattaaagtctgccttatttgttacatttgggtataatgacaacagccaatttatagtgcaataaaatgtaattaattcaagtccttattatagactatttgaagcacaacctaatggaaaattgtagagaccttgctttaacattatctccagttaattaagtgttcatgtggtgcttggaaactgttgttttcctgaacatctaaagtgtgtagactgcattcttgctattattttattcttgtaatgtgaccttttcactgtgcaaagggagatttctagccaggcattgactattacaatttcattttggtggagtttagttttaggttttattgtatataaaatcctgcactgaatctgtgtctcctctgttacctacttttgccagtgaaatttaagttttaaaatactttcagaatgtatttttactactgcaagtttttggtctttaaaatgtcaagtagcatctctctctttctctctgtctctttctgtttctctctccagttttttttttttttttaatttccatatgggctaaagaatccaaatattttaaaaatctgtctctcttttcttctctcataaagtgaattattccttttttttgttttatgtaagtgtatatattcttagtttttcttgaaatcattgtaatgttaactttgttgtttcaaatatcttggtgattgcttcattatctcttcaacaaaaaaaacctttaattttgccattgaaactgtagaactatgccatgcttttattagaagcagtgctctgtgttaacaacaagaatggtgtaattagaattgggatgtggatatttactgtatgacaacacatttacagttctgtaatgcaaggatgcagttt

SEQ ID NO: 1369 - DNA, 5525 bp, Homo sapiens
  source 1..5525: mol_type = genomic DNA
ttttcttagacatcaactgcagacggctggcaggatagaagcagcggctcacttggactttttcaccagggaaatcagagacaatgatggggctcttccccagaactacaggggctctggccatcttcgtggtggtcatattggttcatggagaattgcgaatagagactaaaggtcaatatgatgaagaagagatgactatgcaacaagctaaaagaaggcaaaaacgtgaatgggtgaaatttgccaaaccctgcagagaaggagaagataactcaaaaagaaacccaattgccaagattacttcagattaccaagcaacccagaaaatcacctaccgaatctctggagtgggaatcgatcagccgccttttggaatctttgttgttgacaaaaacactggagatattaacataacagctatagtcgaccgggaggaaactccaagcttcctgatcacatgtcgggctctaaatgcccaaggactagatgtagagaaaccacttatactaacggttaaaattttggatattaatgataatcctccagtattttcacaacaaattttcatgggtgaaattgaagaaaatagtgcctcaaactcactggtgatgatactaaatgccacagatgcagatgaaccaaaccacttgaattctaaaattgccttcaaaattgtctctcaggaaccagcaggcacacccatgttcctcctaagcagaaacactggggaagtccgtactttgaccaattctcttgaccgagagcaagctagcagctatcgtctggttgtgagtggtgcagacaaagatggagaaggactatcaactcaatgtgaatgtaatattaaagtgaaagatgtcaacgataacttcccaatgtttagagactctcagtattcagcacgtattgaagaaaatattttaagttctgaattacttcgatttcaagtaacagatttggatgaagagtacacagataattggcttgcagtatatttctttacctctgggaatgaaggaaattggtttgaaatacaaactgatcctagaactaatgaaggcatcctgaaagtggtgaaggctctagattatgaacaactacaaagcgtgaaacttagtattgctgtcaaaaacaaagctgaatttcaccaatcagttatctctcgataccgagttcagtcaaccccagtcacaattcaggtaataaatgtaagagaaggaattgcattccgtcctgcttccaagacatttactgtgcaaaaaggcataagtagcaaaaaattggtggattatatcctgggaacatatcaagccatcgatgaggacactaacaaagctgcctcaaatgtcaaatatgtcatgggacgtaacgatggtggatacctaatgattgattcaaaaactgctgaaatcaaatttgtcaaaaatatgaaccgagattctactttcatagttaacaaaacaatcacagctgaggttctggccatagatgaatacacgggtaaaacttctacaggcacggtatatgttagagtacccgatttcaatgacaattgtccaacagctgtcctcgaaaaagatgcagtttgcagttcttcaccttccgtggttgtctccgctagaacactgaataatagatacactggcccctatacatttgcactggaagatcaacctgtaaagttgcctgccgtatggagtatcacaaccctcaatgctacctcggccctcctcagagcccaggaacagatacctcctggagtataccacatctccctggtacttacagacagtcagaacaatcggtgtgagatgccacgcagcttgacactggaagtctgtcagtgtgacaacaggggcatctgtggaacttcttacccaaccacaagccctgggaccaggtatggcaggccgcactcagggaggctggggcctgccgccatcggcctgctgctccttggtctcctgctgctgctgttggccccccttctgctgttgacctgtgactgtggggcaggttctactgggggagtgacaggtggttttatcccagttcctgatggctcagaaggaacaattcatcagtggggaattgaaggagcccatcctgaagacaaggaaatcacaaatatttgtgtgcctcctgtaacagccaatggagccgatttcatggaaagttctgaagtttgtacaaatacgtatgccagaggcacagcggtggaaggcacttcaggaatggaaatgaccactaagcttggagcagccactgaatctggaggtgctgcaggctttgcaacagggacagtgtcaggagctgcttcaggattcggagcagccactggagttggcatctgttcctcagggcagtctggaaccatgagaacaaggcattccactggaggaaccaataaggactacgctgatggggcgataagcatgaattttctggactcctacttttctcagaaagcatttgcctgtgcggaggaagacgatggccaggaagcaaatgactgcttgttgatctatgataatgaaggcgcagatgccactggttctcctgtgggctccgtgggttgttgcagttttattgctgatgacctggatgacagcttcttggactcacttggacccaaatttaaaaaacttgcagagataagccttggtgttgatggtgaaggcaaagaagttcagccaccctctaaagacagcggttatgggattgaatcctgtggccatcccatagaagtccagcagacaggatttgttaagtgccagactttgtcaggaagtcaaggagcttctgctttgtccacctctgggtctgtccagccagctgtttccatccctgaccctctgcagcatggtaactatttagtaacggagacttactcggcttctggttccctcgtgcaaccttccactgcaggctttgatccacttctcacacaaaatgtgatagtgacagaaagggtgatctgtcccatttccagtgttcctggcaacctagctggcccaacgcagctacgagggtcacatactatgctctgtacagaggatccttgctcccgtctaatatgaccagaatgagctggaataccacactgaccaaatctggatctttggactaaagtattcaaaatagcatagcaaagctcactgtattgggctaataatttggcacttattagcttctctcataaactgatcacgattataaattaaatgtttgggttcataccccaaaagcaatatgttgtcactcctaattctcaagtactattcaaattgtagtaaatcttaaagtttttcaaaaccctaaaatcatattcgccaggaaattttcctaaacattcttaagcttctatttttcccctgccaaaggaaggtgtttatcattttaaaatgcaatgtgatttagtggattaagcaggagcgctggttcttgtctccattgccttttcttatatcattgataatgatgtaagaatcacaaggggccgggcgcggtggctcacgcctgtaatcccagcactttgggaggccgaggcaggtggatcatgaggtcaggagatcgagaccatcctggctaacaaggtgaaaccccgtctctactaaaaatacaaaaaattagccgggcgcagtggcgggcgcctgtagtcccagctactcgggaggctgaggcaggagaatggcatgaacccgggaagcggagcttgcagtgagccgagattgcgccactgcagtccgcagtccggcctgggcgacagagcgagactccgtctcaaaaaaaaaaaaaaaaaaagaatcacaaggtatttgctaaagcattttgagctgcttggaaaaagggaagtagttgcagtagagtttcttccatcttcttggtgctgggaagccatatatgtgtcttttactcaagctaaggggtataagcttatgtgttgaatttgctacatctatatttcacatattctcacaataagagaattttgaaatagaaatatcatagaacatttaagaaagtttagtataaataatattttgtgtgttttaatccctttgaagggatctatccaaagaaaatattttacactgagctccttcctacacgtctcagtaacagatcctgtgttagtctttgaaaatagctcattttttaaatgtcagtgagtagatgtagcatacatatgatgtataatgacgtgtattatgttaacaatgtctgcagattttgtaggaatacaaaacatggccttttttataagcaaaacgggccaatgactagaataacacatagggcaatctgtgaatatgtattataagcagcattccagaaaagtagttggtgaaataattttcaagtcaaaaagggatatggaaagggaattatgagtaacctctattttttaagccttgcttttaaattaaacagctacagccatttaagccttgaggataataaagcttgagagtaataatgttaggttagcaaaggtttagatgtatcacttcatgcatgctaccatgatagtaatgcagctcttcgagtcatttctggtcattcaagatattcacccttttgcccatagaaagcaccctacctcacctgcttactgacattgtcttagctgatcacaagatcattatcagcctccattattccttactgtatataaaatacagagttttatattttcctttcttcgtttttcaccatattcaaaacctaaatttgtttttgcagatggaatgcaaagtaatcaagtgtttgtgctttcacctagaagggtgtggtcctgaaggaaagaggtcccctaaatatcccccaccctggtgctcctccctctccctggtaccctgactaccaggaagtcaggtgctagagcagctggagaagtgcaggcagcctgtgcttccacagatgggggtgctgctgcaacaaggctttcaatgtgcccatcttaggtgggagaagctagatcctgtgcagcagcctggtaagtcctgaggaggttccattgctcttcctgctgctgtcctttgcttctcaacggtggctcgctctacagtctagagcacatgcagctaacttgtgcctctgcttatgcatgagggttaaattaacaaccataaccttcatttgaagttcaaaggtgtattcaggatcctcaaagcattttaaccttgccgcttaaaacccaatttaccgtgaaatgggaattttgctgcattgttaaactgtagtggaaaccatgctatagtaataaaggttatataagagagaaattgaaattaaatgtgtttttaaatttcaaaaaaaaatcaatctttaggatgacttaaaaattgatttgccatgtaaaatgtatctgcattttttacacaaaacttgttttaagcataaaattttaaaactgtactacttgatgtattatacattttgaaccatatgtattaaaccataaacagtataatgttgttataataaaacaggcaataaatttataaataaaagctgaa

SEQ ID NO: 1370 - DNA, 9796 bp, Homo sapiens
  source 1..9796: mol_type = genomic DNA
aagaaaccggccaggtgtggcctaggcgcccagtgccagcggggaggagactcgctccgccgccgaccaacaccaacacccagctccgacgcagctcctctgcgcccttgccgccctccgagccacagctttcctcccgctcctgcccccggcccgtcgccgtctccgcgctcgcagcggcctcgggagggcccaggtagcgagcagcgacctcgcgagccttccgcactcccgcccggttccccggccgtccgcctatccttggccccctccgctttctccgcgccggcccgcctcgcttatgcctcggcgctgagccgctctcccgattgcccgccgacatgagctgcaacggaggctcccacccgcggatcaacactctgggccgcatgatccgcgccgagtctggcccggacctgcgctacgaggtgaccagcggcggcgggggcaccagcaggatgtactattctcggcgcggcgtgatcaccgaccagaactcggacggctactgtcaaaccggcacgatgtccaggcaccagaaccagaacaccatccaggagctgctgcagaactgctccgactgcttgatgcgagcagagctcatcgtgcagcctgaattgaagtatggagatggaatacaactgactcggagtcgagaattggatgagtgttttgcccaggccaatgaccaaatggaaatcctcgacagcttgatcagagagatgcggcagatgggccagccctgtgatgcttaccagaaaaggcttcttcagctccaagagcaaatgcgagccctttataaagccatcagtgtccctcgagtccgcagggccagctccaagggtggtggaggctacacttgtcagagtggctctggctgggatgagttcaccaaacatgtcaccagtgaatgtttggggtggatgaggcagcaaagggcggagatggacatggtggcctggggtgtggacctggcctcagtggagcagcacattaacagccaccggggcatccacaactccatcggcgactatcgctggcagctggacaaaatcaaagccgacctgcgcgagaaatctgctatctaccagttggaggaggagtatgaaaacctgctgaaagcgtcctttgagaggatggatcacctgcgacagctgcagaacatcattcaggccacgtccagggagatcatgtggatcaatgactgcgaggaggaggagctgctgtacgactggagcgacaagaacaccaacatcgctcagaaacaggaggccttctccatacgcatgagtcaactggaagttaaagaaaaagagctcaataagctgaaacaagaaagtgaccaacttgtcctcaatcagcatccagcttcagacaaaattgaggcctatatggacactctgcagacgcagtggagttggattcttcagatcaccaagtgcattgatgttcatctgaaagaaaatgctgcctactttcagttttttgaagaggcgcagtctactgaagcatacctgaaggggctccaggactccatcaggaagaagtacccctgcgacaagaacatgcccctgcagcacctgctggaacagatcaaggagctggagaaagaacgagagaaaatccttgaatacaagcgtcaggtgcagaacttggtaaacaagtctaagaagattgtacagctgaagcctcgtaacccagactacagaagcaataaacccattattctcagagctctctgtgactacaaacaagatcagaaaatcgtgcataagggggatgagtgtatcctgaaggacaacaacgagcgcagcaagtggtacgtgacgggcccgggaggcgttgacatgcttgttccctctgtggggctgatcatccctcctccgaacccactggccgtggacctctcttgcaagattgagcagtactacgaagccatcttggctctgtggaaccagctctacatcaacatgaagagcctggtgtcctggcactactgcatgattgacatagagaagatcagggccatgacaatcgccaagctgaaaacaatgcggcaggaagattacatgaagacgatagccgaccttgagttacattaccaagagttcatcagaaatagccaaggctcagagatgtttggagatgatgacaagcggaaaatacagtctcagttcaccgatgcccagaagcattaccagaccctggtcattcagctccctggctatccccagcaccagacagtgaccacaactgaaatcactcatcatggaacctgccaagatgtcaaccataataaagtaattgaaaccaacagagaaaatgacaagcaagaaacatggatgctgatggagctgcagaagattcgcaggcagatagagcactgcgagggcaggatgactctcaaaaacctccctctagcagaccagggatcttctcaccacatcacagtgaaaattaacgagcttaagagtgtgcagaatgattcacaagcaattgctgaggttctcaaccagcttaaagatatgcttgccaacttcagaggttctgaaaagtactgctatttacagaatgaagtatttggactatttcagaaactggaaaatatcaatggtgttacagatggctacttaaatagcttatgcacagtaagggcactgctccaggctattctccaaacagaagacatgttaaaggtttatgaagccaggctcactgaggaggaaactgtctgcctggacctggataaagtggaagcttaccgctgtggactgaagaaaataaaaaatgacttgaacttgaagaagtcgttgttggccactatgaagacagaactacagaaagcccagcagatccactctcagacttcacagcagtatccactttatgatctggacttgggcaagttcggtgaaaaagtcacacagctgacagaccgctggcaaaggatagataaacagatcgactttaggttatgggacctggagaaacaaatcaagcaattgaggaattatcgtgataactatcaggctttctgcaagtggctctatgatgctaaacgccgccaggattccttagaatccatgaaatttggagattccaacacagtcatgcggtttttgaatgagcagaagaacttgcacagtgaaatatctggcaaacgagacaaatcagaggaagtacaaaaaattgctgaactttgcgccaattcaattaaggattatgagctccagctggcctcatacacctcaggactggaaactctgctgaacatacctatcaagaggaccatgattcagtccccttctggggtgattctgcaagaggctgcagatgttcatgctcggtacattgaactacttacaagatctggagactattacaggttcttaagtgagatgctgaagagtttggaagatctgaagctgaaaaataccaagatcgaagttttggaagaggagctcagactggcccgagatgccaactcggaaaactgtaataagaacaaattcctggatcagaacctgcagaaataccaggcagagtgttcccagttcaaagcgaagcttgcgagcctggaggagctgaagagacaggctgagctggatgggaagtcggctaagcaaaatctagacaagtgctacggccaaataaaagaactcaatgagaagatcacccgactgacttatgagattgaagatgaaaagagaagaagaaaatctgtggaagacagatttgaccaacagaagaatgactatgaccaactgcagaaagcaaggcaatgtgaaaaggagaaccttggttggcagaaattagagtctgagaaagccatcaaggagaaggagtacgagattgaaaggttgagggttctactgcaggaagaaggcacccggaagagagaatatgaaaatgagctggcaaaggtaagaaaccactataatgaggagatgagtaatttaaggaacaagtatgaaacagagattaacattacgaagaccaccatcaaggagatatccatgcaaaaagaggatgattccaaaaatcttagaaaccagcttgatagactttcaagggaaaatcgagatctgaaggatgaaattgtcaggctcaatgacagcatcttgcaggccactgagcagcgaaggcgagctgaagaaaacgcccttcagcaaaaggcctgtggctctgagataatgcagaagaagcagcatctggagatagaactgaagcaggtcatgcagcagcgctctgaggacaatgcccggcacaagcagtccctggaggaggctgccaagaccattcaggacaaaaataaggagatcgagagactcaaagctgagtttcaggaggaggccaagcgccgctgggaatatgaaaatgaactgagtaaggtaagaaacaattatgatgaggagatcattagcttaaaaaatcagtttgagaccgagatcaacatcaccaagaccaccatccaccagctcaccatgcagaaggaagaggataccagtggctaccgggctcagatagacaatctcacccgagaaaacaggagcttatctgaagaaataaagaggctgaagaacactctaacccagaccacagagaatctcaggagggtggaagaagacatccaacagcaaaaggccactggctctgaggtgtctcagaggaaacagcagctggaggttgagctgagacaagtcactcagatgcgaacagaggagagcgtaagatataagcaatctcttgatgatgctgccaaaaccatccaggataaaaacaaggagatagaaaggttaaaacaactgatcgacaaagaaacaaatgaccggaaatgcctggaagatgaaaacgcgagattacaaagggtccagtatgacctgcagaaagcaaacagtagtgcgacggagacaataaacaaactgaaggttcaggagcaagaactgacacgcctgaggatcgactatgaaagggtttcccaggagaggactgtgaaggaccaggatatcacgcggttccagaactctctgaaagagctgcagctgcagaagcagaaggtggaagaggagctgaatcggctgaagaggaccgcgtcagaagactcctgcaagaggaagaagctggaggaagagctggaaggcatgaggaggtcgctgaaggagcaagccatcaaaatcaccaacctgacccagcagctggagcaggcatccattgttaagaagaggagtgaggatgacctccggcagcagagggacgtgctggatggccacctgagggaaaagcagaggacccaggaagagctgaggaggctctcttctgaggtcgaggccctgaggcggcagttactccaggaacaggaaagtgtcaaacaagctcacttgaggaatgagcatttccagaaggcgatagaagataaaagcagaagcttaaatgaaagcaaaatagaaattgagaggctgcagtctctcacagagaacctgaccaaggagcacttgatgttagaagaagaactgcggaacctgaggctggagtacgatgacctgaggagaggacgaagcgaagcggacagtgataaaaatgcaaccatcttggaactaaggagccagctgcagatcagcaacaaccggaccctggaactgcaggggctgattaatgatttacagagagagagggaaaatttgagacaggaaattgagaaattccaaaagcaggctttagaggcatctaataggattcaggaatcaaagaatcagtgtactcaggtggtacaggaaagagagagccttctggtgaaaatcaaagtcctggagcaagacaaggcaaggctgcagaggctggaggatgagctgaatcgtgcaaaatcaactctagaggcagaaaccagggtgaaacagcgcctggagtgtgagaaacagcaaattcagaatgacctgaatcagtggaagactcaatattcccgcaaggaggaggctattaggaagatagaatcggaaagagaaaagagtgagagagagaagaacagtcttaggagtgagatcgaaagactccaagcagagatcaagagaattgaagagaggtgcaggcgtaagctggaggattctaccagggagacacagtcacagttagaaacagaacgctcccgatatcagagggagattgataaactcagacagcgcccatatgggtcccatcgagagacccagactgagtgtgagtggaccgttgacacctccaagctggtgtttgatgggctgaggaagaaggtgacagcaatgcagctctatgagtgtcagctgatcgacaaaacaaccttggacaaactattgaaggggaagaagtcagtggaagaagttgcttctgaaatccagccattccttcggggtgcaggatctatcgctggagcatctgcttctcctaaggaaaaatactctttggtagaggccaagagaaagaaattaatcagcccagaatccacagtcatgcttctggaggcccaggcagctacaggtggtataattgatccccatcggaatgagaagctgactgtcgacagtgccatagctcgggacctcattgacttcgatgaccgtcagcagatatatgcagcagaaaaagctatcactggttttgatgatccattttcaggcaagacagtatctgtttcagaagccatcaagaaaaatttgattgatagagaaaccggaatgcgcctgctggaagcccagattgcttcagggggtgtagtagaccctgtgaacagtgtctttttgccaaaagatgtcgccttggcccgggggctgattgatagagatttgtatcgatccctgaatgatccccgagatagtcagaaaaactttgtggatccagtcaccaaaaagaaggtcagttacgtgcagctgaaggaacggtgcagaatcgaaccacatactggtctgctcttgctttcagtacagaagagaagcatgtccttccaaggaatcagacaacctgtgaccgtcactgagctagtagattctggtatattgagaccgtccactgtcaatgaactggaatctggtcagatttcttatgacgaggttggtgagagaattaaggacttcctccagggttcaagctgcatagcaggcatatacaatgagaccacaaaacagaagcttggcatttatgaggccatgaaaattggcttagtccgacctggtactgctctggagttgctggaagcccaagcagctactggctttatagtggatcctgttagcaacttgaggttaccagtggaggaagcctacaagagaggtctggtgggcattgagttcaaagagaagctcctgtctgcagaacgagctgtcactgggtataatgatcctgaaacaggaaacatcatctctttgttccaagccatgaataaggaactcatcgaaaagggccacggtattcgcttattagaagcacagatcgcaaccggggggatcattgacccaaaggagagccatcgtttaccagttgacatagcatataagaggggctatttcaatgaggaactcagtgagattctctcagatccaagtgatgataccaaaggattttttgaccccaacactgaagaaaatcttacctatctgcaactaaaagaaagatgcattaaggatgaggaaacagggctctgtcttctgcctctgaaagaaaagaagaaacaggtgcagacatcacaaaagaataccctcaggaagcgtagagtggtcatagttgacccagaaaccaataaagaaatgtctgttcaggaggcctacaagaagggcctaattgattatgaaaccttcaaagaactgtgtgagcaggaatgtgaatgggaagaaataaccatcacgggatcagatggctccaccagggtggtcctggtagatagaaagacaggcagtcagtatgatattcaagatgctattgacaagggccttgttgacaggaagttctttgatcagtaccgatccggcagcctcagcctcactcaatttgctgacatgatctccttgaaaaatggtgtcggcaccagcagcagcatgggcagtggtgtcagcgatgatgtttttagcagctcccgacatgaatcagtaagtaagatttccaccatatccagcgtcaggaatttaaccataaggagcagctctttttcagacaccctggaagaatcgagccccattgcagccatctttgacacagaaaacctggagaaaatctccattacagaaggtatagagcggggcatcgttgacagcatcacgggtcagaggcttctggaggctcaggcctgcacaggtggcatcatccacccaaccacgggccagaagctgtcacttcaggacgcagtctcccagggtgtgattgaccaagacatggccaccaggctgaagcctgctcagaaagccttcataggcttcgagggtgtgaagggaaagaagaagatgtcagcagcagaggcagtgaaagaaaaatggctcccgtatgaggctggccagcgcttcctggagttccagtacctcacgggaggtcttgttgacccggaagtgcatgggaggataagcaccgaagaagccatccggaaggggttcatagatggccgcgccgcacagaggctgcaagacaccagcagctatgccaaaatcctgacctgccccaaaaccaaattaaaaatatcctataaggatgccataaatcgctccatggtagaagatatcactgggctgcgccttctggaagccgcctccgtgtcgtccaagggcttacccagcccttacaacatgtcttcggctccggggtcccgctccggctcccgctcgggatctcgctccggatctcgctccgggtcccgcagtgggtcccggagaggaagctttgacgccacagggaattcttcctactcttattcctactcatttagcagtagttctattgggcactagtagtcagttgggagtggttgctataccttgacttcatttatatgaatttccactttattaaataatagaaaagaaaatcccggtgcttgcagtagagtgataggacattctatgcttacagaaaatatagccatgattgaaatcaaatagtaaaggctgttctggctttttatcttcttagctcatcttaaataagcagtacacttggatgcagtgcgtctgaagtgctaatcagttgtaacaatagcacaaatcgaacttaggatttgtttcttctcttctgtgtttcgatttttgatcaattctttaattttggaagcctataatacagttttctattcttggagataaaaattaaatggatcactgatattttagtcattctgcttctcatctaaatatttccatattctgtattaggagaaaattaccctcccagcaccagcccccctctcaaacccccaacccaaaaccaagcattttggaatgagtctcctttagtttcagagtgtggattgtataacccatatactcttcgatgtacttgtttggtttggtattaatttgactgtgcatgacagcggcaatcttttctttggtcaaagttttctgtttattttgcttgtcatattcgatgtactttaaggtgtctttatgaagtttgctattctggcaataaacttttagacttttgaagtgtttgtgttttaatttaatatgtttataagcatgtataaacatttagcatatttttatcataggtctaaaaatatttgtttactaaatacctgtgaagaaataccattaaaaaactatttggttctgaattcttactagaa

SEQ ID NO: 1371 - DNA, 6928 bp, Homo sapiens
  source 1..6928: mol_type = genomic DNA
caacaacaaagggcggagatggacatggtggcctggggtgtggacctggcctcagtggagcagcacattaacagccaccggggcatccacaactccatcggcgactatcgctggcagctggacaaaatcaaagccgacctgcgcgagaaatctgctatctaccagttggaggaggagtatgaaaacctgctgaaagcgtcctttgagaggatggatcacctgcgacagctgcagaacatcattcaggccacgtccagggagatcatgtggatcaatgactgcgaggaggaggagctgctgtacgactggagcgacaagaacaccaacatcgctcagaaacaggaggccttctccatacgcatgagtcaactggaagttaaagaaaaagagctcaataagctgaaacaagaaagtgaccaacttgtcctcaatcagcatccagcttcagacaaaattgaggcctatatggacactctgcagacgcagtggagttggattcttcagatcaccaagtgcattgatgttcatctgaaagaaaatgctgcctactttcagttttttgaagaggcgcagtctactgaagcatacctgaaggggctccaggactccatcaggaagaagtacccctgcgacaagaacatgcccctgcagcacctgctggaacagatcaaggagctggagaaagaacgagagaaaatccttgaatacaagcgtcaggtgcagaacttggtaaacaagtctaagaagattgtacagctgaagcctcgtaacccagactacagaagcaataaacccattattctcagagctctctgtgactacaaacaagatcagaaaatcgtgcataagggggatgagtgtatcctgaaggacaacaacgagcgcagcaagtggtacgtgacgggcccgggaggcgttgacatgcttgttccctctgtggggctgatcatccctcctccgaacccactggccgtggacctctcttgcaagattgagcagtactacgaagccatcttggctctgtggaaccagctctacatcaacatgaagagcctggtgtcctggcactactgcatgattgacatagagaagatcagggccatgacaatcgccaagctgaaaacaatgcggcaggaagattacatgaagacgatagccgaccttgagttacattaccaagagttcatcagaaatagccaaggctcagagatgtttggagatgatgacaagcggaaaatacagtctcagttcaccgatgcccagaagcattaccagaccctggtcattcagctccctggctatccccagcaccagacagtgaccacaactgaaatcactcatcatggaacctgccaagatgtcaaccataataaagtaattgaaaccaacagagaaaatgacaagcaagaaacatggatgctgatggagctgcagaagattcgcaggcagatagagcactgcgagggcaggatgactctcaaaaacctccctctagcagaccagggatcttctcaccacatcacagtgaaaattaacgagcttaagagtgtgcagaatgattcacaagcaattgctgaggttctcaaccagcttaaagatatgcttgccaacttcagaggttctgaaaagtactgctatttacagaatgaagtatttggactatttcagaaactggaaaatatcaatggtgttacagatggctacttaaatagcttatgcacagtaagggcactgctccaggctattctccaaacagaagacatgttaaaggtttatgaagccaggctcactgaggaggaaactgtctgcctggacctggataaagtggaagcttaccgctgtggactgaagaaaataaaaaatgacttgaacttgaagaagtcgttgttggccactatgaagacagaactacagaaagcccagcagatccactctcagacttcacagcagtatccactttatgatctggacttgggcaagttcggtgaaaaagtcacacagctgacagaccgctggcaaaggatagataaacagatcgactttaggttatgggacctggagaaacaaatcaagcaattgaggaattatcgtgataactatcaggctttctgcaagtggctctatgatgctaaacgccgccaggattccttagaatccatgaaatttggagattccaacacagtcatgcggtttttgaatgagcagaagaacttgcacagtgaaatatctggcaaacgagacaaatcagaggaagtacaaaaaattgctgaactttgcgccaattcaattaaggattatgagctccagctggcctcatacacctcaggactggaaactctgctgaacatacctatcaagaggaccatgattcagtccccttctggggtgattctgcaagaggctgcagatgttcatgctcggtacattgaactacttacaagatctggagactattacaggttcttaagtgagatgctgaagagtttggaagatctgaagctgaaaaataccaagatcgaagttttggaagaggagctcagactggcccgagatgccaactcggaaaactgtaataagaacaaattcctggatcagaacctgcagaaataccaggcagagtgttcccagttcaaagcgaagcttgcgagcctggaggagctgaagagacaggctgagctggatgggaagtcggctaagcaaaatctagacaagtgctacggccaaataaaagaactcaatgagaagatcacccgactgacttatgagattgaagatgaaaagagaagaagaaaatctgtggaagacagatttgaccaacagaagaatgactatgaccaactgcagaaagcaaggcaatgtgaaaaggagaaccttggttggcagaaattagagtctgagaaagccatcaaggagaaggagtacgagattgaaaggttgagggttctactgcaggaagaaggcacccggaagagagaatatgaaaatgagctggcaaaggcatctaataggattcaggaatcaaagaatcagtgtactcaggtggtacaggaaagagagagccttctggtgaaaatcaaagtcctggagcaagacaaggcaaggctgcagaggctggaggatgagctgaatcgtgcaaaatcaactctagaggcagaaaccagggtgaaacagcgcctggagtgtgagaaacagcaaattcagaatgacctgaatcagtggaagactcaatattcccgcaaggaggaggctattaggaagatagaatcggaaagagaaaagagtgagagagagaagaacagtcttaggagtgagatcgaaagactccaagcagagatcaagagaattgaagagaggtgcaggcgtaagctggaggattctaccagggagacacagtcacagttagaaacagaacgctcccgatatcagagggagattgataaactcagacagcgcccatatgggtcccatcgagagacccagactgagtgtgagtggaccgttgacacctccaagctggtgtttgatgggctgaggaagaaggtgacagcaatgcagctctatgagtgtcagctgatcgacaaaacaaccttggacaaactattgaaggggaagaagtcagtggaagaagttgcttctgaaatccagccattccttcggggtgcaggatctatcgctggagcatctgcttctcctaaggaaaaatactctttggtagaggccaagagaaagaaattaatcagcccagaatccacagtcatgcttctggaggcccaggcagctacaggtggtataattgatccccatcggaatgagaagctgactgtcgacagtgccatagctcgggacctcattgacttcgatgaccgtcagcagatatatgcagcagaaaaagctatcactggttttgatgatccattttcaggcaagacagtatctgtttcagaagccatcaagaaaaatttgattgatagagaaaccggaatgcgcctgctggaagcccagattgcttcagggggtgtagtagaccctgtgaacagtgtctttttgccaaaagatgtcgccttggcccgggggctgattgatagagatttgtatcgatccctgaatgatccccgagatagtcagaaaaactttgtggatccagtcaccaaaaagaaggtcagttacgtgcagctgaaggaacggtgcagaatcgaaccacatactggtctgctcttgctttcagtacagaagagaagcatgtccttccaaggaatcagacaacctgtgaccgtcactgagctagtagattctggtatattgagaccgtccactgtcaatgaactggaatctggtcagatttcttatgacgaggttggtgagagaattaaggacttcctccagggttcaagctgcatagcaggcatatacaatgagaccacaaaacagaagcttggcatttatgaggccatgaaaattggcttagtccgacctggtactgctctggagttgctggaagcccaagcagctactggctttatagtggatcctgttagcaacttgaggttaccagtggaggaagcctacaagagaggtctggtgggcattgagttcaaagagaagctcctgtctgcagaacgagctgtcactgggtataatgatcctgaaacaggaaacatcatctctttgttccaagccatgaataaggaactcatcgaaaagggccacggtattcgcttattagaagcacagatcgcaaccggggggatcattgacccaaaggagagccatcgtttaccagttgacatagcatataagaggggctatttcaatgaggaactcagtgagattctctcagatccaagtgatgataccaaaggattttttgaccccaacactgaagaaaatcttacctatctgcaactaaaagaaagatgcattaaggatgaggaaacagggctctgtcttctgcctctgaaagaaaagaagaaacaggtgcagacatcacaaaagaataccctcaggaagcgtagagtggtcatagttgacccagaaaccaataaagaaatgtctgttcaggaggcctacaagaagggcctaattgattatgaaaccttcaaagaactgtgtgagcaggaatgtgaatgggaagaaataaccatcacgggatcagatggctccaccagggtggtcctggtagatagaaagacaggcagtcagtatgatattcaagatgctattgacaagggccttgttgacaggaagttctttgatcagtaccgatccggcagcctcagcctcactcaatttgctgacatgatctccttgaaaaatggtgtcggcaccagcagcagcatgggcagtggtgtcagcgatgatgtttttagcagctcccgacatgaatcagtaagtaagatttccaccatatccagcgtcaggaatttaaccataaggagcagctctttttcagacaccctggaagaatcgagccccattgcagccatctttgacacagaaaacctggagaaaatctccattacagaaggtatagagcggggcatcgttgacagcatcacgggtcagaggcttctggaggctcaggcctgcacaggtggcatcatccacccaaccacgggccagaagctgtcacttcaggacgcagtctcccagggtgtgattgaccaagacatggccaccaggctgaagcctgctcagaaagccttcataggcttcgagggtgtgaagggaaagaagaagatgtcagcagcagaggcagtgaaagaaaaatggctcccgtatgaggctggccagcgcttcctggagttccagtacctcacgggaggtcttgttgacccggaagtgcatgggaggataagcaccgaagaagccatccggaaggggttcatagatggccgcgccgcacagaggctgcaagacaccagcagctatgccaaaatcctgacctgccccaaaaccaaattaaaaatatcctataaggatgccataaatcgctccatggtagaagatatcactgggctgcgccttctggaagccgcctccgtgtcgtccaagggcttacccagcccttacaacatgtcttcggctccggggtcccgctccggctcccgctcgggatctcgctccggatctcgctccgggtcccgcagtgggtcccggagaggaagctttgacgccacagggaattcttcctactcttattcctactcatttagcagtagttctattgggcactagtagtcagttgggagtggttgctataccttgacttcatttatatgaatttccactttattaaataatagaaaagaaaatcccggtgcttgcagtagagtgataggacattctatgcttacagaaaatatagccatgattgaaatcaaatagtaaaggctgttctggctttttatcttcttagctcatcttaaataagcagtacacttggatgcagtgcgtctgaagtgctaatcagttgtaacaatagcacaaatcgaacttaggatttgtttcttctcttctgtgtttcgatttttgatcaattctttaattttggaagcctataatacagttttctattcttggagataaaaattaaatggatcactgatattttagtcattctgcttctcatctaaatatttccatattctgtattaggagaaaattaccctcccagcaccagcccccctctcaaacccccaacccaaaaccaagcattttggaatgagtctcctttagtttcagagtgtggattgtataacccatatactcttcgatgtacttgtttggtttggtattaatttgactgtgcatgacagcggcaatcttttctttggtcaaagttttctgtttattttgcttgtcatattcgatgtactttaaggtgtctttatgaagtttgctattctggcaataaacttttagacttttg

SEQ ID NO: 1372 - DNA, 7812 bp, Homo sapiens
  source 1..7812: mol_type = genomic DNA
ggaggagactcgctccgccgccgaccaacaccaacacccagctccgacgcagctcctctgcgcccttgccgccctccgagccacagctttcctcccgctcctgcccccggcccgtcgccgtctccgcgctcgcagcggcctcgggagggcccaggtagcgagcagcgacctcgcgagccttccgcactcccgcccggttccccggccgtccgcctatccttggccccctccgctttctccgcgccggcccgcctcgcttatgcctcggcgctgagccgctctcccgattgcccgccgacatgagctgcaacggaggctcccacccgcggatcaacactctgggccgcatgatccgcgccgagtctggcccggacctgcgctacgaggtgaccagcggcggcgggggcaccagcaggatgtactattctcggcgcggcgtgatcaccgaccagaactcggacggctactgtcaaaccggcacgatgtccaggcaccagaaccagaacaccatccaggagctgctgcagaactgctccgactgcttgatgcgagcagagctcatcgtgcagcctgaattgaagtatggagatggaatacaactgactcggagtcgagaattggatgagtgttttgcccaggccaatgaccaaatggaaatcctcgacagcttgatcagagagatgcggcagatgggccagccctgtgatgcttaccagaaaaggcttcttcagctccaagagcaaatgcgagccctttataaagccatcagtgtccctcgagtccgcagggccagctccaagggtggtggaggctacacttgtcagagtggctctggctgggatgagttcaccaaacatgtcaccagtgaatgtttggggtggatgaggcagcaaagggcggagatggacatggtggcctggggtgtggacctggcctcagtggagcagcacattaacagccaccggggcatccacaactccatcggcgactatcgctggcagctggacaaaatcaaagccgacctgcgcgagaaatctgctatctaccagttggaggaggagtatgaaaacctgctgaaagcgtcctttgagaggatggatcacctgcgacagctgcagaacatcattcaggccacgtccagggagatcatgtggatcaatgactgcgaggaggaggagctgctgtacgactggagcgacaagaacaccaacatcgctcagaaacaggaggccttctccatacgcatgagtcaactggaagttaaagaaaaagagctcaataagctgaaacaagaaagtgaccaacttgtcctcaatcagcatccagcttcagacaaaattgaggcctatatggacactctgcagacgcagtggagttggattcttcagatcaccaagtgcattgatgttcatctgaaagaaaatgctgcctactttcagttttttgaagaggcgcagtctactgaagcatacctgaaggggctccaggactccatcaggaagaagtacccctgcgacaagaacatgcccctgcagcacctgctggaacagatcaaggagctggagaaagaacgagagaaaatccttgaatacaagcgtcaggtgcagaacttggtaaacaagtctaagaagattgtacagctgaagcctcgtaacccagactacagaagcaataaacccattattctcagagctctctgtgactacaaacaagatcagaaaatcgtgcataagggggatgagtgtatcctgaaggacaacaacgagcgcagcaagtggtacgtgacgggcccgggaggcgttgacatgcttgttccctctgtggggctgatcatccctcctccgaacccactggccgtggacctctcttgcaagattgagcagtactacgaagccatcttggctctgtggaaccagctctacatcaacatgaagagcctggtgtcctggcactactgcatgattgacatagagaagatcagggccatgacaatcgccaagctgaaaacaatgcggcaggaagattacatgaagacgatagccgaccttgagttacattaccaagagttcatcagaaatagccaaggctcagagatgtttggagatgatgacaagcggaaaatacagtctcagttcaccgatgcccagaagcattaccagaccctggtcattcagctccctggctatccccagcaccagacagtgaccacaactgaaatcactcatcatggaacctgccaagatgtcaaccataataaagtaattgaaaccaacagagaaaatgacaagcaagaaacatggatgctgatggagctgcagaagattcgcaggcagatagagcactgcgagggcaggatgactctcaaaaacctccctctagcagaccagggatcttctcaccacatcacagtgaaaattaacgagcttaagagtgtgcagaatgattcacaagcaattgctgaggttctcaaccagcttaaagatatgcttgccaacttcagaggttctgaaaagtactgctatttacagaatgaagtatttggactatttcagaaactggaaaatatcaatggtgttacagatggctacttaaatagcttatgcacagtaagggcactgctccaggctattctccaaacagaagacatgttaaaggtttatgaagccaggctcactgaggaggaaactgtctgcctggacctggataaagtggaagcttaccgctgtggactgaagaaaataaaaaatgacttgaacttgaagaagtcgttgttggccactatgaagacagaactacagaaagcccagcagatccactctcagacttcacagcagtatccactttatgatctggacttgggcaagttcggtgaaaaagtcacacagctgacagaccgctggcaaaggatagataaacagatcgactttaggttatgggacctggagaaacaaatcaagcaattgaggaattatcgtgataactatcaggctttctgcaagtggctctatgatgctaaacgccgccaggattccttagaatccatgaaatttggagattccaacacagtcatgcggtttttgaatgagcagaagaacttgcacagtgaaatatctggcaaacgagacaaatcagaggaagtacaaaaaattgctgaactttgcgccaattcaattaaggattatgagctccagctggcctcatacacctcaggactggaaactctgctgaacatacctatcaagaggaccatgattcagtccccttctggggtgattctgcaagaggctgcagatgttcatgctcggtacattgaactacttacaagatctggagactattacaggttcttaagtgagatgctgaagagtttggaagatctgaagctgaaaaataccaagatcgaagttttggaagaggagctcagactggcccgagatgccaactcggaaaactgtaataagaacaaattcctggatcagaacctgcagaaataccaggcagagtgttcccagttcaaagcgaagcttgcgagcctggaggagctgaagagacaggctgagctggatgggaagtcggctaagcaaaatctagacaagtgctacggccaaataaaagaactcaatgagaagatcacccgactgacttatgagattgaagatgaaaagagaagaagaaaatctgtggaagacagatttgaccaacagaagaatgactatgaccaactgcagaaagcaaggcaatgtgaaaaggagaaccttggttggcagaaattagagtctgagaaagccatcaaggagaaggagtacgagattgaaaggttgagggttctactgcaggaagaaggcacccggaagagagaatatgaaaatgagctggcaaaggcatctaataggattcaggaatcaaagaatcagtgtactcaggtggtacaggaaagagagagccttctggtgaaaatcaaagtcctggagcaagacaaggcaaggctgcagaggctggaggatgagctgaatcgtgcaaaatcaactctagaggcagaaaccagggtgaaacagcgcctggagtgtgagaaacagcaaattcagaatgacctgaatcagtggaagactcaatattcccgcaaggaggaggctattaggaagatagaatcggaaagagaaaagagtgagagagagaagaacagtcttaggagtgagatcgaaagactccaagcagagatcaagagaattgaagagaggtgcaggcgtaagctggaggattctaccagggagacacagtcacagttagaaacagaacgctcccgatatcagagggagattgataaactcagacagcgcccatatgggtcccatcgagagacccagactgagtgtgagtggaccgttgacacctccaagctggtgtttgatgggctgaggaagaaggtgacagcaatgcagctctatgagtgtcagctgatcgacaaaacaaccttggacaaactattgaaggggaagaagtcagtggaagaagttgcttctgaaatccagccattccttcggggtgcaggatctatcgctggagcatctgcttctcctaaggaaaaatactctttggtagaggccaagagaaagaaattaatcagcccagaatccacagtcatgcttctggaggcccaggcagctacaggtggtataattgatccccatcggaatgagaagctgactgtcgacagtgccatagctcgggacctcattgacttcgatgaccgtcagcagatatatgcagcagaaaaagctatcactggttttgatgatccattttcaggcaagacagtatctgtttcagaagccatcaagaaaaatttgattgatagagaaaccggaatgcgcctgctggaagcccagattgcttcagggggtgtagtagaccctgtgaacagtgtctttttgccaaaagatgtcgccttggcccgggggctgattgatagagatttgtatcgatccctgaatgatccccgagatagtcagaaaaactttgtggatccagtcaccaaaaagaaggtcagttacgtgcagctgaaggaacggtgcagaatcgaaccacatactggtctgctcttgctttcagtacagaagagaagcatgtccttccaaggaatcagacaacctgtgaccgtcactgagctagtagattctggtatattgagaccgtccactgtcaatgaactggaatctggtcagatttcttatgacgaggttggtgagagaattaaggacttcctccagggttcaagctgcatagcaggcatatacaatgagaccacaaaacagaagcttggcatttatgaggccatgaaaattggcttagtccgacctggtactgctctggagttgctggaagcccaagcagctactggctttatagtggatcctgttagcaacttgaggttaccagtggaggaagcctacaagagaggtctggtgggcattgagttcaaagagaagctcctgtctgcagaacgagctgtcactgggtataatgatcctgaaacaggaaacatcatctctttgttccaagccatgaataaggaactcatcgaaaagggccacggtattcgcttattagaagcacagatcgcaaccggggggatcattgacccaaaggagagccatcgtttaccagttgacatagcatataagaggggctatttcaatgaggaactcagtgagattctctcagatccaagtgatgataccaaaggattttttgaccccaacactgaagaaaatcttacctatctgcaactaaaagaaagatgcattaaggatgaggaaacagggctctgtcttctgcctctgaaagaaaagaagaaacaggtgcagacatcacaaaagaataccctcaggaagcgtagagtggtcatagttgacccagaaaccaataaagaaatgtctgttcaggaggcctacaagaagggcctaattgattatgaaaccttcaaagaactgtgtgagcaggaatgtgaatgggaagaaataaccatcacgggatcagatggctccaccagggtggtcctggtagatagaaagacaggcagtcagtatgatattcaagatgctattgacaagggccttgttgacaggaagttctttgatcagtaccgatccggcagcctcagcctcactcaatttgctgacatgatctccttgaaaaatggtgtcggcaccagcagcagcatgggcagtggtgtcagcgatgatgtttttagcagctcccgacatgaatcagtaagtaagatttccaccatatccagcgtcaggaatttaaccataaggagcagctctttttcagacaccctggaagaatcgagccccattgcagccatctttgacacagaaaacctggagaaaatctccattacagaaggtatagagcggggcatcgttgacagcatcacgggtcagaggcttctggaggctcaggcctgcacaggtggcatcatccacccaaccacgggccagaagctgtcacttcaggacgcagtctcccagggtgtgattgaccaagacatggccaccaggctgaagcctgctcagaaagccttcataggcttcgagggtgtgaagggaaagaagaagatgtcagcagcagaggcagtgaaagaaaaatggctcccgtatgaggctggccagcgcttcctggagttccagtacctcacgggaggtcttgttgacccggaagtgcatgggaggataagcaccgaagaagccatccggaaggggttcatagatggccgcgccgcacagaggctgcaagacaccagcagctatgccaaaatcctgacctgccccaaaaccaaattaaaaatatcctataaggatgccataaatcgctccatggtagaagatatcactgggctgcgccttctggaagccgcctccgtgtcgtccaagggcttacccagcccttacaacatgtcttcggctccggggtcccgctccggctcccgctcgggatctcgctccggatctcgctccgggtcccgcagtgggtcccggagaggaagctttgacgccacagggaattcttcctactcttattcctactcatttagcagtagttctattgggcactagtagtcagttgggagtggttgctataccttgacttcatttatatgaatttccactttattaaataatagaaaagaaaatcccggtgcttgcagtagagtgataggacattctatgcttacagaaaatatagccatgattgaaatcaaatagtaaaggctgttctggctttttatcttcttagctcatcttaaataagcagtacacttggatgcagtgcgtctgaagtgctaatcagttgtaacaatagcacaaatcgaacttaggatttgtttcttctcttctgtgtttcgatttttgatcaattctttaattttggaagcctataatacagttttctattcttggagataaaaattaaatggatcactgatattttagtcattctgcttctcatctaaatatttccatattctgtattaggagaaaattaccctcccagcaccagcccccctctcaaacccccaacccaaaaccaagcattttggaatgagtctcctttagtttcagagtgtggattgtataacccatatactcttcgatgtacttgtttggtttggtattaatttgactgtgcatgacagcggcaatcttttctttggtcaaagttttctgtttattttgcttgtcatattcgatgtactttaaggtgtctttatgaagtttgctattctggcaataaacttttagacttttg

SEQ ID NO: 1373 - DNA, 3833 bp, Homo sapiens
  source 1..3833: mol_type = genomic DNA
caaaagtgcatccctgcccccgccccctcttccgtgtgggccctccctgtcccctctctgtcacctcacagtagtcgttgccggtagcgggtgtgggggcgcgagcagcgcagggcggcctctcccccacccctcagcccgggcccgggctcggtccccccctctccctccgcttcgcactcccgtcgggtacgggaaggtccaagccgctgccgggtgcccgagggccgtcgtggccgccgtcgccacgggtcccaatggagccgccgaatctctatccggtgaagctctacgtgtacgacctgtccaaaggcctggcccggcggctcagccccatcatgctggggaaacaactggaaggcatctggcacacatccatagttgtgcacaaggatgagttcttcttcggcagtggtggtatctccagctgccccccgggagggacattgcttgggcctccagactctgtggttgatgtggggagtacagaagtcacagaagaaatctttctggagtacctctcctccctgggggagtccctgttccgaggtgaggcctacaacctctttgaacacaattgtaacaccttcagcaacgaagtggcacagttcctgactgggcggaagattccttcttacatcacagacctgccctctgaagttctctccacgccctttggacaggcacttcggcccctcctggactccattcagatccagcctccaggagggagctccgtgggcagacccaacggccagagctaacaggactgcctgggaccgccctgcctcaccagggcttttcctttttaaacaaaacaaaccctaccagatttctattttataattttacatcagagctaacaaccaggggacggctttttaaatttcccagggaaggagaccgtcaggccgcatgtagacaatgctgctaagaaacagaacaaaatgccaccccttctaatagtattatactaatttattaaggctgtcttgtctgtgcgttcacttcggatgctgtttcctaagcgtcctccacactggagaaagggaggggctttgtttaaacagaaagcgagtcacagtttgcgggagccccaacctagaactctttccagagaacactcacgctctacccaagttgccaacacctgtgggacccaggtgagttttagaacatccgtgacccagaaagttactctagtgttaaatgaaccaaaggatttggtgtacatgggaccggtttcaggatgactaacctaacctaagtgaactctttagccacaaccctcaccttccctcccttaccccaagcaaggccagtgctggagcagccattgcctccggatcaagggagtaacagcaagtatcaggccggagaaaacaggataaagccattcctccttccacctagatggattgccaatcttctgccatcaattttgggaaacctgcctttgtgcccccgaggctgcctttcctcagcatagctgacttgtcatagtggatgaggtctgggctggagcagtagaagccaaggccttttttctgcaagtaatgatgtaggttatttgcagtctctgtaaccaccatccaggccagtacgcagtatttagctggggaccaagggatgggattccctactctaagaaaatacctttattttaattattattattttttgagacggagtctcgctctaccacccaggctggtgtgcagtggcatgatctcggctcacagaaacctctgcctcccgggttcaagtggttctcctgcctcagcctcctgagtagctgggattacaggtgcgtgccaccacgccaggctaatttttgtattttcagtagagacagggttttgccatgttggccaggctggtctggaactcctgacctcgggtgatccacctcccttggcctcccaaagtgctgggattacaggcgtgagccaccgctgcctggccagaaaatacctttgatatggaaagaataatgatgtgaggcctggcgcggtggctcacgcctgtaatcccagcactttgggaggccgaggcaggcagatcacttgaggtcaggacttcaagaccagcctggccaacatggtgaaaccccgtctctactaaaaatacaaaattagccgggcatggtggcgcatgcctgtagtcccagctactcgggaggctgaggcaggagaatcgcttgaacccgggaggcagagattgcgatgagccgagatcgtaccagtgcactccagcctgggcgacagagtgagactccatctcaaaaaaataaaataatgaagtggaatcaaggtggcaagaaaatttagaatcgtttctgatagggactttcccttatcctaaatgtgttttgaaggcacacgttatttccattgtcattctgactttagaaaggcaggttggggcatgagtgggcattttcctaatgacttgctgctaggaggttataggcagggaacagtctgggagtctctaatccagagagactttcagattccctctcttcacatgaacctccattagttagattttgggaaagtgagcatgaagaagggactcagagctgccaggtacccgagtctcaggtctgacatccttgggccccttctgccacaacttcttgccacttcacggacttgaattatgttgcttcttcctggaagtctggcctgcagcacaggcctttcctctccaaaaagctgctgctcatttctggccccatctgctgctatctttgccatcagccatcacagtttggcatcatcagagtctcagctagaggagctgtcattctgccttagtgtttgcctgcgacctgaccaggggcatgaccagctgggatgtcaagtgacatttgggaacttgtagaggccaaatgattgaaagtttaattcttctcaagacccactgatttgccagtgtgcatggaaataatagattagagcagaaactagcagggactgttgtataatcgtgatctactagcagaattgggcccaaagagaaagaatttctgaggctgggtttcttctgggagggtagcaggttggtcttggccagtgctctgtttcccaccagtgttgttcccttttccagcttgcctggcccggctctgtcttccagggtcctgctccagacccctctgcctggggtctcccctccatccagggggttctgggcatcacagctcctttttttcctttctcctcttccagatccagtttcagctggtttgcttcttccagcaggcacccttaggcccaggagcagctcccctgagagaatttgagtcactcatttccttgaacagcacccccctttatactagcagccatttgtgccattgcctgtgccctagggtttgtggggagagagcgagggatcactgagcagttttcccagagctccatgggaaggcaagctctccctcccaatgggagccccactgtcactaactgtaaactcaggctcaggcttcaactgcctacccccatcctcatatttctgtctgtcccagcacctcaggagcattctcattgtggccggctaactccgcctggatgtgaacaggcaagcacagtgggaaatgagtcacgtacttgtattgcacagtggacacctctagaggtccattggtttaaagggatagggaaggaggagggatgagaccatcaccccctcccagaagtaaatctagtatctgagttttctttatgcccttgagtcaaactaataactgtctagtacggaggtgtttgctggttttcttcggtgttttttctaatgcaataaactcatttctgcctgctgca

SEQ ID NO: 1374 - DNA, 1316 bp, Homo sapiens
  source 1..1316: mol_type = genomic DNA
acttccggcgtgtgcgtctggcgtccgcgcgctgcacaatggcggctctgaagagttggctgtcgcgcagcgtaacttcattcttcaggttcctgcttggctcgagtttgagtttacagcccctgcaagtaaatccaagagcctgttacagattggcggtcgtgccttatgaaatctgacttctacttccagaaatcagagcctcattcccttagtagtgaagcattgatgaggagagcagtgtctttggtaacagatagcacctctacctttctctctcagaccacatatgcgttgattgaagctattactgaatatactaaggctgtttataccttaacttctctttaccgacaatatacaagtttacttgggaaaatgaattcagaggaggaagatgaagtgtggcaggtgatcataggagccagagctgagatgacttcaaaacaccaagagtacttgaagctggaaaccacttggatgactgcagttggtctttcagagatggcagcagaagctgcatatcaaactggcgcagatcaggcctctataaccgccaggaatcacattcagctggtgaaactgcaggtggaagaggtgcaccagctctcccggaaagcagaaaccaagctggcagaagcacagatagaagagctccgtcagaaaacacaggaggaaggggaggagcgggctgagtcggagcaggaggcctacctgcgtgaggattgagggcctgagcacactgccctgtctccccactcagtggggaaagcaggggcagatgccaccctgcccagggttggcatgactgtctgtgcaccgagaagaggcggcagatcctgccctggccaatcaggcgagacgcctttgtgagctgtgagtgcctcctgtggtctcaggcttgcgctggacctggttcttagcccttgggcactgcaccctgtttaacatttcaccccactctgtacagctgctcttacccattttttttacctcacacccaaagcattttgcctacctgggtcagagagaggagtcctttttgtcatgcccttaagttcagcaactgtttaacctgttttcagtcttatttacgtcgtcaaaaatgatttagtacttgttccctctgttgggatgccagttgtggcagggggaggggaacctgtccagtttgtacgatttctttgtatgtatttctgatgtgttctctgatctgcccccactgtcctgtgaggacagctgaggccaaggagtgaaaaacctattactactaagagaaggggtgcagagtgtttacctggtgctctcaacaggac

SEQ ID NO: 1375 - DNA, 1338 bp, Homo sapiens
  source 1..1338: mol_type = genomic DNA
acttccggcgtgtgcgtctggcgtccgcgcgctgcacaatggcggctctgaagagttggctgtcgcgcagcgtaacttcattcttcaggtacagacagtgtttgtgtgttcctgttgtggctaactttaagaagcggtgtttctcagaattgataagaccatggcacaaaactgtgacgattggctttggagtaaccctgtgtgcggttcctattgcacaggctgtttataccttaacttctctttaccgacaatatacaagtttacttgggaaaatgaattcagaggaggaagatgaagtgtggcaggtgatcataggagccagagctgagatgacttcaaaacaccaagagtacttgaagctggaaaccacttggatgactgcagttggtctttcagagatggcagcagaagctgcatatcaaactggcgcagatcaggcctctataaccgccaggaatcacattcagctggtgaaactgcaggtggaagaggtgcaccagctctcccggaaagcagaaaccaagctggcagaagcacagatagaagagctccgtcagaaaacacaggaggaaggggaggagcgggctgagtcggagcaggaggcctacctgcgtgaggattgagggcctgagcacactgccctgtctccccactcagtggggaaagcaggggcagatgccaccctgcccagggttggcatgactgtctgtgcaccgagaagaggcggcagatcctgccctggccaatcaggcgagacgcctttgtgagctgtgagtgcctcctgtggtctcaggcttgcgctggacctggttcttagcccttgggcactgcaccctgtttaacatttcaccccactctgtacagctgctcttacccattttttttacctcacacccaaagcattttgcctacctgggtcagagagaggagtcctttttgtcatgcccttaagttcagcaactgtttaacctgttttcagtcttatttacgtcgtcaaaaatgatttagtacttgttccctctgttgggatgccagttgtggcagggggaggggaacctgtccagtttgtacgatttctttgtatgtatttctgatgtgttctctgatctgcccccactgtcctgtgaggacagctgaggccaaggagtgaaaaacctattactactaagagaaggggtgcagagtgtttacctggtgctctcaacaggacttaacatcaacaggacttaacacaggcctcttgttccttcctttctttccgtttctctattgtatccaaaggagaagagtgtaagattttgtttgcatctgaaagagaaaatgcgtctctcctgg

SEQ ID NO: 1376 - DNA, 2111 bp, Homo sapiens
  source 1..2111: mol_type = genomic DNA
acgcggaggttgtaattggtctctagaccacacctagttgttgagtgccgctgcttgaaaatctcagttctgccgagatcgcagaatacacacaagctacctttgggcaccagagcagacagaaccgcggagcttcagggtggaagattcgtggaaactttgccaaggccaggacctcgtgtgttcccgtccgcccctctgggacggcgccagcccggcaggccgccgaccgtcctggggctcccgcgcagcgcgatgccggcctcgtccaccgtccacgtgctgcagctgctgcgggagctgctcgccttcgtgctcctcagctacacggtgctcatcggggcgctgctgctggccggctggaccacttacttcctggtgctgaagtgacagcgccgtcgccgcgcccggccccgcctcccgcccggccccgcctcccgcccggccccgcctccctaactcaccaggaaattcccttcaagccctggcccgaactgagtccccgcccacccgccagcgtcacggcgcccgactcagctccgcgccggacccacctccgcgccctcaggccctgcatatgccccgccccgcgcggaagttccggcggttggttgccttgcgcggccgttacagcctttgccctaagcctcgccccctttccccctgcctgcccaatcccgactgcttccttgggtgggggcgtggctatggggcgaggcgctctcaggtggaggccgtgccccgctccgcgctcacgaagctgcgtcacttccggcgtgtgcgtctggcgtccgcgcgctgcacaatggcggctctgaagagttggctgtcgcgcagcgtaacttcattcttcaggtacagacagtgtttgtgtgttcctgttgtggctaactttaagaagcggtgtttctcagaattgataagaccatggcacaaaactgtgacgattggctttggagtaaccctgtgtgcggttcctattgcacaggctgtttataccttaacttctctttaccgacaatatacaagtttacttgggaaaatgaattcagaggaggaagatgaagtgtggcaggtgatcataggagccagagctgagatgacttcaaaacaccaagagtacttgaagctggaaaccacttggatgactgcagttggtctttcagagatggcagcagaagctgcatatcaaactggcgcagatcaggcctctataaccgccaggaatcacattcagctggtgaaactgcaggtggaagaggtgcaccagctctcccggaaagcagaaaccaagctggcagaagcacagatagaagagctccgtcagaaaacacaggaggaaggggaggagcgggctgagtcggagcaggaggcctacctgcgtgaggattgagggcctgagcacactgccctgtctccccactcagtggggaaagcaggggcagatgccaccctgcccagggttggcatgactgtctgtgcaccgagaagaggcggcagatcctgccctggccaatcaggcgagacgcctttgtgagctgtgagtgcctcctgtggtctcaggcttgcgctggacctggttcttagcccttgggcactgcaccctgtttaacatttcaccccactctgtacagctgctcttacccattttttttacctcacacccaaagcattttgcctacctgggtcagagagaggagtcctttttgtcatgcccttaagttcagcaactgtttaacctgttttcagtcttatttacgtcgtcaaaaatgatttagtacttgttccctctgttgggatgccagttgtggcagggggaggggaacctgtccagtttgtacgatttctttgtatgtatttctgatgtgttctctgatctgcccccactgtcctgtgaggacagctgaggccaaggagtgaaaaacctattactactaagagaaggggtgcagagtgtttacctggtgctctcaacaggacttaacatcaacaggacttaacacaggcctcttgttccttcctttctttccgtttctctattgtatccaaaggagaagagtgtaagattttgtttgcatctgaaagagaaaatgcgtctctcctggggtcct

SEQ ID NO: 1377 - DNA, 2250 bp, Homo sapiens
  source 1..2250: mol_type = genomic DNA
gagctcggggaccacgcggaggttgtaattggtctctagaccacacctagttgttgagtgccgctgcttgaaaatctcagttctgccgagatcgcagaatacacacaagctacctttgggcaccagagcagacagaaccgcggagcttcagggtggaagattcgtggaaactttgccaaggccaggacctcgtgtgttcccgtccgcccctctgggacggcgccagcccggcaggccgccgaccgtcctggggctcccgcgcagcgcgatgccggcctcgtccaccgtccacgtgctgcagctgctgcgggagctgctcgccttcgtgctcctcagctacacggtgctcatcggggcgctgctgctggccggctggaccacttacttcctggtgctgaagtgacagcgccgtcgccgcgcccggccccgcctcccgcccggccccgcctcccgcccggccccgcctccctaactcaccaggaaattcccttcaagccctggcccgaactgagtccccgcccacccgccagcgtcacggcgcccgactcagctccgcgccggacccacctccgcgccctcaggccctgcatatgccccgccccgcgcggaagttccggcggttggttgccttgcgcggccgttacagcctttgccctaagcctcgccccctttccccctgcctgcccaatcccgactgcttccttgggtgggggcgtggctatggggcgaggcgctctcaggtggaggccgtgccccgctccgcgctcacgaagctgcgtcacttccggcgtgtgcgtctggcgtccgcgcgctgcacaatggcggctctgaagagttggctgtcgcgcagcgtaacttcattcttcaggtacagacagtgtttgtgtgttcctgttgtggctaactttaagaagcggtgtttctcagaattgataagaccatggcacaaaactgtgacgattggctttggagtaaccctgtgtgcggttcctattgcacagaaatcagagcctcattcccttagtagtgaagcattgatgaggagagcagtgtctttggtaacagatagcacctctacctttctctctcagaccacatatgcgttgattgaagctattactgaatatactaaggctgtttataccttaacttctctttaccgacaatatacaagtttacttgggaaaatgaattcagaggaggaagatgaagtgtggcaggtgatcataggagccagagctgagatgacttcaaaacaccaagagtacttgaagctggaaaccacttggatgactgcagttggtctttcagagatggcagcagaagctgcatatcaaactggcgcagatcaggcctctataaccgccaggaatcacattcagctggtgaaactgcaggtggaagaggtgcaccagctctcccggaaagcagaaaccaagctggcagaagcacagatagaagagctccgtcagaaaacacaggaggaaggggaggagcgggctgagtcggagcaggaggcctacctgcgtgaggattgagggcctgagcacactgccctgtctccccactcagtggggaaagcaggggcagatgccaccctgcccagggttggcatgactgtctgtgcaccgagaagaggcggcagatcctgccctggccaatcaggcgagacgcctttgtgagctgtgagtgcctcctgtggtctcaggcttgcgctggacctggttcttagcccttgggcactgcaccctgtttaacatttcaccccactctgtacagctgctcttacccattttttttacctcacacccaaagcattttgcctacctgggtcagagagaggagtcctttttgtcatgcccttaagttcagcaactgtttaacctgttttcagtcttatttacgtcgtcaaaaatgatttagtacttgttccctctgttgggatgccagttgtggcagggggaggggaacctgtccagtttgtacgatttctttgtatgtatttctgatgtgttctctgatctgcccccactgtcctgtgaggacagctgaggccaaggagtgaaaaacctattactactaagagaaggggtgcagagtgtttacctggtgctctcaacaggacttaacatcaacaggacttaacacaggcctcttgttccttcctttctttccgtttctctattgtatccaaaggagaagagtgtaagattttgtttgcatctgaaagagaaaatgcgtctctcctgg

SEQ ID NO: 1378 - DNA, 2569 bp, Homo sapiens
  source 1..2569: mol_type = genomic DNA
aagctgcgtcacttccggcgtgtgcgtctggcgtccgcgcgctgcacaatggcggctctgaagagttggctgtcgcgcagcgtaacttcattcttcaggtaccgctgcggccgcgtagaggggacaggaccagagggagggaccgacgcggacagcgctgtggcccggcccacggcgcccgccttccttacgcgctcatctctcgtccgcccagctgggtcgcggcgtctcgctccggtcgggaggactgaggacagccccgcctccgccccctgggtcaagcccggcttccttttcagttcgtccatcttctagaaacgagtccccgagaccccgggctgccttcttggggctgctccgcctcctgaccagccctcgtcagccactcgaagtccctgaggagacgtggagaggaggagggacacggcatggggggagtccgggaagggagacgagcgtctgaagacgtcctcccgagggcagaaggggccgggggagctggcgcagggctctctacctagcgctgcaggctcctgggcgattgtagcgggaccgtcacacacaactggcacccaggccaggggtccagagctaaattctgcctgcaggagcggttattgtggcatccgtttctaaaaagtttaaaggcaacattttattttattttaatttttttgagacaagatctgcctctgtcgcccaggctggagtgcagtggcgagatctcagctcactgcaacctgtgcctcccggcttcaagcgattctcagcctcagcctcccgagtagctgggattgcaggcgcccgccaccacgcccggctaatttttttttttctttttgttttgtttgagactcagtctcgctctgttgcccaggctgaagtgcagtggggcgctctcggctcactgcaacctctgcctcccaggttcaagcgattctcctgcctcagcctcccgagtagctgggattacaggagcgtgccaccactccgggctaatttttgtgttttaagtagagatggggtttcaccatgttggtcaggcagatttcgaattcctgacctcaagtgatccacccgcctcggcctttatttacttatttttttttaatagacacggggtcatgttgccagccatgttgcccaggctggtcgtgaactcctgggctcaagtgatcctcccgccttgcccttggccttccaagtgctaggattacaggcgtgagccaccaacaccctgcctgaggcaacattttaaacttggtgtatgttgaaaatttcaaaacccctcagctgtcctgcatcctcatttaggttcctgcttggctcgagtttgagtttacagcccctgcaagtaaatccaagagcctgttacagattggcggtcgtgccttatgaaatctgacttctacttccagaaatcagagcctcattcccttagtagtgaagcattgatgaggagagcagtgtctttggtaacagatagcacctctacctttctctctcagaccacatatgcgttgattgaagctattactgaatatactaaggctgtttataccttaacttctctttaccgacaatatacaagtttacttgggaaaatgaattcagaggaggaagatgaagtgtggcaggtgatcataggagccagagctgagatgacttcaaaacaccaagagtacttgaagctggaaaccacttggatgactgcagttggtctttcagagatggcagcagaagctgcatatcaaactggcgcagatcaggcctctataaccgccaggaatcacattcagctggtgaaactgcaggtggaagaggtgcaccagctctcccggaaagcagaaaccaagctggcagaagcacagatagaagagctccgtcagaaaacacaggaggaaggggaggagcgggctgagtcggagcaggaggcctacctgcgtgaggattgagggcctgagcacactgccctgtctccccactcagtggggaaagcaggggcagatgccaccctgcccagggttggcatgactgtctgtgcaccgagaagaggcggcagatcctgccctggccaatcaggcgagacgcctttgtgagctgtgagtgcctcctgtggtctcaggcttgcgctggacctggttcttagcccttgggcactgcaccctgtttaacatttcaccccactctgtacagctgctcttacccattttttttacctcacacccaaagcattttgcctacctgggtcagagagaggagtcctttttgtcatgcccttaagttcagcaactgtttaacctgttttcagtcttatttacgtcgtcaaaaatgatttagtacttgttccctctgttgggatgccagttgtggcagggggaggggaacctgtccagtttgtacgatttctttgtatgtatttctgatgtgttctctgatctgcccccactgtcctgtgaggacagctgaggccaaggagtgaaaaacctattactactaagagaaggggtgcagagtgtttacctggtgctctcaacaggacttaacatcaacaggacttaacacaggc

SEQ ID NO: 1379 - DNA, 5792 bp, Homo sapiens
  source 1..5792: mol_type = genomic DNA
attcatgaggcgcgcgcagcccggcatgctaatgaggcggggcgcggcggctggctaaagagcgactgggcggcggcgggcgcggagctgccaggcgggagcggcgtaggcgcggggtcgccggccagcgtgaaccgggacatggagccgcccggcgggagcctggggcccggccgcgggacccgggacaagaagaagggccggagcccagatgagctgccctcggcgggcggcgacggcggcaaatctaagaaatttactctgaagcggctcatggcagatgagctggagagatttaccagcatgagaattaagaaggagaaggaaaagcccaattctgctcatagaaattcttctgcatcatatggggatgatcccacagcacagtcattgcaagatgtttcagatgaacaagtgctggttctctttgaacagatgctgctggatatgaacctgaatgaggagaaacagcaacctttgagggagaaggacatcatcatcaagagggagatggtgtcccaatacttgtacacctccaaggctggcatgagccagaaggagagctctaagtctgccatgatgtatattcaggagttgaggtcaggcttgcgggatatgcctctgctcagctgcctggagtcccttcgtgtgtctctcaacaacaaccctgtcagttgggtgcaaacatttggtgctgaaggcttggcctccttattggacattcttaaacgacttcatgatgagaaagaagagactgctgggagttacgatagccggaacaagcatgagatcattcgctgcttgaaagcttttatgaacaacaagtttggaatcaagaccatgttggagacagaagaaggaatcctactgctggtcagagccatggatcctgctgttcccaacatgatgattgatgcagctaagctgctttctgctctttgtattctaccgcagccagaggacatgaatgaaagggttttggaggcaatgacagaaagagctgagatggatgaagtggaacgtttccagccgctgctggatggattaaaaagtggaaccactattgcactgaaggttggatgcctacagctgatcaatgctctcatcacaccagcggaggaacttgacttccgagttcacatcagaagtgaactgatgcgtttggggctacatcaggtgttgcaggaccttcgagagattgaaaatgaagatatgagagtgcaactaaatgtgtttgatgaacaaggggaagaggattcctatgacctgaagggacggctggatgacattcgcatggagatggatgactttaatgaagtctttcagattctcttaaacacagtgaaggattcaaaggcagagccacacttcctttccatcctgcagcacttactcttggtccgaaatgactatgaggccagacctcagtactataagttgattgaagaatgtatttcccagatagttctgcacaagaacggggctgatcctgacttcaagtgccggcacctccagattgagattgagggattaattgatcaaatgattgataagacaaaggtggagaaatctgaagccaaagctgcagagctggaaaagaagttggactcagagttaacagcccgacatgagctacaggtggaaatgaaaaagatggaaagtgactttgagcagaagcttcaagatcttcagggagaaaaagatgcactgcattctgaaaagcagcaaattgccacagagaaacaggacctggaagcagaggtgtcccagctcacaggagaggttgccaagctgacaaaggaactggaagatgccaagaaagaaatggcttccctctctgcggcagctattactgtacctccttctgttcctagtcgtgctcctgttccccctgcccctcctttacctggtgactctggcactattattccaccaccacctgctcctggggatagtaccactcctcctcctcctcctcctcctcctcctcctccacctcctttgcctgggggtgtttgcatctcctcacccccttctttacctggaggtactgctatctctccaccccctcctttgtctggggatgctaccatccctccaccccctcctttgcctgagggtgttggcatcccttcaccctcttctttgcctggaggtactgccatccccccacctcctcctttgcctgggagtgctagaatccccccaccaccacctcctttgcctgggagtgctggaattccccccccacctcctcccttgcctggagaagcaggaatgccacctcctcctccccctcttcctggtggtcctggaatccctccacctcctccatttcccggaggccctggcattcctccacctccacccggaatgggtatgcctccacctcccccatttggatttggagttcctgcagccccagttctgccatttggattaacccccaaaaagctttataagccagaggtgcagctccggaggccaaactggtccaagcttgtggctgaggacctctcccaggactgcttctggacaaaggtgaaggaggaccgctttgagaacaatgaacttttcgccaaacttacccttaccttctctgcccagaccaagagaacaaagaaggccaagaaggatcaagaaggtggagaagaaaagaaatctgtgcaaaagaaaaaagtaaaagagttaaaggtgttggattcaaagacagcccagaatctctcaatctttttgggttccttccgcatgccctatcaagagattaagaatgtcatcctggaggtgaatgaggctgttctgactgagtctatgatccagaacctcattaagcaaatgccagagccagagcagttaaaaatgctttctgaactgaaggatgaatatgatgacctggctgagtcagagcagtttggcgtggtgatgggcactgtgccccgactgcggcctcgcctcaatgccattctcttcaagctacaattcagcgagcaagtggagaatatcaagccagagattgtgtctgtcactgctgcatgtgaggagttacgtaagagtgagagcttttccaatctcctagagattaccttgcttgttggaaattacatgaatgctggctccagaaatgctggtgcttttggcttcaatatcagcttcctctgtaagcttcgagacaccaagtccacagatcagaagatgacgttgttacacttcttggctgagttgtgtgagaatgactatcccgatgtcctcaagtttccagacgagcttgcccatgtggagaaagccagccgagtttctgctgaaaacttgcaaaagaacctagatcagatgaagaaacaaatttctgatgtggaacgtgatgttcagaatttcccagctgccacagatgaaaaagacaagtttgttgaaaaaatgaccatctttgtgaaggatgcacaggaacagtataacaagctgcggatgatgcattctaacatggagaccctctataaggagctgggcgagtacttcctctttgaccccaagaagttgtctgttgaagaatttttcatggatcttcacaattttcggaatatgtttttgcaagcagtcaaggagaaccagaagcggcgggagacagaagaaaagatgaggcgagcaaaactagccaaggagaaggcagagaaggagcggctagagaagcagcagaagagagagcaactcatagacatgaatgcagagggcgatgagacaggtgtgatggacagtcttctagaagccctgcagtcaggggcagcattccgacggaagagagggccccgtcaagccaacaggaaggccgggtgtgcagtcacatctctgctagcttcggagctgaccaaggatgatgccatggctgctgttcctgccaaggtgtccaagaacagtgagacattccccacaatccttgaggaagccaaggagttggttggccgtgcaagctaatgtgggtcctgtgaccgcggcagctcctcagcggagccgcagactgtcctgccctgcagcatgtgcctaaaggctcaaggggatattcctctggggtggccactcccaccaccctgaccctgtctttctctctggcctgctgctctctcaacatcacatacagcttcagctgcctggaggccagaaggaaagggcagtgcaggggaggcctgagcccgacttagccagccctggctgttgtattaccaaagcagggtccatgtttgctgccttaaccctgtctcctctctgttactcagagggcctcatctcagacaaggcccagcctgctttttctcagccctgactttctaatgggctttcccccctaggtcagtcttgctggatttgtgcttttcttttgtggtttctctggccctgagaatagcatggggcttgtaaacctttgggctagatccctcctttcattgctgttgtctctgctcttccctctcctggctgtggttatttattattagtggtgtggcactgggagctgctcctaaggaagcagggagcaaatcccacctttaccccaccttcctgggaaaggcctccaaagcaaaggatctggaccagtttccctgctgtgctgtggcccaggccagagcctgtgggcaggcaggcagggcatagcgacagtgtgggacctgcccccagcttctgccacgctttatgcccttgcctctctggacgctctgcaccaaccccaggctactgagccaccttccctcctcatgccttccctgagctttggtgcatctcatctggactatgggttgtactgtgaccatcccaacacctcaccctctgtctacaaggaaatgggaggtggagcctcctggctgagaaattgttttgcaaatggatctatttttgtatgaaaaaaaaaatttttttaaagaaaactgttccttccccctttcccctccataatgtaagaagctttggtggcaggttacagagttctgggatttcttctcacaggcccaatcctgaatgtgcccctggaccttctggacccttgagtccaaggcagatcctctctcccagggaatccgacacaggaggaaccccttctctggttgagctgggccaggcctaagagtagcaggaactctaagaccacagagttttttataaatgtataaatgtatcaagccaaatgtgcagatgctaactggacattctggggaactgggcaccaggagtgccttcatacactgtaccccagctctcttctaaaagagaagtgggtgggcacactgaactgtttggtggccccaaccacaggaagctgcaattctctggcttagggtgatacttttgccctccttgtgcccctctcagctttccatccccagctaggaagaaagaatggcactcttgggcttggcccagaattagagttattagagcaagagagagcttaggaagcatgagggcaactatagtgaggccttattgccaggagggagggttttggttgctggcgcttgtgtataaaggggcaagagcagctcctttggactattcctgggaggactctgatgcagggcgtctgttgctcccctgggtcacctcctccctgctcgctgacatctggggctttgaccctttcttttttaatctacttttgctaagatgcatttaataaaaaaaaagagagagagagagaggtgtgagggacaaaatgcaaacctatttcccttgcctcataggcttctgggatgtcatcacctccagtttgttggttttgtttccaactgttaataaagcattgaaacagt

SEQ ID NO: 1380 - DNA, 5786 bp, Homo sapiens
  source 1..5786: mol_type = genomic DNA
attcatgaggcgcgcgcagcccggcatgctaatgaggcggggcgcggcggctggctaaagagcgactgggcggcggcgggcgcggagctgccaggcgggagcggcgtaggcgcggggtcgccggccagcgtgaaccgggacatggagccgcccggcgggagcctggggcccggccgcgggacccgggacaagaagaagggccggagcccagatgagctgccctcggcgggcggcgacggcggcaaatctaagaaatttactctgaagcggctcatggcagatgagctggagagatttaccagcatgagaattaagaaggagaaggaaaagcccaattctgctcatagaaattcttctgcatcatatggggatgatcccacagcacagtcattgcaagatgtttcagatgaacaagtgctggttctctttgaacagatgctgctggatatgaacctgaatgaggagaaacagcaacctttgagggagaaggacatcatcatcaagagggagatggtgtcccaatacttgtacacctccaaggctggcatgagccagaaggagagctctaagtctgccatgatgtatattcaggagttgaggtcaggcttgcgggatatgcctctgctcagctgcctggagtcccttcgtgtgtctctcaacaacaaccctgtcagttgggtgcaaacatttggtgctgaaggcttggcctccttattggacattcttaaacgacttcatgatgagaaagaagagactgctgggagttacgatagccggaacaagcatgagatcattcgctgcttgaaagcttttatgaacaacaagtttggaatcaagaccatgttggagacagaagaaggaatcctactgctggtcagagccatggatcctgctgttcccaacatgatgattgatgcagctaagctgctttctgctctttgtattctaccgcagccagaggacatgaatgaaagggttttggaggcaatgacagaaagagctgagatggatgaagtggaacgtttccagccgctgctggatggattaaaaagtggaaccactattgcactgaaggttggatgcctacagctgatcaatgctctcatcacaccagcggaggaacttgacttccgagttcacatcagaagtgaactgatgcgtttggggctacatcaggtgttgcaggaccttcgagagattgaaaatgaagatatgagagtgcaactaaatgtgtttgatgaacaaggggaagaggattcctatgacctgaagggacggctggatgacattcgcatggagatggatgactttaatgaagtctttcagattctcttaaacacagtgaaggattcaaaggcagagccacacttcctttccatcctgcagcacttactcttggtccgaaatgactatgaggccagacctcagtactataagttgattgaagaatgtatttcccagatagttctgcacaagaacggggctgatcctgacttcaagtgccggcacctccagattgagattgagggattaattgatcaaatgattgataagacaaaggtggagaaatctgaagccaaagctgcagagctggaaaagaagttggactcagagttaacagcccgacatgagctacaggtggaaatgaaaaagatggaaagtgactttgagcagaagcttcaagatcttcagggagaaaaagatgcactgcattctgaaaagcagcaaattgccacagagaaacaggacctggaagcagaggtgtcccagctcacaggagaggttgccaagctgacaaaggaactggaagatgccaagaaagaaatggcttccctctctgcggcagctattactgtacctccttctgttcctagtcgtgctcctgttccccctgcccctcctttacctggtgactctggcactattattccaccaccacctgctcctggggatagtaccactcctcctcctcctcctcctcctcctcctcctccacctcctttgcctgggggtgtttgcatctcctcacccccttctttacctggaggtactgctatctctccaccccctcctttgtctggggatgctaccatccctccaccccctcctttgcctgagggtgttggcatcccttcaccctcttctttgcctggaggtactgccatccccccacctcctcctttgcctgggagtgctagaatccccccaccaccacctcctttgcctgggagtgctggaattccccccccacctcctcccttgcctggagaagcaggaatgccacctcctcctccccctcttcctggtggtcctggaatccctccacctcctccatttcccggaggccctggcattcctccacctccacccggaatgggtatgcctccacctcccccatttggatttggagttcctgcagccccagttctgccatttggattaacccccaaaaagctttataagccagaggtgcagctccggaggccaaactggtccaagcttgtggctgaggacctctcccaggactgcttctggacaaaggtgaaggaggaccgctttgagaacaatgaacttttcgccaaacttacccttaccttctctgcccagaccaagaccaagaaggatcaagaaggtggagaagaaaagaaatctgtgcaaaagaaaaaagtaaaagagttaaaggtgttggattcaaagacagcccagaatctctcaatctttttgggttccttccgcatgccctatcaagagattaagaatgtcatcctggaggtgaatgaggctgttctgactgagtctatgatccagaacctcattaagcaaatgccagagccagagcagttaaaaatgctttctgaactgaaggatgaatatgatgacctggctgagtcagagcagtttggcgtggtgatgggcactgtgccccgactgcggcctcgcctcaatgccattctcttcaagctacaattcagcgagcaagtggagaatatcaagccagagattgtgtctgtcactgctgcatgtgaggagttacgtaagagtgagagcttttccaatctcctagagattaccttgcttgttggaaattacatgaatgctggctccagaaatgctggtgcttttggcttcaatatcagcttcctctgtaagcttcgagacaccaagtccacagatcagaagatgacgttgttacacttcttggctgagttgtgtgagaatgactatcccgatgtcctcaagtttccagacgagcttgcccatgtggagaaagccagccgagtttctgctgaaaacttgcaaaagaacctagatcagatgaagaaacaaatttctgatgtggaacgtgatgttcagaatttcccagctgccacagatgaaaaagacaagtttgttgaaaaaatgaccagctttgtgaaggatgcacaggaacagtataacaagctgcggatgatgcattctaacatggagaccctctataaggagctgggcgagtacttcctctttgaccccaagaagttgtctgttgaagaatttttcatggatcttcacaattttcggaatatgtttttgcaagcagtcaaggagaaccagaagcggcgggagacagaagaaaagatgaggcgagcaaaactagccaaggagaaggcagagaaggagcggctagagaagcagcagaagagagagcaactcatagacatgaatgcagagggcgatgagacaggtgtgatggacagtcttctagaagccctgcagtcaggggcagcattccgacggaagagagggccccgtcaagccaacaggaaggccgggtgtgcagtcacatctctgctagcttcggagctgaccaaggatgatgccatggctgctgttcctgccaaggtgtccaagaacagtgagacattccccacaatccttgaggaagccaaggagttggttggccgtgcaagctaatgtgggtcctgtgaccgcggcagctcctcagcggagccgcagactgtcctgccctgcagcatgtgcctaaaggctcaaggggatattcctctggggtggccactcccaccaccctgaccctgtctttctctctggcctgctgctctctcaacatcacatacagcttcagctgcctggaggccagaaggaaagggcagtgcaggggaggcctgagcccgacttagccagccctggctgttgtattaccaaagcagggtccatgtttgctgccttaaccctgtctcctctctgttactcagagggcctcatctcagacaaggcccagcctgctttttctcagccctgactttctaatgggctttcccccctaggtcagtcttgctggatttgtgcttttcttttgtggtttctctggccctgagaatagcatggggcttgtaaacctttgggctagatccctcctttcattgctgttgtctctgctcttccctctcctggctgtggttatttattattagtggtgtggcactgggagctgctcctaaggaagcagggagcaaatcccacctttaccccaccttcctgggaaaggcctccaaagcaaaggatctggaccagtttccctgctgtgctgtggcccaggccagagcctgtgggcaggcaggcagggcatagcgacagtgtgggacctgcccccagcttctgccacgctttatgcccttgcctctctggacgctctgcaccaaccccaggctactgagccaccttccctcctcatgccttccctgagctttggtgcatctcatctggactatgggttgtactgtgaccatcccaacacctcaccctctgtctacaaggaaatgggaggtggagcctcctggctgagaaattgttttgcaaatggatctatttttgtatgaaaaaaaaaatttttttaaagaaaactgttccttccccctttcccctccataatgtaagaagctttggtggcaggttacagagttctgggatttcttctcacaggcccaatcctgaatgtgcccctggaccttctggacccttgagtccaaggcagatcctctctcccagggaatccgacacaggaggaaccccttctctggttgagctgggccaggcctaagagtagcaggaactctaagaccacagagttttttataaatgtataaatgtatcaagccaaatgtgcagatgctaactggacattctggggaactgggcaccaggagtgccttcatacactgtaccccagctctcttctaaaagagaagtgggtgggcacactgaactgtttggtggccccaaccacaggaagctgcaattctctggcttagggtgatacttttgccctccttgtgcccctctcagctttccatccccagctaggaagaaagaatggcactcttgggcttggcccagaattagagttattagagcaagagagagcttaggaagcatgagggcaactatagtgaggccttattgccaggagggagggttttggttgctggcgcttgtgtataaaggggcaagagcagctcctttggactattcctgggaggactctgatgcagggcgtctgttgctcccctgggtcacctcctccctgctcgctgacatctggggctttgaccctttcttttttaatctacttttgctaagatgcatttaataaaaaaaaagagagagagagagaggtgtgagggacaaaatgcaaacctatttcccttgcctcataggcttctgggatgtcatcacctccagtttgttggttttgtttccaactgttaataaagcattgaaacagtactgcc

SEQ ID NO: 1381 - DNA, 5762 bp, Homo sapiens
  source 1..5762: mol_type = genomic DNA
attcatgaggcgcgcgcagcccggcatgctaatgaggcggggcgcggcggctggctaaagagcgactgggcggcggcgggcgcggagctgccaggcgggagcggcgtaggcgcggggtcgccggccagcgtgaaccgggacatggagccgcccggcgggagcctggggcccggccgcgggacccgggacaagaagaagggccggagcccagatgagctgccctcggcgggcggcgacggcggcaaatctaagaaatttctggagagatttaccagcatgagaattaagaaggagaaggaaaagcccaattctgctcatagaaattcttctgcatcatatggggatgatcccacagcacagtcattgcaagatgtttcagatgaacaagtgctggttctctttgaacagatgctgctggatatgaacctgaatgaggagaaacagcaacctttgagggagaaggacatcatcatcaagagggagatggtgtcccaatacttgtacacctccaaggctggcatgagccagaaggagagctctaagtctgccatgatgtatattcaggagttgaggtcaggcttgcgggatatgcctctgctcagctgcctggagtcccttcgtgtgtctctcaacaacaaccctgtcagttgggtgcaaacatttggtgctgaaggcttggcctccttattggacattcttaaacgacttcatgatgagaaagaagagactgctgggagttacgatagccggaacaagcatgagatcattcgctgcttgaaagcttttatgaacaacaagtttggaatcaagaccatgttggagacagaagaaggaatcctactgctggtcagagccatggatcctgctgttcccaacatgatgattgatgcagctaagctgctttctgctctttgtattctaccgcagccagaggacatgaatgaaagggttttggaggcaatgacagaaagagctgagatggatgaagtggaacgtttccagccgctgctggatggattaaaaagtggaaccactattgcactgaaggttggatgcctacagctgatcaatgctctcatcacaccagcggaggaacttgacttccgagttcacatcagaagtgaactgatgcgtttggggctacatcaggtgttgcaggaccttcgagagattgaaaatgaagatatgagagtgcaactaaatgtgtttgatgaacaaggggaagaggattcctatgacctgaagggacggctggatgacattcgcatggagatggatgactttaatgaagtctttcagattctcttaaacacagtgaaggattcaaaggcagagccacacttcctttccatcctgcagcacttactcttggtccgaaatgactatgaggccagacctcagtactataagttgattgaagaatgtatttcccagatagttctgcacaagaacggggctgatcctgacttcaagtgccggcacctccagattgagattgagggattaattgatcaaatgattgataagacaaaggtggagaaatctgaagccaaagctgcagagctggaaaagaagttggactcagagttaacagcccgacatgagctacaggtggaaatgaaaaagatggaaagtgactttgagcagaagcttcaagatcttcagggagaaaaagatgcactgcattctgaaaagcagcaaattgccacagagaaacaggacctggaagcagaggtgtcccagctcacaggagaggttgccaagctgacaaaggaactggaagatgccaagaaagaaatggcttccctctctgcggcagctattactgtacctccttctgttcctagtcgtgctcctgttccccctgcccctcctttacctggtgactctggcactattattccaccaccacctgctcctggggatagtaccactcctcctcctcctcctcctcctcctcctcctccacctcctttgcctgggggtgtttgcatctcctcacccccttctttacctggaggtactgctatctctccaccccctcctttgtctggggatgctaccatccctccaccccctcctttgcctgagggtgttggcatcccttcaccctcttctttgcctggaggtactgccatccccccacctcctcctttgcctgggagtgctagaatccccccaccaccacctcctttgcctgggagtgctggaattccccccccacctcctcccttgcctggagaagcaggaatgccacctcctcctccccctcttcctggtggtcctggaatccctccacctcctccatttcccggaggccctggcattcctccacctccacccggaatgggtatgcctccacctcccccatttggatttggagttcctgcagccccagttctgccatttggattaacccccaaaaagctttataagccagaggtgcagctccggaggccaaactggtccaagcttgtggctgaggacctctcccaggactgcttctggacaaaggtgaaggaggaccgctttgagaacaatgaacttttcgccaaacttacccttaccttctctgcccagaccaagacttccaaagccaagaaggatcaagaaggtggagaagaaaagaaatctgtgcaaaagaaaaaagtaaaagagttaaaggtgttggattcaaagacagcccagaatctctcaatctttttgggttccttccgcatgccctatcaagagattaagaatgtcatcctggaggtgaatgaggctgttctgactgagtctatgatccagaacctcattaagcaaatgccagagccagagcagttaaaaatgctttctgaactgaaggatgaatatgatgacctggctgagtcagagcagtttggcgtggtgatgggcactgtgccccgactgcggcctcgcctcaatgccattctcttcaagctacaattcagcgagcaagtggagaatatcaagccagagattgtgtctgtcactgctgcatgtgaggagttacgtaagagtgagagcttttccaatctcctagagattaccttgcttgttggaaattacatgaatgctggctccagaaatgctggtgcttttggcttcaatatcagcttcctctgtaagcttcgagacaccaagtccacagatcagaagatgacgttgttacacttcttggctgagttgtgtgagaatgactatcccgatgtcctcaagtttccagacgagcttgcccatgtggagaaagccagccgagtttctgctgaaaacttgcaaaagaacctagatcagatgaagaaacaaatttctgatgtggaacgtgatgttcagaatttcccagctgccacagatgaaaaagacaagtttgttgaaaaaatgaccagctttgtgaaggatgcacaggaacagtataacaagctgcggatgatgcattctaacatggagaccctctataaggagctgggcgagtacttcctctttgaccccaagaagttgtctgttgaagaatttttcatggatcttcacaattttcggaatatgtttttgcaagcagtcaaggagaaccagaagcggcgggagacagaagaaaagatgaggcgagcaaaactagccaaggagaaggcagagaaggagcggctagagaagcagcagaagagagagcaactcatagacatgaatgcagagggcgatgagacaggtgtgatggacagtcttctagaagccctgcagtcaggggcagcattccgacggaagagagggccccgtcaagccaacaggaaggccgggtgtgcagtcacatctctgctagcttcggagctgaccaaggatgatgccatggctgctgttcctgccaaggtgtccaagaacagtgagacattccccacaatccttgaggaagccaaggagttggttggccgtgcaagctaatgtgggtcctgtgaccgcggcagctcctcagcggagccgcagactgtcctgccctgcagcatgtgcctaaaggctcaaggggatattcctctggggtggccactcccaccaccctgaccctgtctttctctctggcctgctgctctctcaacatcacatacagcttcagctgcctggaggccagaaggaaagggcagtgcaggggaggcctgagcccgacttagccagccctggctgttgtattaccaaagcagggtccatgtttgctgccttaaccctgtctcctctctgttactcagagggcctcatctcagacaaggcccagcctgctttttctcagccctgactttctaatgggctttcccccctaggtcagtcttgctggatttgtgcttttcttttgtggtttctctggccctgagaatagcatggggcttgtaaacctttgggctagatccctcctttcattgctgttgtctctgctcttccctctcctggctgtggttatttattattagtggtgtggcactgggagctgctcctaaggaagcagggagcaaatcccacctttaccccaccttcctgggaaaggcctccaaagcaaaggatctggaccagtttccctgctgtgctgtggcccaggccagagcctgtgggcaggcaggcagggcatagcgacagtgtgggacctgcccccagcttctgccacgctttatgcccttgcctctctggacgctctgcaccaaccccaggctactgagccaccttccctcctcatgccttccctgagctttggtgcatctcatctggactatgggttgtactgtgaccatcccaacacctcaccctctgtctacaaggaaatgggaggtggagcctcctggctgagaaattgttttgcaaatggatctatttttgtatgaaaaaaaaaatttttttaaagaaaactgttccttccccctttcccctccataatgtaagaagctttggtggcaggttacagagttctgggatttcttctcacaggcccaatcctgaatgtgcccctggaccttctggacccttgagtccaaggcagatcctctctcccagggaatccgacacaggaggaaccccttctctggttgagctgggccaggcctaagagtagcaggaactctaagaccacagagttttttataaatgtataaatgtatcaagccaaatgtgcagatgctaactggacattctggggaactgggcaccaggagtgccttcatacactgtaccccagctctcttctaaaagagaagtgggtgggcacactgaactgtttggtggccccaaccacaggaagctgcaattctctggcttagggtgatacttttgccctccttgtgcccctctcagctttccatccccagctaggaagaaagaatggcactcttgggcttggcccagaattagagttattagagcaagagagagcttaggaagcatgagggcaactatagtgaggccttattgccaggagggagggttttggttgctggcgcttgtgtataaaggggcaagagcagctcctttggactattcctgggaggactctgatgcagggcgtctgttgctcccctgggtcacctcctccctgctcgctgacatctggggctttgaccctttcttttttaatctacttttgctaagatgcatttaataaaaaaaaagagagagagagagaggtgtgagggacaaaatgcaaacctatttcccttgcctcataggcttctgggatgtcatcacctccagtttgttggttttgtttccaactgttaataaagcattgaaacagt

SEQ ID NO: 1382 - DNA, 5789 bp, Homo sapiens
  source 1..5789: mol_type = genomic DNA
attcatgaggcgcgcgcagcccggcatgctaatgaggcggggcgcggcggctggctaaagagcgactgggcggcggcgggcgcggagctgccaggcgggagcggcgtaggcgcggggtcgccggccagcgtgaaccgggacatggagccgcccggcgggagcctggggcccggccgcgggacccgggacaagaagaagggccggagcccagatgagctgccctcggcgggcggcgacggcggcaaatctaagaaatttactctgaagcggctcatggcagatgagctggagagatttaccagcatgagaattaagaaggagaaggaaaagcccaattctgctcatagaaattcttctgcatcatatggggatgatcccacagcacagtcattgcaagatgtttcagatgaacaagtgctggttctctttgaacagatgctgctggatatgaacctgaatgaggagaaacagcaacctttgagggagaaggacatcatcatcaagagggagatggtgtcccaatacttgtacacctccaaggctggcatgagccagaaggagagctctaagtctgccatgatgtatattcaggagttgaggtcaggcttgcgggatatgcctctgctcagctgcctggagtcccttcgtgtgtctctcaacaacaaccctgtcagttgggtgcaaacatttggtgctgaaggcttggcctccttattggacattcttaaacgacttcatgatgagaaagaagagactgctgggagttacgatagccggaacaagcatgagatcattcgctgcttgaaagcttttatgaacaacaagtttggaatcaagaccatgttggagacagaagaaggaatcctactgctggtcagagccatggatcctgctgttcccaacatgatgattgatgcagctaagctgctttctgctctttgtattctaccgcagccagaggacatgaatgaaagggttttggaggcaatgacagaaagagctgagatggatgaagtggaacgtttccagccgctgctggatggattaaaaagtggaaccactattgcactgaaggttggatgcctacagctgatcaatgctctcatcacaccagcggaggaacttgacttccgagttcacatcagaagtgaactgatgcgtttggggctacatcaggtgttgcaggaccttcgagagattgaaaatgaagatatgagagtgcaactaaatgtgtttgatgaacaaggggaagaggattcctatgacctgaagggacggctggatgacattcgcatggagatggatgactttaatgaagtctttcagattctcttaaacacagtgaaggattcaaaggcagagccacacttcctttccatcctgcagcacttactcttggtccgaaatgactatgaggccagacctcagtactataagttgattgaagaatgtatttcccagatagttctgcacaagaacggggctgatcctgacttcaagtgccggcacctccagattgagattgagggattaattgatcaaatgattgataagacaaaggtggagaaatctgaagccaaagctgcagagctggaaaagaagttggactcagagttaacagcccgacatgagctacaggtggaaatgaaaaagatggaaagtgactttgagcagaagcttcaagatcttcagggagaaaaagatgcactgcattctgaaaagcagcaaattgccacagagaaacaggacctggaagcagaggtgtcccagctcacaggagaggttgccaagctgacaaaggaactggaagatgccaagaaagaaatggcttccctctctgcggcagctattactgtacctccttctgttcctagtcgtgctcctgttccccctgcccctcctttacctggtgactctggcactattattccaccaccacctgctcctggggatagtaccactcctcctcctcctcctcctcctcctcctcctccacctcctttgcctgggggtgtttgcatctcctcacccccttctttacctggaggtactgctatctctccaccccctcctttgtctggggatgctaccatccctccaccccctcctttgcctgagggtgttggcatcccttcaccctcttctttgcctggaggtactgccatccccccacctcctcctttgcctgggagtgctagaatccccccaccaccacctcctttgcctgggagtgctggaattccccccccacctcctcccttgcctggagaagcaggaatgccacctcctcctccccctcttcctggtggtcctggaatccctccacctcctccatttcccggaggccctggcattcctccacctccacccggaatgggtatgcctccacctcccccatttggatttggagttcctgcagccccagttctgccatttggattaacccccaaaaagctttataagccagaggtgcagctccggaggccaaactggtccaagcttgtggctgaggacctctcccaggactgcttctggacaaaggtgaaggaggaccgctttgagaacaatgaacttttcgccaaacttacccttaccttctctgcccagaccaagacttccaaagccaagaaggatcaagaaggtggagaagaaaagaaatctgtgcaaaagaaaaaagtaaaagagttaaaggtgttggattcaaagacagcccagaatctctcaatctttttgggttccttccgcatgccctatcaagagattaagaatgtcatcctggaggtgaatgaggctgttctgactgagtctatgatccagaacctcattaagcaaatgccagagccagagcagttaaaaatgctttctgaactgaaggatgaatatgatgacctggctgagtcagagcagtttggcgtggtgatgggcactgtgccccgactgcggcctcgcctcaatgccattctcttcaagctacaattcagcgagcaagtggagaatatcaagccagagattgtgtctgtcactgctgcatgtgaggagttacgtaagagtgagagcttttccaatctcctagagattaccttgcttgttggaaattacatgaatgctggctccagaaatgctggtgcttttggcttcaatatcagcttcctctgtaagcttcgagacaccaagtccacagatcagaagatgacgttgttacacttcttggctgagttgtgtgagaatgactatcccgatgtcctcaagtttccagacgagcttgcccatgtggagaaagccagccgagtttctgctgaaaacttgcaaaagaacctagatcagatgaagaaacaaatttctgatgtggaacgtgatgttcagaatttcccagctgccacagatgaaaaagacaagtttgttgaaaaaatgaccagctttgtgaaggatgcacaggaacagtataacaagctgcggatgatgcattctaacatggagaccctctataaggagctgggcgagtacttcctctttgaccccaagaagttgtctgttgaagaatttttcatggatcttcacaattttcggaatatgtttttgcaagcagtcaaggagaaccagaagcggcgggagacagaagaaaagatgaggcgagcaaaactagccaaggagaaggcagagaaggagcggctagagaagcagcagaagagagagcaactcatagacatgaatgcagagggcgatgagacaggtgtgatggacagtcttctagaagccctgcagtcaggggcagcattccgacggaagagagggccccgtcaagccaacaggaaggccgggtgtgcagtcacatctctgctagcttcggagctgaccaaggatgatgccatggctgctgttcctgccaaggtgtccaagaacagtgagacattccccacaatccttgaggaagccaaggagttggttggccgtgcaagctaatgtgggtcctgtgaccgcggcagctcctcagcggagccgcagactgtcctgccctgcagcatgtgcctaaaggctcaaggggatattcctctggggtggccactcccaccaccctgaccctgtctttctctctggcctgctgctctctcaacatcacatacagcttcagctgcctggaggccagaaggaaagggcagtgcaggggaggcctgagcccgacttagccagccctggctgttgtattaccaaagcagggtccatgtttgctgccttaaccctgtctcctctctgttactcagagggcctcatctcagacaaggcccagcctgctttttctcagccctgactttctaatgggctttcccccctaggtcagtcttgctggatttgtgcttttcttttgtggtttctctggccctgagaatagcatggggcttgtaaacctttgggctagatccctcctttcattgctgttgtctctgctcttccctctcctggctgtggttatttattattagtggtgtggcactgggagctgctcctaaggaagcagggagcaaatcccacctttaccccaccttcctgggaaaggcctccaaagcaaaggatctggaccagtttccctgctgtgctgtggcccaggccagagcctgtgggcaggcaggcagggcatagcgacagtgtgggacctgcccccagcttctgccacgctttatgcccttgcctctctggacgctctgcaccaaccccaggctactgagccaccttccctcctcatgccttccctgagctttggtgcatctcatctggactatgggttgtactgtgaccatcccaacacctcaccctctgtctacaaggaaatgggaggtggagcctcctggctgagaaattgttttgcaaatggatctatttttgtatgaaaaaaaaaatttttttaaagaaaactgttccttccccctttcccctccataatgtaagaagctttggtggcaggttacagagttctgggatttcttctcacaggcccaatcctgaatgtgcccctggaccttctggacccttgagtccaaggcagatcctctctcccagggaatccgacacaggaggaaccccttctctggttgagctgggccaggcctaagagtagcaggaactctaagaccacagagttttttataaatgtataaatgtatcaagccaaatgtgcagatgctaactggacattctggggaactgggcaccaggagtgccttcatacactgtaccccagctctcttctaaaagagaagtgggtgggcacactgaactgtttggtggccccaaccacaggaagctgcaattctctggcttagggtgatacttttgccctccttgtgcccctctcagctttccatccccagctaggaagaaagaatggcactcttgggcttggcccagaattagagttattagagcaagagagagcttaggaagcatgagggcaactatagtgaggccttattgccaggagggagggttttggttgctggcgcttgtgtataaaggggcaagagcagctcctttggactattcctgggaggactctgatgcagggcgtctgttgctcccctgggtcacctcctccctgctcgctgacatctggggctttgaccctttcttttttaatctacttttgctaagatgcatttaataaaaaaaaagagagagagagagaggtgtgagggacaaaatgcaaacctatttcccttgcctcataggcttctgggatgtcatcacctccagtttgttggttttgtttccaactgttaataaagcattgaaacagt

SEQ ID NO: 1383 - DNA, 5717 bp, Homo sapiens
  source 1..5717: mol_type = genomic DNA
attcatgaggcgcgcgcagcccggcatgctaatgaggcggggcgcggcggctggctaaagagcgactgggcggcggcgggcgcggagctgccaggcgggagcggcgtaggcgcggggtcgccggccagcgtgaaccgggacatggagccgcccggcgggagcctggggcccggccgcgggacccgggacaagaagaagggccggagcccagatgagctgccctcggcgggcggcgacggcggcaaatctaagaaatttctggagagatttaccagcatgagaattaagaaggagaaggaaaagcccaattctgctcatagaaattcttctgcatcatatggggatgatcccacagcacagtcattgcaagatgtttcagatgaacaagtgctggttctctttgaacagatgctgctggatatgaacctgaatgaggagaaacagcaacctttgagggagaaggacatcatcatcaagagggagatggtgtcccaatacttgtacacctccaaggctggcatgagccagaaggagagctctaagtctgccatgatgtatattcaggagttgaggtcaggcttgcgggatatgcctctgctcagctgcctggagtcccttcgtgtgtctctcaacaacaaccctgtcagttgggtgcaaacatttggtgctgaaggcttggcctccttattggacattcttaaacgacttcatgatgagaaagaagagactgctgggagttacgatagccggaacaagcatgagatcattcgctgcttgaaagcttttatgaacaacaagtttggaatcaagaccatgttggagacagaagaaggaatcctactgctggtcagagccatggatcctgctgttcccaacatgatgattgatgcagctaagctgctttctgctctttgtattctaccgcagccagaggacatgaatgaaagggttttggaggcaatgacagaaagagctgagatggatgaagtggaacgtttccagccgctgctggatggattaaaaagtggaaccactattgcactgaaggttggatgcctacagctgatcaatgctctcatcacaccagcggaggaacttgacttccgagttcacatcagaagtgaactgatgcgtttggggctacatcaggtgttgcaggaccttcgagagattgaaaatgaagatatgagagtgcaactaaatgtgtttgatgaacaaggggaagaggattcctatgacctgaagggacggctggatgacattcgcatggagatggatgactttaatgaagtctttcagattctcttaaacacagtgaaggattcaaaggcagagccacacttcctttccatcctgcagcacttactcttggtccgaaatgactatgaggccagacctcagtactataagttgattgaagaatgtatttcccagatagttctgcacaagaacggggctgatcctgacttcaagtgccggcacctccagattgagattgagggattaattgatcaaatgattgataagacaaaggtggagaaatctgaagccaaagctgcagagctggaaaagaagttggactcagagttaacagcccgacatgagctacaggtggaaatgaaaaagatggaaagtgactttgagcagaagcttcaagatcttcagggagaaaaagatgcactgcattctgaaaagcagcaaattgccacagagaaacaggacctggaagcagaggtgtcccagctcacaggagaggttgccaagctgacaaaggaactggaagatgccaagaaagaaatggcttccctctctgcggcagctattactgtacctccttctgttcctagtcgtgctcctgttccccctgcccctcctttacctggtgactctggcactattattccaccaccacctgctcctggggatagtaccactcctcctcctcctcctcctcctcctcctcctccacctcctttgcctgggggtactgctatctctccaccccctcctttgtctggggatgctaccatccctccaccccctcctttgcctgagggtgttggcatcccttcaccctcttctttgcctggaggtactgccatccccccacctcctcctttgcctgggagtgctagaatccccccaccaccacctcctttgcctgggagtgctggaattccccccccacctcctcccttgcctggagaagcaggaatgccacctcctcctccccctcttcctggtggtcctggaatccctccacctcctccatttcccggaggccctggcattcctccacctccacccggaatgggtatgcctccacctcccccatttggatttggagttcctgcagccccagttctgccatttggattaacccccaaaaagctttataagccagaggtgcagctccggaggccaaactggtccaagcttgtggctgaggacctctcccaggactgcttctggacaaaggtgaaggaggaccgctttgagaacaatgaacttttcgccaaacttacccttaccttctctgcccagaccaagaccaagaaggatcaagaaggtggagaagaaaagaaatctgtgcaaaagaaaaaagtaaaagagttaaaggtgttggattcaaagacagcccagaatctctcaatctttttgggttccttccgcatgccctatcaagagattaagaatgtcatcctggaggtgaatgaggctgttctgactgagtctatgatccagaacctcattaagcaaatgccagagccagagcagttaaaaatgctttctgaactgaaggatgaatatgatgacctggctgagtcagagcagtttggcgtggtgatgggcactgtgccccgactgcggcctcgcctcaatgccattctcttcaagctacaattcagcgagcaagtggagaatatcaagccagagattgtgtctgtcactgctgcatgtgaggagttacgtaagagtgagagcttttccaatctcctagagattaccttgcttgttggaaattacatgaatgctggctccagaaatgctggtgcttttggcttcaatatcagcttcctctgtaagcttcgagacaccaagtccacagatcagaagatgacgttgttacacttcttggctgagttgtgtgagaatgactatcccgatgtcctcaagtttccagacgagcttgcccatgtggagaaagccagccgagtttctgctgaaaacttgcaaaagaacctagatcagatgaagaaacaaatttctgatgtggaacgtgatgttcagaatttcccagctgccacagatgaaaaagacaagtttgttgaaaaaatgaccatctttgtgaaggatgcacaggaacagtataacaagctgcggatgatgcattctaacatggagaccctctataaggagctgggcgagtacttcctctttgaccccaagaagttgtctgttgaagaatttttcatggatcttcacaattttcggaatatgtttttgcaagcagtcaaggagaaccagaagcggcgggagacagaagaaaagatgaggcgagcaaaactagccaaggagaaggcagagaaggagcggctagagaagcagcagaagagagagcaactcatagacatgaatgcagagggcgatgagacaggtgtgatggacagtcttctagaagccctgcagtcaggggcagcattccgacggaagagagggccccgtcaagccaacaggaaggccgggtgtgcagtcacatctctgctagcttcggagctgaccaaggatgatgccatggctgctgttcctgccaaggtgtccaagaacagtgagacattccccacaatccttgaggaagccaaggagttggttggccgtgcaagctaatgtgggtcctgtgaccgcggcagctcctcagcggagccgcagactgtcctgccctgcagcatgtgcctaaaggctcaaggggatattcctctggggtggccactcccaccaccctgaccctgtctttctctctggcctgctgctctctcaacatcacatacagcttcagctgcctggaggccagaaggaaagggcagtgcaggggaggcctgagcccgacttagccagccctggctgttgtattaccaaagcagggtccatgtttgctgccttaaccctgtctcctctctgttactcagagggcctcatctcagacaaggcccagcctgctttttctcagccctgactttctaatgggctttcccccctaggtcagtcttgctggatttgtgcttttcttttgtggtttctctggccctgagaatagcatggggcttgtaaacctttgggctagatccctcctttcattgctgttgtctctgctcttccctctcctggctgtggttatttattattagtggtgtggcactgggagctgctcctaaggaagcagggagcaaatcccacctttaccccaccttcctgggaaaggcctccaaagcaaaggatctggaccagtttccctgctgtgctgtggcccaggccagagcctgtgggcaggcaggcagggcatagcgacagtgtgggacctgcccccagcttctgccacgctttatgcccttgcctctctggacgctctgcaccaaccccaggctactgagccaccttccctcctcatgccttccctgagctttggtgcatctcatctggactatgggttgtactgtgaccatcccaacacctcaccctctgtctacaaggaaatgggaggtggagcctcctggctgagaaattgttttgcaaatggatctatttttgtatgaaaaaaaaaatttttttaaagaaaactgttccttccccctttcccctccataatgtaagaagctttggtggcaggttacagagttctgggatttcttctcacaggcccaatcctgaatgtgcccctggaccttctggacccttgagtccaaggcagatcctctctcccagggaatccgacacaggaggaaccccttctctggttgagctgggccaggcctaagagtagcaggaactctaagaccacagagttttttataaatgtataaatgtatcaagccaaatgtgcagatgctaactggacattctggggaactgggcaccaggagtgccttcatacactgtaccccagctctcttctaaaagagaagtgggtgggcacactgaactgtttggtggccccaaccacaggaagctgcaattctctggcttagggtgatacttttgccctccttgtgcccctctcagctttccatccccagctaggaagaaagaatggcactcttgggcttggcccagaattagagttattagagcaagagagagcttaggaagcatgagggcaactatagtgaggccttattgccaggagggagggttttggttgctggcgcttgtgtataaaggggcaagagcagctcctttggactattcctgggaggactctgatgcagggcgtctgttgctcccctgggtcacctcctccctgctcgctgacatctggggctttgaccctttcttttttaatctacttttgctaagatgcatttaataaaaaaaaagagagagagagagaggtgtgagggacaaaatgcaaacctatttcccttgcctcataggcttctgggatgtcatcacctccagtttgttggttttgtttccaactgttaataaagcattgaaacagt

SEQ ID NO: 1384 - DNA, 5765 bp, Homo sapiens
  source 1..5765: mol_type = genomic DNA
attcatgaggcgcgcgcagcccggcatgctaatgaggcggggcgcggcggctggctaaagagcgactgggcggcggcgggcgcggagctgccaggcgggagcggcgtaggcgcggggtcgccggccagcgtgaaccgggacatggagccgcccggcgggagcctggggcccggccgcgggacccgggacaagaagaagggccggagcccagatgagctgccctcggcgggcggcgacggcggcaaatctaagaaatttctggagagatttaccagcatgagaattaagaaggagaaggaaaagcccaattctgctcatagaaattcttctgcatcatatggggatgatcccacagcacagtcattgcaagatgtttcagatgaacaagtgctggttctctttgaacagatgctgctggatatgaacctgaatgaggagaaacagcaacctttgagggagaaggacatcatcatcaagagggagatggtgtcccaatacttgtacacctccaaggctggcatgagccagaaggagagctctaagtctgccatgatgtatattcaggagttgaggtcaggcttgcgggatatgcctctgctcagctgcctggagtcccttcgtgtgtctctcaacaacaaccctgtcagttgggtgcaaacatttggtgctgaaggcttggcctccttattggacattcttaaacgacttcatgatgagaaagaagagactgctgggagttacgatagccggaacaagcatgagatcattcgctgcttgaaagcttttatgaacaacaagtttggaatcaagaccatgttggagacagaagaaggaatcctactgctggtcagagccatggatcctgctgttcccaacatgatgattgatgcagctaagctgctttctgctctttgtattctaccgcagccagaggacatgaatgaaagggttttggaggcaatgacagaaagagctgagatggatgaagtggaacgtttccagccgctgctggatggattaaaaagtggaaccactattgcactgaaggttggatgcctacagctgatcaatgctctcatcacaccagcggaggaacttgacttccgagttcacatcagaagtgaactgatgcgtttggggctacatcaggtgttgcaggaccttcgagagattgaaaatgaagatatgagagtgcaactaaatgtgtttgatgaacaaggggaagaggattcctatgacctgaagggacggctggatgacattcgcatggagatggatgactttaatgaagtctttcagattctcttaaacacagtgaaggattcaaaggcagagccacacttcctttccatcctgcagcacttactcttggtccgaaatgactatgaggccagacctcagtactataagttgattgaagaatgtatttcccagatagttctgcacaagaacggggctgatcctgacttcaagtgccggcacctccagattgagattgagggattaattgatcaaatgattgataagacaaaggtggagaaatctgaagccaaagctgcagagctggaaaagaagttggactcagagttaacagcccgacatgagctacaggtggaaatgaaaaagatggaaagtgactttgagcagaagcttcaagatcttcagggagaaaaagatgcactgcattctgaaaagcagcaaattgccacagagaaacaggacctggaagcagaggtgtcccagctcacaggagaggttgccaagctgacaaaggaactggaagatgccaagaaagaaatggcttccctctctgcggcagctattactgtacctccttctgttcctagtcgtgctcctgttccccctgcccctcctttacctggtgactctggcactattattccaccaccacctgctcctggggatagtaccactcctcctcctcctcctcctcctcctcctcctccacctcctttgcctgggggtgtttgcatctcctcacccccttctttacctggaggtactgctatctctccaccccctcctttgtctggggatgctaccatccctccaccccctcctttgcctgagggtgttggcatcccttcaccctcttctttgcctggaggtactgccatccccccacctcctcctttgcctgggagtgctagaatccccccaccaccacctcctttgcctgggagtgctggaattccccccccacctcctcccttgcctggagaagcaggaatgccacctcctcctccccctcttcctggtggtcctggaatccctccacctcctccatttcccggaggccctggcattcctccacctccacccggaatgggtatgcctccacctcccccatttggatttggagttcctgcagccccagttctgccatttggattaacccccaaaaagctttataagccagaggtgcagctccggaggccaaactggtccaagcttgtggctgaggacctctcccaggactgcttctggacaaaggtgaaggaggaccgctttgagaacaatgaacttttcgccaaacttacccttaccttctctgcccagaccaagagaacaaagaaggccaagaaggatcaagaaggtggagaagaaaagaaatctgtgcaaaagaaaaaagtaaaagagttaaaggtgttggattcaaagacagcccagaatctctcaatctttttgggttccttccgcatgccctatcaagagattaagaatgtcatcctggaggtgaatgaggctgttctgactgagtctatgatccagaacctcattaagcaaatgccagagccagagcagttaaaaatgctttctgaactgaaggatgaatatgatgacctggctgagtcagagcagtttggcgtggtgatgggcactgtgccccgactgcggcctcgcctcaatgccattctcttcaagctacaattcagcgagcaagtggagaatatcaagccagagattgtgtctgtcactgctgcatgtgaggagttacgtaagagtgagagcttttccaatctcctagagattaccttgcttgttggaaattacatgaatgctggctccagaaatgctggtgcttttggcttcaatatcagcttcctctgtaagcttcgagacaccaagtccacagatcagaagatgacgttgttacacttcttggctgagttgtgtgagaatgactatcccgatgtcctcaagtttccagacgagcttgcccatgtggagaaagccagccgagtttctgctgaaaacttgcaaaagaacctagatcagatgaagaaacaaatttctgatgtggaacgtgatgttcagaatttcccagctgccacagatgaaaaagacaagtttgttgaaaaaatgaccatctttgtgaaggatgcacaggaacagtataacaagctgcggatgatgcattctaacatggagaccctctataaggagctgggcgagtacttcctctttgaccccaagaagttgtctgttgaagaatttttcatggatcttcacaattttcggaatatgtttttgcaagcagtcaaggagaaccagaagcggcgggagacagaagaaaagatgaggcgagcaaaactagccaaggagaaggcagagaaggagcggctagagaagcagcagaagagagagcaactcatagacatgaatgcagagggcgatgagacaggtgtgatggacagtcttctagaagccctgcagtcaggggcagcattccgacggaagagagggccccgtcaagccaacaggaaggccgggtgtgcagtcacatctctgctagcttcggagctgaccaaggatgatgccatggctgctgttcctgccaaggtgtccaagaacagtgagacattccccacaatccttgaggaagccaaggagttggttggccgtgcaagctaatgtgggtcctgtgaccgcggcagctcctcagcggagccgcagactgtcctgccctgcagcatgtgcctaaaggctcaaggggatattcctctggggtggccactcccaccaccctgaccctgtctttctctctggcctgctgctctctcaacatcacatacagcttcagctgcctggaggccagaaggaaagggcagtgcaggggaggcctgagcccgacttagccagccctggctgttgtattaccaaagcagggtccatgtttgctgccttaaccctgtctcctctctgttactcagagggcctcatctcagacaaggcccagcctgctttttctcagccctgactttctaatgggctttcccccctaggtcagtcttgctggatttgtgcttttcttttgtggtttctctggccctgagaatagcatggggcttgtaaacctttgggctagatccctcctttcattgctgttgtctctgctcttccctctcctggctgtggttatttattattagtggtgtggcactgggagctgctcctaaggaagcagggagcaaatcccacctttaccccaccttcctgggaaaggcctccaaagcaaaggatctggaccagtttccctgctgtgctgtggcccaggccagagcctgtgggcaggcaggcagggcatagcgacagtgtgggacctgcccccagcttctgccacgctttatgcccttgcctctctggacgctctgcaccaaccccaggctactgagccaccttccctcctcatgccttccctgagctttggtgcatctcatctggactatgggttgtactgtgaccatcccaacacctcaccctctgtctacaaggaaatgggaggtggagcctcctggctgagaaattgttttgcaaatggatctatttttgtatgaaaaaaaaaatttttttaaagaaaactgttccttccccctttcccctccataatgtaagaagctttggtggcaggttacagagttctgggatttcttctcacaggcccaatcctgaatgtgcccctggaccttctggacccttgagtccaaggcagatcctctctcccagggaatccgacacaggaggaaccccttctctggttgagctgggccaggcctaagagtagcaggaactctaagaccacagagttttttataaatgtataaatgtatcaagccaaatgtgcagatgctaactggacattctggggaactgggcaccaggagtgccttcatacactgtaccccagctctcttctaaaagagaagtgggtgggcacactgaactgtttggtggccccaaccacaggaagctgcaattctctggcttagggtgatacttttgccctccttgtgcccctctcagctttccatccccagctaggaagaaagaatggcactcttgggcttggcccagaattagagttattagagcaagagagagcttaggaagcatgagggcaactatagtgaggccttattgccaggagggagggttttggttgctggcgcttgtgtataaaggggcaagagcagctcctttggactattcctgggaggactctgatgcagggcgtctgttgctcccctgggtcacctcctccctgctcgctgacatctggggctttgaccctttcttttttaatctacttttgctaagatgcatttaataaaaaaaaagagagagagagagaggtgtgagggacaaaatgcaaacctatttcccttgcctcataggcttctgggatgtcatcacctccagtttgttggttttgtttccaactgttaataaagcattgaaacagt

SEQ ID NO: 1385 - DNA, 2676 bp, Homo sapiens
  source 1..2676: mol_type = genomic DNA
attcatgaggcgcgcgcagcccggcatgctaatgaggcggggcgcggcggctggctaaagagcgactgggcggcggcgggcgcggagctgccaggcgggagcggcgtaggcgcggggtcgccggccagcgtgaaccgggacatggagccgcccggcgggagcctggggcccggccgcgggacccgggacaagaagaagggccggagcccagatgagctgccctcggcgggcggcgacggcggcaaatctaagaaatttactctgaagcggctcatggcagatgagctggagagatttaccagcatgagaattaagaaggagaaggaaaagcccaattctgctcatagaaattcttctgcatcatatggggatgatcccacagcacagtcattgcaagatgtttcagatgaacaagtgctggttctctttgaacagatgctgctggatatgaacctgaatgaggagaaacagcaacctttgagggagaaggacatcatcatcaagagggagatggtgtcccaatacttgtacacctccaaggctggcatgagccagaaggagagctctaagtctgccatgatgtatattcaggagttgaggtcaggcttgcgggatatgcctctgctcagctgcctggagtcccttcgtgtgtctctcaacaacaaccctgtcagttgggtgcaaacatttggtgctgaaggcttggcctccttattggacattcttaaacgacttcatgatgagaaagaagagactgctgggagttacgatagccggaacaagcatgagatcattcgctgcttgaaagcttttatgaacaacaagtttggaatcaagaccatgttggagacagaagaaggaatcctactgctggtcagagccatggatcctgctgttcccaacatgatgattgatgcagctaagctgctttctgctctttgtattctaccgcagccagaggacatgaatgaaagggttttggaggcaatgacagaaagagctgagatggatgaagtggaacgtttccagccgctgctggatggattaaaaagtggaaccactattgcactgaaggttggatgcctacagctgatcaatgctctcatcacaccagcggaggaacttgacttccgagttcacatcagaagtgaactgatgcgtttggggctacatcaggtgttgcaggaccttcgagagattgaaaatgaagatatgagagtgcaactaaatgtgtttgatgaacaaggggaagaggattcctatgacctgaagggacggctggatgacattcgcatggagatggatgactttaatgaagtctttcagattctcttaaacacagtgaaggattcaaaggcagagccacacttcctttccatcctgcagcacttactcttggtccgaaatgactatgaggccagacctcagtactataagttgattgaagaatgtatttcccagatagttctgcacaagaacggggctgatcctgacttcaagtgccggcacctccagattgagattgagggattaattgatcaaatgattgataagacaaaggtggagaaatctgaagccaaagctgcagagctggaaaagaagttggactcagagttaacagcccgacatgagctacaggtggaaatgaaaaagatggaaagtgactttgagcagaagcttcaagatcttcagggagaaaaagatgcactgcattctgaaaagcagcaaattgccacagagaaacaggacctggaagcagaggtgtcccagctcacaggagaggttgccaagctgacaaaggaactggaagatgccaagaaagaaatggcttccctctctgcggcagctattactgtacctccttctgttcctagtcgtgctcctgttccccctgcccctcctttacctggtgactctggcactattattccaccaccacctgctcctggggatagtaccactcctcctcctcctcctcctcctcctcctcctccacctcctttgcctgggggtgtttgcatctcctcacccccttctttacctggaggtactgctatctctccaccccctcctttgtctggggatgctaccatccctccaccccctcctttgcctgagggtgttggcatcccttcaccctcttctttgcctggaggtactgccatccccccacctcctcctttgcctgggagtgctagaatccccccaccaccacctcctttgcctgggagtgctggaattccccccccacctcctcccttgcctggagaagcaggaatgccacctcctcctccccctcttcctggtggtcctggaatccctccacctcctccatttcccggaggccctggcattcctccacctccacccggaatgggtatgcctccacctcccccatttggatttggagttcctgcagccccagttctgccatttggattaacccccaaaaagctttataagccagaggtgcagctccggaggccaaactggtccaagcttgtggctgaggacctctcccaggactgcttctggacaaaggtgaaggaggaccgctttgagaacaatgaacttttcgccaaacttacccttaccttctctgcccagaccaagagtgaaaaggccaagaaggatcaagaaggtggagaagaaaagaaatctgtgcaaaagaaaaaa

SEQ ID NO: 1386 - DNA, 1206 bp, Homo sapiens
  source 1..1206: mol_type = genomic DNA
ggcggagagggagcctggtgggcgggcggggcgcgtcttgcgggctccctcgggtaccggcgctgccgcaccccgccgcgctcccgcacccgcggcccgcccaccgcgccgctcccgcatctgcacccgcagcccggcggcctcccggcgggagcgagcagatccagtccggcccgcagcgcaactcggtccagtcggggcggcggctgcgggcgcagagcggagatgcagcggcttggggccaccctgctgtgcctgctgctggcggcggcggtccccacggcccccgcgcccgctccgacggcgacctcggctccagtcaagcccggcccggctctcagctacccgcaggaggaggccaccctcaatgagatgttccgcgaggttgaggaactgatggaggacacgcagcacaaattgcgcagcgcggtggaagagatggaggcagaagaagctgctgctaaagcatcatcagaagtgaacctggcaaacttacctcccagctatcacaatgagaccaacacagacacgaaggttggaaataataccatccatgtgcaccgagaaattcacaagataaccaacaaccagactggacaaatggtcttttcagagacagttatcacatctgtgggagacgaagaaggcagaaggagccacgagtgcatcatcgacgaggactgtgggcccagcatgtactgccagtttgccagcttccagtacacctgccagccatgccggggccagaggatgctctgcacccgggacagtgagtgctgtggagaccagctgtgtgtctggggtcactgcaccaaaatggccaccaggggcagcaatgggaccatctgtgacaaccagagggactgccagccggggctgtgctgtgccttccagagaggcctgctgttccctgtgtgcacacccctgcccgtggagggcgagctttgccatgaccccgccagccggcttctggacctcatcacctgggagctagagcctgatggagccttggaccgatgcccttgtgccagtggcctcctctgccagccccacagccacagcctggtgtatgtgtgcaagccgaccttcgtggggagccgtgaccaagatggggagatcctgctgcccagagaggtccccgatgagtatttggcagcttcatggaggaggtgcgccaggagctggaggacctggagaggagcctga

SEQ ID NO: 1387 - DNA, 2636 bp, Homo sapiens
  source 1..2636: mol_type = genomic DNA
ggcggagagggagcctggtgggcgggcggggcgcgtcttgcgggctccctcgggtaccggcgctgccgcaccccgccgcgctcccgcacccgcggcccgcccaccgcgccgctcccgcatctgcacccgcagcccggcggcctcccggcgggagcgagcagatccagtccggcccgcagcgcaactcggtccagtcggggcggcggctgcgggcgcagagcggagatgcagcggcttggggccaccctgctgtgcctgctgctggcggcggcggtccccacggcccccgcgcccgctccgacggcgacctcggctccagtcaagcccggcccggctctcagctacccgcaggaggaggccaccctcaatgagatgttccgcgaggttgaggaactgatggaggacacgcagcacaaattgcgcagcgcggtggaagagatggaggcagaagaagctgctgctaaagcatcatcagaagtgaacctggcaaacttacctcccagctatcacaatgagaccaacacagacacgaaggttggaaataataccatccatgtgcaccgagaaattcacaagataaccaacaaccagactggacaaatggtcttttcagagacagttatcacatctgtgggagacgaagaaggcagaaggagccacgagtgcatcatcgacgaggactgtgggcccagcatgtactgccagtttgccagcttccagtacacctgccagccatgccggggccagaggatgctctgcacccgggacagtgagtgctgtggagaccagctgtgtgtctggggtcactgcaccaaaatggccaccaggggcagcaatgggaccatctgtgacaaccagagggactgccagccggggctgtgctgtgccttccagagaggcctgctgttccctgtgtgcacacccctgcccgtggagggcgagctttgccatgaccccgccagccggcttctggacctcatcacctgggagctagagcctgatggagccttggaccgatgcccttgtgccagtggcctcctctgccagccccacagccacagcctggtgtatgtgtgcaagccgaccttcgtggggagccgtgaccaagatggggagatcctgctgcccagagaggtccccgatgagtatgaagttggcagcttcatggaggaggtgcgccaggagctggaggacctggagaggagcctgactgaagagatggcgctgagggagcctgcggctgccgccgctgcactgctgggaggggaagagatttagatctggaccaggctgtgggtagatgtgcaatagaaatagctaatttatttccccaggtgtgtgctttaggcgtgggctgaccaggcttcttcctacatcttcttcccagtaagtttcccctctggcttgacagcatgaggtgttgtgcatttgttcagctcccccaggctgttctccaggcttcacagtctggtgcttgggagagtcaggcagggttaaactgcaggagcagtttgccacccctgtccagattattggctgctttgcctctaccagttggcagacagccgtttgttctacatggctttgataattgtttgaggggaggagatggaaacaatgtggagtctccctctgattggttttggggaaatgtggagaagagtgccctgctttgcaaacatcaacctggcaaaaatgcaacaaatgaattttccacgcagttctttccatgggcataggtaagctgtgccttcagctgttgcagatgaaatgttctgttcaccctgcattacatgtgtttattcatccagcagtgttgctcagctcctacctctgtgccagggcagcattttcatatccaagatcaattccctctctcagcacagcctggggagggggtcattgttctcctcgtccatcagggatctcagaggctcagagactgcaagctgcttgcccaagtcacacagctagtgaagaccagagcagtttcatctggttgtgactctaagctcagtgctctctccactaccccacaccagccttggtgccaccaaaagtgctccccaaaaggaaggagaatgggatttttcttttgaggcatgcacatctggaattaaggtcaaactaattctcacatccctctaaaagtaaactactgttaggaacagcagtgttctcacagtgtggggcagccgtccttctaatgaagacaatgatattgacactgtccctctttggcagttgcattagtaactttgaaaggtatatgactgagcgtagcatacaggttaacctgcagaaacagtacttaggtaattgtagggcgaggattataaatgaaatttgcaaaatcacttagcagcaactgaagacaattatcaaccacgtggagaaaatcaaaccgagcagggctgtgtgaaacatggttgtaatatgcgactgcgaacactgaactctacgccactccacaaatgatgttttcaggtgtcatggactgttgccaccatgtattcatccagagttcttaaagtttaaagttgcacatgattgtataagcatgctttctttgagttttaaattatgtataaacataagttgcatttagaaatcaagcataaatcacttcaactgct

SEQ ID NO: 1388 - DNA, 2426 bp, Homo sapiens
  source 1..2426: mol_type = genomic DNA
gatcgcgttccgggacacacaggcggcggctgcgggcgcagagcggagatgcagcggcttggggccaccctgctgtgcctgctgctggcggcggcggtccccacggcccccgcgcccgctccgacggcgacctcggctccagtcaagcccggcccggctctcagctacccgcaggttgaggaactgatggaggacacgcagcacaaattgcgcagcgcggtggaagagatggaggcagaagaagctgctgctaaagcatcatcagaagtgaacctggcaaacttacctcccagctatcacaatgagaccaacacagacacgaaggttggaaataataccatccatgtgcaccgagaaattcacaagataaccaacaaccagactggacaaatggtcttttcagagacagttatcacatctgtgggagacgaagaaggcagaaggagccacgagtgcatcatcgacgaggactgtgggcccagcatgtactgccagtttgccagcttccagtacacctgccagccatgccggggccagaggatgctctgcacccgggacagtgagtgctgtggagaccagctgtgtgtctggggtcactgcaccaaaatggccaccaggggcagcaatgggaccatctgtgacaaccagagggactgccagccggggctgtgctgtgccttccagagaggcctgctgttccctgtgtgcacacccctgcccgtggagggcgagctttgccatgaccccgccagccggcttctggacctcatcacctgggagctagagcctgatggagccttggaccgatgcccttgtgccagtggcctcctctgccagccccacagccacagcctggtgtatgtgtgcaagccgaccttcgtggggagccgtgaccaagatggggagatcctgctgcccagagaggtccccgatgagtatgaagttggcagcttcatggaggaggtgcgccaggagctggaggacctggagaggagcctgactgaagagatggcgctgagggagcctgcggctgccgccgctgcactgctgggaggggaagagatttagatctggaccaggctgtgggtagatgtgcaatagaaatagctaatttatttccccaggtgtgtgctttaggcgtgggctgaccaggcttcttcctacatcttcttcccagtaagtttcccctctggcttgacagcatgaggtgttgtgcatttgttcagctcccccaggctgttctccaggcttcacagtctggtgcttgggagagtcaggcagggttaaactgcaggagcagtttgccacccctgtccagattattggctgctttgcctctaccagttggcagacagccgtttgttctacatggctttgataattgtttgaggggaggagatggaaacaatgtggagtctccctctgattggttttggggaaatgtggagaagagtgccctgctttgcaaacatcaacctggcaaaaatgcaacaaatgaattttccacgcagttctttccatgggcataggtaagctgtgccttcagctgttgcagatgaaatgttctgttcaccctgcattacatgtgtttattcatccagcagtgttgctcagctcctacctctgtgccagggcagcattttcatatccaagatcaattccctctctcagcacagcctggggagggggtcattgttctcctcgtccatcagggatctcagaggctcagagactgcaagctgcttgcccaagtcacacagctagtgaagaccagagcagtttcatctggttgtgactctaagctcagtgctctctccactaccccacaccagccttggtgccaccaaaagtgctccccaaaaggaaggagaatgggatttttcttttgaggcatgcacatctggaattaaggtcaaactaattctcacatccctctaaaagtaaactactgttaggaacagcagtgttctcacagtgtggggcagccgtccttctaatgaagacaatgatattgacactgtccctctttggcagttgcattagtaactttgaaaggtatatgactgagcgtagcatacaggttaacctgcagaaacagtacttaggtaattgtagggcgaggattataaatgaaatttgcaaaatcacttagcagcaactgaagacaattatcaaccacgtggagaaaatcaaaccgagcagggctgtgtgaaacatggttgtaatatgcgactgcgaacactgaactctacgccactccacaaatgatgttttcaggtgtcatggactgttgccaccatgtattcatccagagttcttaaagtttaaagttgcacatgattgtataagcatgctttctttgagttttaaattatgtataaacataagttgcatttagaaatcaagcataaatcacttcaactgct

SEQ ID NO: 1389 - DNA, 2650 bp, Homo sapiens
  source 1..2650: mol_type = genomic DNA
cgacgccaaggggagggggctgacctgtgcttggtccaccccaggtaggggctgagagaggcttgaggtggaagtgggggtcgggcactctgacctggtcgaggaggggctagggtttgaaccggggacagagtctaggtgagctggggcttgggagctattagcgtagaggatccgggttcggttgctctggcgagggctccagcatcacaggcggcggctgcgggcgcagagcggagatgcagcggcttggggccaccctgctgtgcctgctgctggcggcggcggtccccacggcccccgcgcccgctccgacggcgacctcggctccagtcaagcccggcccggctctcagctacccgcaggaggaggccaccctcaatgagatgttccgcgaggttgaggaactgatggaggacacgcagcacaaattgcgcagcgcggtggaagagatggaggcagaagaagctgctgctaaagcatcatcagaagtgaacctggcaaacttacctcccagctatcacaatgagaccaacacagacacgaaggttggaaataataccatccatgtgcaccgagaaattcacaagataaccaacaaccagactggacaaatggtcttttcagagacagttatcacatctgtgggagacgaagaaggcagaaggagccacgagtgcatcatcgacgaggactgtgggcccagcatgtactgccagtttgccagcttccagtacacctgccagccatgccggggccagaggatgctctgcacccgggacagtgagtgctgtggagaccagctgtgtgtctggggtcactgcaccaaaatggccaccaggggcagcaatgggaccatctgtgacaaccagagggactgccagccggggctgtgctgtgccttccagagaggcctgctgttccctgtgtgcacacccctgcccgtggagggcgagctttgccatgaccccgccagccggcttctggacctcatcacctgggagctagagcctgatggagccttggaccgatgcccttgtgccagtggcctcctctgccagccccacagccacagcctggtgtatgtgtgcaagccgaccttcgtggggagccgtgaccaagatggggagatcctgctgcccagagaggtccccgatgagtatgaagttggcagcttcatggaggaggtgcgccaggagctggaggacctggagaggagcctgactgaagagatggcgctgagggagcctgcggctgccgccgctgcactgctgggaggggaagagatttagatctggaccaggctgtgggtagatgtgcaatagaaatagctaatttatttccccaggtgtgtgctttaggcgtgggctgaccaggcttcttcctacatcttcttcccagtaagtttcccctctggcttgacagcatgaggtgttgtgcatttgttcagctcccccaggctgttctccaggcttcacagtctggtgcttgggagagtcaggcagggttaaactgcaggagcagtttgccacccctgtccagattattggctgctttgcctctaccagttggcagacagccgtttgttctacatggctttgataattgtttgaggggaggagatggaaacaatgtggagtctccctctgattggttttggggaaatgtggagaagagtgccctgctttgcaaacatcaacctggcaaaaatgcaacaaatgaattttccacgcagttctttccatgggcataggtaagctgtgccttcagctgttgcagatgaaatgttctgttcaccctgcattacatgtgtttattcatccagcagtgttgctcagctcctacctctgtgccagggcagcattttcatatccaagatcaattccctctctcagcacagcctggggagggggtcattgttctcctcgtccatcagggatctcagaggctcagagactgcaagctgcttgcccaagtcacacagctagtgaagaccagagcagtttcatctggttgtgactctaagctcagtgctctctccactaccccacaccagccttggtgccaccaaaagtgctccccaaaaggaaggagaatgggatttttcttttgaggcatgcacatctggaattaaggtcaaactaattctcacatccctctaaaagtaaactactgttaggaacagcagtgttctcacagtgtggggcagccgtccttctaatgaagacaatgatattgacactgtccctctttggcagttgcattagtaactttgaaaggtatatgactgagcgtagcatacaggttaacctgcagaaacagtacttaggtaattgtagggcgaggattataaatgaaatttgcaaaatcacttagcagcaactgaagacaattatcaaccacgtggagaaaatcaaaccgagcagggctgtgtgaaacatggttgtaatatgcgactgcgaacactgaactctacgccactccacaaatgatgttttcaggtgtcatggactgttgccaccatgtattcatccagagttcttaaagtttaaagttgcacatgattgtataagcatgctttctttgagttttaaattatgtataaacataagttgcatttagaaatcaagcataaatcacttcaactgct

SEQ ID NO: 1390 - DNA, 1003 bp, Homo sapiens
  source 1..1003: mol_type = genomic DNA
gatgcagcggcttggggccaccctgctgtgcctgctgctggcggcggcggtccccacggcccccgcgcccgctccgacggcgacctcggctccagtcaagcccggcccggctctcagctacccgcaggaggaggccaccctcaatgagatgttccgcgaggttgaggaactgatggaggacacgcagcacaaattgcgcagcgcggtggaagagatggaggcagaagaagctgctgctaaagcatcatcagaagtgaacctggcaaacttacctcccagctatcacaatgagaccaacacagacacgaaggttggaaataataccatccatgtgcaccgagaaattcacaaggagtgcatcatcgacgaggactgtgggcccagcatgtactgccagtttgccagcttccagtacacctgccagccatgccggggccagaggatgctctgcacccgggacagtgagtgctgtggagaccagctgtgtgtctggggtcactgcaccaaaatggccaccaggggcagcaatgggaccatctgtgacaaccagagggactgccagccggggctgtgctgtgccttccagagaggcctgctgttccctgtgtgcacacccctgcccgtggagggcgagctttgccatgaccccgccagccggcttctggacctcatcacctgggagctagagcctgatggagccttggaccgatgcccttgtgccagtggcctcctctgccagccccacagccacagcctggtgtatgtgtgcaagccgaccttcgtggggagccgtgaccaagatggggagatcctgctgcccagagaggtccccgatgagtatgaagttggcagcttcatggaggaggtgcgccaggagctggaggacctggagaggagcctgactgaagagatggcgctgagggagcctgcggctgccgccgctgcactgctgggaggggaagagatttagatctggaccaggctgtgggtagatgtgcaatag

SEQ ID NO: 1391 - DNA, 903 bp, Homo sapiens
  source 1..903: mol_type = genomic DNA
agatccagtccggcccgcagcgcaactcggtccagtcggggtgggtgaggggcggcggcgggggaggggacgactctgctgagctcagcctctcttggtggatgtggggcggggcgctcgagtaggacccgacgccaaggggagggggctgacctgtgcttggtccaccccaggcggcggctgcgggcgcagagcggagatgcagcggcttggggccaccctgctgtgcctgctgctggcggcggcggtccccacggcccccgcgcccgctccgacggcgacctcggctccagtcaagcccggcccggctctcagctacccgcaggaggaggccaccctcaatgagatgttccgcgaggttgaggaactgatggaggacacgcagcacaaattgcgcagcgcggtggaagagatggaggcagaagaagctgctgctaaagcatcatcagaagtgaacctggcaaacttacctcccagctatcacaatgagaccaacacagacacgaaggttggaaataataccatccatgtgcaccgagaaattcacaagataaccaacaaccagactggacaaatggtcttttcagagacagttatcacatctgtgggagacgaagaaggcagaaggagccacgagtgcatcatcgacgaggactgtgggcccagcatgtactgccagtttgccagcttccagtacacctgccagccatgccggggccagaggatgctctgcacccgggacagtgagtgctgtggagaccagctgtgtgtctggggtcactgcaccaaaatggccaccaggggcagcaatgggaccatctgtgacaaccagagggactgccagccggggctgtgctgtgccttccagagaggcctgctgttccctgtgtgcacacccctgcc

SEQ ID NO: 1392 - DNA, 3904 bp, Homo sapiens
  source 1..3904: mol_type = genomic DNA
ctttcactggcaagagacggagtcctgggtttcagttccagttgcctgcggtgggctgtgtgagtttgccaaagtcccctgccctctctgggtctcggttccctcgcctgtccacgtgaggttggaggagctgaacgccgacgtcatttttagctaagagggagcagggtccccgagtcgccggcccagggtctgcgcatccgaggccgcgcgccctttcccctcccccacggctcctccgggccccgcactctgcgccccggctgccgcccagcgccctacaccgccctcagggggccctcgcgggctccccccggccgggatgccagtgccccgcgccacgcgcgcctgctcccgcgccgcctgccctgcagcctgcccgcggcgcctttatacccagcgggctcggcgctcactaatgtttaactcggggccgaaacttgccagcggcgagtgactccaccgcccggagcagcggtgcaggacgcgcgtctccgccgcccgcggtgacttctgcctgcgctccttctctgaacgctcacttccgaggagacgccgacgatgaagacaccgtggaaggttcttctgggactgctgggtgctgctgcgcttgtcaccatcatcaccgtgcccgtggttctgctgaacaaaggcacagatgatgctacagctgacagtcgcaaaacttacactctaactgattacttaaaaaatacttatagactgaagttatactccttaagatggatttcagatcatgaatatctctacaaacaagaaaataatatcttggtattcaatgctgaatatggaaacagctcagttttcttggagaacagtacatttgatgagtttggacattctatcaatgattattcaatatctcctgatgggcagtttattctcttagaatacaactacgtgaagcaatggaggcattcctacacagcttcatatgacatttatgatttaaataaaaggcagctgattacagaagagaggattccaaacaacacacagtgggtcacatggtcaccagtgggtcataaattggcatatgtttggaacaatgacatttatgttaaaattgaaccaaatttaccaagttacagaatcacatggacggggaaagaagatataatatataatggaataactgactgggtttatgaagaggaagtcttcagtgcctactctgctctgtggtggtctccaaacggcacttttttagcatatgcccaatttaacgacacagaagtcccacttattgaatactccttctactctgatgagtcactgcagtacccaaagactgtacgggttccatatccaaaggcaggagctgtgaatccaactgtaaagttctttgttgtaaatacagactctctcagctcagtcaccaatgcaacttccatacaaatcactgctcctgcttctatgttgataggggatcactacttgtgtgatgtgacatgggcaacacaagaaagaatttctttgcagtggctcaggaggattcagaactattcggtcatggatatttgtgactatgatgaatccagtggaagatggaactgcttagtggcacggcaacacattgaaatgagtactactggctgggttggaagatttaggccttcagaacctcattttacccttgatggtaatagcttctacaagatcatcagcaatgaagaaggttacagacacatttgctatttccaaatagataaaaaagactgcacatttattacaaaaggcacctgggaagtcatcgggatagaagctctaaccagtgattatctatactacattagtaatgaatataaaggaatgccaggaggaaggaatctttataaaatccaacttagtgactatacaaaagtgacatgcctcagttgtgagctgaatccggaaaggtgtcagtactattctgtgtcattcagtaaagaggcgaagtattatcagctgagatgttccggtcctggtctgcccctctatactctacacagcagcgtgaatgataaagggctgagagtcctggaagacaattcagctttggataaaatgctgcagaatgtccagatgccctccaaaaaactggacttcattattttgaatgaaacaaaattttggtatcagatgatcttgcctcctcattttgataaatccaagaaatatcctctactattagatgtgtatgcaggcccatgtagtcaaaaagcagacactgtcttcagactgaactgggccacttaccttgcaagcacagaaaacattatagtagctagctttgatggcagaggaagtggttaccaaggagataagatcatgcatgcaatcaacagaagactgggaacatttgaagttgaagatcaaattgaagcagccagacaattttcaaaaatgggatttgtggacaacaaacgaattgcaatttggggctggtcatatggagggtacgtaacctcaatggtcctgggatcgggaagtggcgtgttcaagtgtggaatagccgtggcgcctgtatcccggtgggagtactatgactcagtgtacacagaacgttacatgggtctcccaactccagaagacaaccttgaccattacagaaattcaacagtcatgagcagagctgaaaattttaaacaagttgagtacctccttattcatggaacagcagatgataacgttcactttcagcagtcagctcagatctccaaagccctggtcgatgttggagtggatttccaggcaatgtggtatactgatgaagaccatggaatagctagcagcacagcacaccaacatatatatacccacatgagccacttcataaaacaatgtttctctttaccttagcacctcaaaataccatgccatttaaagcttattaaaactcatttttgttttcattatctcaaaactgcactgtcaagatgatgatgatctttaaaatacacactcaaatcaagaaacttaaggttacctttgttcccaaatttcatacctatcatcttaagtagggacttctgtcttcacaacagattattaccttacagaagtttgaattatccggtcgggttttattgtttaaaatcatttctgcatcagctgctgaaacaacaaataggaattgtttttatggaggctttgcatagattccctgagcaggattttaatctttttctaactggactggttcaaatgttgttctcttctttaaagggatggcaagatgtgggcagtgatgtcactagggcagggacaggataagagggattagggagagaagatagcagggcatggctgggaacccaagtccaagcataccaacacgagcaggctactgtcagctcccctcggagaagagctgttcacagccagactggcacagttttctgagaaagactattcaaacagtctcaggaaatcaaatatgcaaagcactgacttctaagtaaaaccacagcagttgaaaagactccaaagaaatgtaagggaaactgccagcaacgcaggcccccaggtgccagttatggctataggtgctacaaaaacacagcaagggtgatgggaaagcattgtaaatgtgcttttaaaaaaaaatactgatgttcctagtgaaagaggcagcttgaaactgagatgtgaacacatcagcttgccctgttaaaagatgaaaatatttgtatcacaaatcttaacttgaaggagtccttgcatcaatttttcttatttcatttctttgagtgtcttaattaaaagaatattttaacttccttggactcattttaaaaaatggaacataaaatacaatgttatgtattattattcccattctacatactatggaatttctcccagtcatttaataaatgtgccttcattttttcagaagtaa

SEQ ID NO: 1393 - DNA, 2371 bp, Homo sapiens
  source 1..2371: mol_type = genomic DNA
gcccctcgtcgccctctgtaggcctgctccctccccgcccttccaccctcaccctgcgccccgccccggccccttggtcctcgccccgccctcctcgtttggcgccaaaccctgtggtcaacggcgcgcgggtctccaggctccgtgttctaggcccgagttagaatcctgtcagctgaggaggtcgggcggggcagaggggcttcaccttgaaaatctcggggagactgtgggtacgagggggaagtgattatttttctgttgcccacttttcaatatgaaggaggatcaagttgtggcggaagaaccaggattccaagatgaagaggaatctttgtttcaagatattgacctgttacagaaacatggaattaacgtggctgacattaagaaactgaaatcagtaggaatctgtaccatcaaaggtatacagatgacaacaagaagagctctatgcaatgtcaaaggactctcagaagccaaagtagacaagattaaagaggcagcgaacaaactaattgaaccaggattcttgactgcatttgagtatagtgaaaagaggaaaatggttttccatatcaccaccgggagccaggaatttgataagttactaggaggtggaattgaaagtatggcaattacagaagcttttggagaatttcgtactggaaaaacccagctttctcataccctctgtgtgacagctcaacttccaggagctggtggctacccaggaggaaagattatcttcattgatacagaaaatactttccgtccagatcgccttagggacattgctgatcgctttaatgtagaccatgatgcagtactggacaacgtactttatgcacgtgcatatactagtgaacatcagatggagctacttgattatgtagcagcaaagttccatgaagaagctggcatcttcaagctattgattatcgattcaataatggcactttttcgagtggatttcagtggccgtggggagttggccgaacggcagcaaaaattggcccagatgttgtcacgactccaaaaaatctcagaagaatataacgtggctgtttttgtgaccaatcaaatgactgccgatccaggagcaactatgacctttcaggcagatcccaaaaaacccattgggggacacattctggctcatgcttcaacaacaagaataagcttgcgaaagggaagaggagagctcagaattgccaagatttatgacagtcctgagatgcctgaaaatgaagccaccttcgcaataactgctggaggaattggggatgccaaggagtaggtggtgaattgatgcaaattgcttcttagtgcttattaggagctgaagaaatggaaaagcagtctccaatttcacatcttgaaatagaggttttttcccacatgttactaaagaaaagtcagcaaagagatttaaatcttatatttatcttaaaagtccctgatttatgataactatacattgtatgtaaattcagggatatgtatatgtatgtttgtgtgtgtgtgtgtttgtgtgtgtatacctgacatatatagtagatatatatacctattgaaattctctcactctgtgtatgtatatatacctatggaaaactagttgttgggaaaggagtacgtgattccctccctttcacttttcaaagtgagccactaaacagaaagtctaagagttcagaaatgtcccattctcctaaggactttcccttcaccatttttctagggtatagtgccactgacttacatagctagatgtttttccacaagaggatttaagggaggaatgtttataggacacacacacaaaagctctttctatttataatatcaaactgcatattcacctttatagcaacagaaaacagacattaaattaagccaaattttaaatcatttgactttgacaagcagaaattacttttaaaaaatgtatttatggctgggcgtggtggctcacacctgtaatcccagcactttgggaggccgaggcaggtggatcacttgaggtcaggagttcaagaccagcctggccaacatggagaaaccccatctctactaaaaatacaaaaattagccaagtgcagtggcatgtgcttgtaatcccagctactctggaggctgaggcaggagaattgcttgaacccaggaggcagagattgcggtgagccaagatggcaccactgcactccagcctaggtgacagagtgagactccgtctcaaaaaaaaaaaaaaaacttttttaaaatgttaaaattaatttaaatgtaaaatttctgaatactaatcttagaaatgtgtaaaagatattattttgattgttaaacaaataaaatcctgttttcaaaatgc

SEQ ID NO: 1394 - DNA, 1595 bp, Homo sapiens
  source 1..1595: mol_type = genomic DNA
cgccaaaccctgtggtcaacggcgcgcgggtctccaggctccgtgttctaggcccgagttagaatcctgtcagctgaggaggtcgggcggggcagaggggcttcaccttgaaaatctcggggagactgtgggtacgagggggaagtgattatttttctgttgcccacttttcaatatgaaggaggatcaagttgtggcggaagaaccaggattccaagatgaagaggaatctttgtttcaagatattgacctgttacagaaacatggaattaacgtggctgacattaagaaactgaaatcagtaggaatctgtaccatcaaaggtatacagatgacaacaagaagagctctatgcaatgtcaaaggactctcagaagccaaagtagacaagattaaagaggcagcgaacaaactaattgaaccaggattcttgactgcatttgagtatagtgaaaagaggaaaatggttttccatatcaccaccgggagccaggaatttgataagttactaggaggtggaattgaaagtatggcaattacagaagcttttggagaatttcgtactggaaaaacccagctttctcataccctctgtgtgacagctcaacttccaggagctggtggctacccaggaggaaagattatcttcattgatacagaaaatactttgtaacctttttatttaaagttgctaacataatagtgtgatataggaatgttaccactgaagagtttgtctgagatatacaatctttgtagtcattccataaaccagtagtaatgagacaaaccaaagggaaaacaattactgtttaagttctccaatcactttgtatttaatgaggtttcacttcttcatatgggtttatgagacaaaacaaatacatgagaggaaattatatcatcatttttaatcctcttacttctctaaagatgttgcttaatagttagaaaaaagatttttttttttttgagacggaatctccctgttgcccaggctggagtccagtggggcaatctcggctcactgcaacctccatctcttgggttcaatcaattctcctgcctcagcctaccgagtagctgggattacaggtgtgtgccaccacacctggctaatttttttgtatttttagtagagacagggttttgacatgttgaccaggctgttctggaactcctgacctcaggtgatccacctgcctcagcctcccacagtgctaggattacaggcgtgagccacgatgcccggcctgcaatttggattttactaagaacaataggaatacttaggagctaagtcatatgcaagagagagtggagaagaacagctgggtgggggtgcagggcactgtggcaagggccacattggagtgttctcattctttccgtgtctcatacttatactgctgtctcttgatagttttctttttatatgtttatattttgcctccttaattatgttttaaatttacctagggcataggttgtcttaggactccttatatcctccataatgctttgccttggtaattgattaatatggtaattaattccatatggtaattggttaataaatatttataattgatctg

SEQ ID NO: 1395 - DNA, 569 bp, Homo sapiens
  source 1..569: mol_type = genomic DNA
ctcatctttccaagctaaatgcttctcttactgtccttctagtccttgttgactttgaaatgaaatcagaggcccctggacaaaggactacttcttacataatatttcttattttcccagaagtgattatttttctgttgcccacttttcaatatgaaggaggatcaagttgtggcggaagaaccaggattccaagatgaagaggaatctttgtttcaagatattgacctgttacagaaacatggaattaacgtggctgacattaagaaactgaaatcagtaggaatctgtaccatcaaaggtatacagatgacaacaagaagagctctatgcaatgtcaaaggactctcagaagccaaagtagacaagattaaagaggcagcgaacaaactaattgaaccaggattcttgactgcatttgagtatagtgaaaagaggaaaatggttttccatatcaccaccgggagccaggaatttgataagttactaggaggtggaattgaaagtatggcaattacagaagcttttggagaatttcgtactggaaaaacccagctttctcataccct

SEQ ID NO: 1396 - DNA, 1056 bp, Homo sapiens
  source 1..1056: mol_type = genomic DNA
ctcatctttccaagctaaatgcttctcttactgtccttctagtccttgttgactttgaaatgaaatcagaggcccctggacaaaggactacttcttacataatatttcttattttcccagaagtgattatttttctgttgcccacttttcaatatgaaggaggatcaagttgtggcggaagaaccaggattccaagatgaagaggaatctttgtttcaagatattgacctgttacagaaacatggaattaacgtggctgacattaagaaactgaaatcagtaggaatctgtaccatcaaaggtatacagatgacaacaagaagagctctatgcaatgtcaaaggactctcagaagccaaagtagacaagattaaagaggcagcgaacaaactaattgaaccaggattcttgactgcatttgagtatagtgaaaagaggaaaatggttttccatatcaccaccgggagccaggaatttgataagttactaggaggtggaattgaaagtatggcaattacagaagcttttggagaatttcgtactggaaaaacccagctttctcataccctctgtggtgaacatcagatggagctacttgattatgtagcagcaaagttccatgaagaagctggcatcttcaagctattgattatcgattcaataatggcactttttcgagtggatttcagtggccgtggggagttggccgaacggcagcaaaaattggcccagatgttgtcacgactccaaaaaatctcagaagaatataacgtggctgtttttgtgaccaatcaaatgactgccgatccaggagcaactatgacctttcaggcagatcccaaaaaacccattgggggacacattctggctcatgcttcaacaacaagaataagcttgcgaaagggaagaggagagctcagaattgccaagatttatgacagtcctgagatgcctgaaaatgaagccaccttcgcaataactgctggaggaattggggatgccaaggagtaggtggtgaattgatgcaaattgcttcttagtgcttattaggagctg

SEQ ID NO: 1397 - DNA, 721 bp, Homo sapiens
  source 1..721: mol_type = genomic DNA
ccgagttagaatcctgtcagctgaggaggtcgggcggggcagaggggcttcaccttgaaaatctcggggagactgtggaagtgattatttttctgttgcccacttttcaatatgaaggaggatcaagttgtggcggaagaaccaggattccaagatgaagaggaatctttgtttcaagatattgacctgttacagaaacatggaattaacgtggctgacattaagaaactgaaatcagtaggaatctgtaccatcaaaggtatacagatgacaacaagaagagctctatgcaatgtcaaaggactctcagaagccaaagtagacaagattaaagaggcagcgaacaaactaattgaaccaggattcttgactgcatttgagtatagtgaaaagaggaaaatggttttccatatcaccaccgggagccaggaatttgataagttactaggaggtggaattgaaagtatggcaattacagaagcttttggagaatttcgtactggaaaaacccagctttctcataccctctgtggtgaacatcagatggagctacttgattatgtagcagcaaagttccatgaagaagctggcatcttcaagctattgattatcgattcaataatggcactttttcgagtggatttcagtggccgtggggagttggccgaacggcagcaaaaattggcccagatgttgtcacgactccaaaaaatctcagaag

SEQ ID NO: 1398 - DNA, 3940 bp, Homo sapiens
  source 1..3940: mol_type = genomic DNA
accaaacagaagaccgctgccggtctccccgcgagcgagcgctaagcgtagtcccgactccgaccttaggatgcccttcccccaacctctcactctccaggcgcagctgcgcggctccctctggtggagctgcggcgggcaatcggaaatcggctactttggcctgtctcctccctgcagcgcgcgctttgagtgcccggctcggcctccgctcccgcgcggttgggagtgtccagcgccctccgcgatttgggctccagcgggcagggtgacttcctttttctgcccactctggtaacttattgctctgctgggctctttcccttagggtctctggccctgttcttgccccagcatgacttttatcgggacgccgttgtggaagcctcacgcaggagccctgcccccgtggagaagatcccactggtgactccaaccctaccaccatgaatggggtcctgatcccccatacgcccatcgcagtggacttctggagcctgcgccgggctggcaccgcacgtctcttcttcttgtctcacatgcactcggaccacaccgtgggcctgtctagcacctgggcccggcccctctactgctccccaattacagcccacctcttgcatcgtcacctacaggtatctaagcaatggatccaagccctggaggttggtgagagccatgtattacccctagatgaaattggacaagagaccatgaccgtaaccctcctcgatgccaatcactgtcctggttctgtcatgtttctctttgaaggatattttggaaccatcctctacacaggtgattttcgatacacaccatccatgctaaaggagccagccctgacactggggaaacagatccatactttatacctagacaacaccaattgcaatccagccctggttcttccttcccgacaagaagctgcccaccagattgtccagctcattcgaaaacacccacaacataacataaagattggactctacagcctgggaaaggaatcactgctggagcagctggccctggagtttcagacctgggtggtattgagtcctcggcgcctggagttggtacagctactgggcctggcagatgtgttcacagtggaggagaaggctggccgcatccatgcagtagaccatatggagatctgccattccaacatgctgcgttggaaccagacccaccctacgattgctatccttcccacaagccgaaaaatccacagctcccaccctgatatccacgtcatcccttactctgaccattcctcttactccgagcttcgtgcctttgtcgcagcactgaagccttgccaggtggtgcccattgtaagtcggcggccctgtggaggctttcaggacagtctgagccccaggatctccgtgcccctgattccggactctgtacagcaatacatgagttcttcctctagaaaaccaagccttctctggctgttagaaaggaggctaaagaggccgagaacccaaggtgttgtgtttgaatcccctgaggaaagtgctgatcaatctcaagctgacagagactcaaagaaggccaagaaagagaaactttctccctggcctgcggaccttgaaaagcagccttcccaccatcctttgcggatcaagaagcagttgttcccagatctctatagcaaagaatggaacaaggcagtgcctttctgtgagtctcaaaagagggtgactatgttgacggccccactgggattttcagtgcacttaaggtctacagatgaggagtttatttctcaaaaaaccagggaggaaattggtttagggtcccccttggtacccatgggagatgatgatggaggtccagaagccacagggaatcagagtgcctggatgggccatggttctcccctgtcccacagcagcaagggcacccctcttctagctactgaattcaggggtctagcactcaaatatcttctgactccagtgaactttttccaggcagggtattcttccaggagatttgaccagcaagtggaaaaataccataaaccctgctgaagacaggagagtacagaatgacaacattgagcccacactgcagttttgaagatagtaactgatggctggtgggaaagagtttgtttttggggcctacttttctatctttacaagactcttatgggcccaccgtggagcagcacttcccaaaacttgttcactggggtcctcgtgcctatggaatccttctttttataactaagtttaagaaatactttttttataaaatctttggagtatgcgtgagcaaattaaaagttctttgaagtcctacagtaacttaatctgtttaaccttgtttaacccagtatttctcaaacttttgtgaacatgcaatcatcttatgtgggtacagaaagaggtaaagagtctgaatcaaaaaggaccaggttattgctgttgctgttttgtggtgtcatgagccattctccatgtccccttctccctcttctcagatcaaaatccctagggagttctatttttaaaattatgaactatggcgctgcatgcttcaatcctgaacgtcactgacttgctgtgaccatccaaataattttcctgtctctgcctctgggagggaacaggaagcgatgaagaggtcttggaacagtagtgaaaattctacctctatgtccttcatgaggatgtgcagtatcccagtatcactgggatccatgtggaacagagccagctggggggttgggcagctctctccaaggcagtacctagagcccagctgaacaacaaggctttgggtgtgaagggactccccagcctggagaccctatttggctgaaacagttacaaaatatcaaatgtgttgtcagatattcctccaattgttcacatagctgggatatttgttgctcccctcaccccttggattatgtagggagccagtgcacacagcctgtttgttttagtatccaaggaagagaccaaggagccagctggcgggaaggggtgggggtgtgcagtctgccctgtccttctgctcataacctgacaaaatgccaaactagtaagcaggatagctgataccacggctatgagggagtaggctctgagagggcacagacttgtggagctgggcgtctggatcaaaactgctttgggatggaacctcgagccctagcagtgaagaagattccatttcttgtccaggggatttaaaagagttttctgctttgagagagaaatagagagtttagaaagcaattgctcttgggaaagctatacacagctctgttttgtcaatgacctttgttgtaagtctcccaacgtcctattaggagccacagcaggtgaggcatttggtgcagcaggaaacatggggactgcctaggctcgaatctgtggcaccctgagcaattacttaaattgtggagcctagttcctcatctgtaagatggacttgagattcctacctctcatgattactatggagattgaataattggtaaaattctcctagctcagtgactgccacaggatgggtctttcagattttggttctctttagcttctggttcttgaaagaaattaatctgtatataacataagaaactttgaaagtcaaaaaaacaaaaaattttaattcctcgtagattaattgatttgctatcttttagtttttttttctatgcatgtagatgtattaaatatgtaaatgtttttcaaagttgaggtaatattgtatagaattttatagcctacattttaatttcttgatatcttaagcatttcacttattagatattgttcaaaaatgccatttttaatatttgtataataccctatcatgtgagtataccttaactaagccattcccatattcaacattttgtgtactgtttttctaattacatatattacaatgaacaaccttatgcata

SEQ ID NO: 1399 - DNA, 2228 bp, Homo sapiens
  source 1..2228: mol_type = genomic DNA
ggcttcagctgcggttttggggtcccggactctgggatcggcggcgctatgagttctttcgaggggcagatggccgagtatccaactatctccatagaccgcttcgatagggagaacctgagggcccgcgcctacttcctgtcccactgccacaaagatcacatgaaaggattaagagcccctaccttgaaaagaaggttggagtgcagatatctattgaaatcgagactcctacccagatatctttagtggatgaagcatcaggagaggtttttatttcagggcaataatggaactgtcctgtacacaggagacttcagattggcgcaaggagaagctgctagaatggagcttctgcactccgggggcagagtcaaagacatccaaagtgtatatttggatactacgttctgtgatccaagattttaccaaattccaagtcgggaggagtgtttaagtggagtcttagagctggtccgaagctggatcactcggagcccgtaccatgttgtgtggctgaactgcaaagcggcttatggctatgaatatctgttcaccaaccttagtgaagaattaggagtccaggttcatgtgaataagctagacatgtttaggaacatgcctgagatccttcatcatctcacaacagaccgcaacactcagatccatgcatgccggcatcccaaggcagaggaatattttcagtggagcaaattaccctgtggaattacttccagaaatagaattccactccacataatcagcattaagccatccaccatgtggtttggagaaaggagcagaaaaacaaatgtaattgtgaggactggagagagttcatacagagcttgtttttcttttcactcctcctacagtgagattaaagatttcttgagctacctctgtcctgtgaacgcatatccaaatgtcattccagttggcacaactatggataaagttgtcgaaatcttaaagcctttatgccggtcttcccaaagtacggagccaaagtataaaccactgggaaaactgaagagagctagaacagttcaccgagactcagaggaggaagatgactatctctttgatgatcctctgccaatacctttaaggcacaaagttccatacccggaaacttttcaccctgaggtattttcaatgactgcagtatcagaaaagcagcctgaaaaactgagacaaaccccaggatgctgcagagcagagtgtatgcagagctctcgtttcacaaactttgtagattgtgaagaatccaacagtgaaagtgaagaagaagtaggaatcccagcttcactgcaaggagatctgggctctgtacttcacctgcaaaaggctgatggggatgtaccccagtgggaagtattctttaaaagaaatgatgaaatcacagatgagagtttggaaaacttcccttcctccacagtggcagggggatctcagtcaccaaagcttttcagtgactctgatggagaatcaactcacatctcctcccagaattcttcccagtcaacacacataacagaacaaggaagtcaaggctgggacagccaatctgatactgttttgttatcttcccaagagagaaacagtggggatattacttccttggacaaagctgactacagaccaacaatcaaagagaatattcctgcctctctcatggaacaaaatgtaatttgcccaaaggatacttactctgatttgaaaagcagagataaagatgtgacaatagttcctagtactggagaaccaactactctaagcagtgagacacatatacccgaggaaaaaagtttgctaaatcttagcacaaatgcagattcccagagctcttctgattttgaagttccctcaactccagaagctgagttacctaaacgagagcatttacaatatttatatgagaagctggcaactggtgagagtatagcagtcaaaaaaagaaaatgctcactcttagatacctaagaattcaaagcgtttcaacctagagcaaccactaaaaaacctgcacagagatgacagtcaatattacaatagagaaaatacagtacttaaaaatgttcaaataacctggttgggtgtggtggctcacacttgtaatcccagcactttgaggtgggcaatggcttgagcccaggagttcgacaccagcctggccaacacagtgaaatgtgtctctacttacaaaaaaaaaaaaaaaaaaaaaa

SEQ ID NO: 1400 - DNA, 833 bp, Homo sapiens
  source 1..833: mol_type = genomic DNA
gcggcgctatgagttctttcgaggggcagatggccgagtatccaactatctccatagaccgcttcgatagggagaacctgagggcccgcgcctacttcctgtcccactgccacaaagatcacatgaaaggattaagagcccctaccttgaaaagaaggttggagtgcagatgaggaaactgaggaaccagagaggttaaattagttgcccagtgtcacacagccagtaagtggcaggaccaggattccagccagcttgaaggtttatctatactgttcacctgtgactaaggagttgttgttaacgagcccgaaatacagattttggaagaaacgaatttgctggtctcccgctttggctctgaagcacatgcacctgccccaggactcggaggagctgcacacgggcacccagcagaagctgatgttgctgcggccctgccccagactctgagttaagccagaagatatctattgaaatcgagactcctacccagatatctttagtggatgaagcatcaggagagaaggaagagattgttgtgactctcttaccagctggtcactgtccgggatcagttatgtttttatttcagggcaataatggaactgtcctgtacacaggagacttcagattggcgcaaggagaagctgctagaatggagcttctgcactccgggggcagagtcaaagacatccaaagtgtatatttggatactacgttctgtgatccaagattttaccaaattccaagtcgggaggagtgtttaagtggagtcttagagctggtccgaagctggatcactcggagcccgtaccatgttgtgtggctga

SEQ ID NO: 1401 - DNA, 1933 bp, Homo sapiens
  source 1..1933: mol_type = genomic DNA
aggagtaaataagtgcaattcttttgttgttcttttttggagatgaggtgtctctgtgttgcccaggctggcctcaaatccctgggcttaagcaatcctcctgcctcagccttgagtagctgggatcacagacatgtaccactgtgcccagctaagaaatgcaattctgagaccttgggtttttgtgtatattatagttaatgcccagctaaattctaacttatttgaaaagggatttgttaaacataagcaactgaccttcttggacaaggaaagcaatatattaaaaaagagaaaaaaaaaagaatctttgagtcccattggtgattctcagctcttactgtggatcagaatcacctggggaatatttaaatgtactgatttctaggcccactagtactcagtgttcaggagatctttgggagtgaggcccaggcattggatatttttttcccaagaggtccctggtgatccccacgtgcagccagcattgagaaccacagccataagagagttctgcttctctttccccagcctccctttatctcccctaacaacctgtttcatcgtagagattgttgatccatgtgattttcctttttctagattaaagatttcttgagctacctctgtcctgtgaacgcatatccaaatgtcattccagttggcacaactatggataaagttgtcgaaatcttaaagcctttatgccggtcttcccaaagtacggagccaaagtataaaccactgggaaaactgaagagagctagaacagttcaccgagactcagaggaggaagatgactatctctttgatgatcctctgccaatacctttaaggcacaaagttccatacccggaaacttttcaccctgaggtattttcaatgactgcagtatcagaaaagcagcctgaaaaactgagacaaaccccaggatgctgcagagcagagtgtatgcagagctctcgtttcacaaactttgtagattgtgaagaatccaacagtgaaagtgaagaagaagtaggaatcccagcttcactgcaaggagatctgggctctgtacttcacctgcaaaaggctgatggggatgtaccccagtgggaagtattctttaaaagaaatgatgaaatcacagatgagagtttggaaaacttcccttcctccacagtggcagggggatctcagtcaccaaagcttttcagtgactctgatggagaatcaactcacatctcctcccagaattcttcccagtcaacacacataacagaacaaggaagtcaaggctgggacagccaatctgatactgttttgttatcttcccaagagagaaacagtggggatattacttccttggacaaagctgactacagaccaacaatcaaagagaatattcctgcctctctcatggaacaaaatgtaatttgcccaaaggatacttactctgatttgaaaagcagagataaagatgtgacaatagttcctagtactggagaaccaactactctaagcagtgagacacatatacccgaggaaaaaagtttgctaaatcttagcacaaatgcagattcccagagctcttctgattttgaagttccctcaactccagaagctgagttacctaaacgagagcatttacaatatttatatgagaagctggcaactggtgagagtatagcagtcaaaaaaagaaaatgctcactcttagatacctaagaattcaaagcgtttcaacctagagcaaccactaaaaaacctgcacagagatgacagtcaatattacaatagagaaaatacagtacttaaaaatgttcaaataacctggttgggtgtggtggctcacacttgtaatcccagcactttgaggtgggcaatggcttgagcccaggagttcgacaccagcctggccaacacagtgaaatgtgtctctacttac

SEQ ID NO: 1402 - DNA, 2637 bp, Homo sapiens
  source 1..2637: mol_type = genomic DNA
gcttcccggaagtggcggcgcggtcagggctggccttggcttcagctgcggttttggggtcccggactctgggatcggcggcgctatgagttctttcgaggggcagatggccgagtatccaactatctccatagaccgcttcgatagggagaacctgagggcccgcgcctacttcctgtcccactgccacaaagatcacatgaaaggattaagagcccctaccttgaaaagaaggttggagtgcagcttgaaggtttatctatactgttcacctgtgactaaggagttgttgttaacgagcccgaaatacagattttggaagaaacgaattatatctattgaaatcgagactcctacccagatatctttagtggatgaagcatcaggagaggtttttatttcagggcaataatggaactgtcctgtacacaggagacttcagattggcgcaaggagaagctgctagaatggagcttctgcactccgggggcagagtcaaagacatccaaagtgtatatttggatactacgttctgtgatccaagattttaccaaattccaagtcgggaggagtgtttaagtggagtcttagagctggtccgaagctggatcactcggagcccgtaccatgttgtgtggctgaactgcaaagcggcttatggctatgaatatctgttcaccaaccttagtgaagaattaggagtccaggttcatgtgaataagctagacatgtttaggaacatgcctgagatccttcatcatctcacaacagaccgcaacactcagatccatgcatgccggcatcccaaggcagaggaatattttcagtggagcaaattaccctgtggaattacttccagaaatagaattccactccacataatcagcattaagccatccaccatgtggtttggagaaaggagcagaaaaacaaatgtaattgtgaggactggagagagttcatacagagcttgtttttcttttcactcctcctacagtgagattaaagatttcttgagctacctctgtcctgtgaacgcatatccaaatgtcattccagttggcacaactatggataaagttgtcgaaatcttaaagcctttatgccggtcttcccaaagtacggagccaaagtataaaccactgggaaaactgaagagagctagaacagttcaccgagactcagaggaggaagatgactatctctttgatgatcctctgccaatacctttaaggcacaaagttccatacccggaaacttttcaccctgaggtattttcaatgactgcagtatcagaaaagcagcctgaaaaactgagacaaaccccaggatgctgcagagcagagtgtatgcagagctctcgtttcacaaactttgtagattgtgaagaatccaacagtgaaagtgaagaagaagtaggaatcccagcttcactgcaaggagatctgggctctgtacttcacctgcaaaaggctgatggggatgtaccccagtgggaagtattctttaaaagaaatgatgaaatcacagatgagagtttggaaaacttcccttcctccacagtggcagggggatctcagtcaccaaagcttttcagtgactctgatggagaatcaactcacatctcctcccagaattcttcccagtcaacacacataacagaacaaggaagtcaaggctgggacagccaatctgatactgttttgttatcttcccaagagagaaacagtggggatattacttccttggacaaagctgactacagaccaacaatcaaagagaatattcctgcctctctcatggaacaaaatgtaatttgcccaaaggatacttactctgatttgaaaagcagagataaagatgtgacaatagttcctagtactggagaaccaactactctaagcagtgagacacatatacccgaggaaaaaagtttgctaaatcttagcacaaatgcagattcccagagctcttctgattttgaagttccctcaactccagaagctgagttacctaaacgagagcatttacaatatttatatgagaagctggcaactggtgagagtatagcagtcaaaaaaagaaaatgctcactcttagatacctaagaattcaaagcgtttcaacctagagcaaccactaaaaaacctgcacagagatgacagtcaatattacaatagagaaaatacagtacttaaaaatgttcaaataacctggttgggtgtggtggctcacacttgtaatcccagcactttgaggtgggcaatggcttgagcccaggagttcgacaccagcctggccaacacagtgaaatgtgtctctacttacaaaaaaaaaaaaaaaaaaaaaagccaggcatggtggtgggctactctggaggcccttgaggatcacttgagcccaggagattgaggctgcagtgagccatgactgtgccactgcacctctagtctgggtgacagagcaagaccctgtttaaaaaagaaaaaggccaggcacggtggctcatgcctgtaatcccagctacgcaggaggccaaggcaggagaatcacttgaacctgggaggtggtggttgcagtgagctgagattgtgtcattgcactccagcctgggcaacaagagcaaaactctgtctc

SEQ ID NO: 1403 - DNA, 2246 bp, Homo sapiens
  source 1..2246: mol_type = genomic DNA
gcggttttggggtcccggactctgggatcggcggcgctatgagttctttcgaggggcagatggccgagtatccaactatctccatagaccgcttcgatagggagaacctgagggcccgcgcctacttcctgtcccactgccacaaagcttgaaggtttatctatactgttcacctgtgactaaggagttgttgttaacgagcccgaaatacagattttggaagaaacgaattatatctattgaaatcgagactcctacccagatatctttagtggatgaagcatcaggagaggtttttatttcagggcaataatggaactgtcctgtacacaggagacttcagattggcgcaaggagaagctgctagaatggagcttctgcactccgggggcagagtcaaagacatccaaagtgtatatttggatactacgttctgtgatccaagattttaccaaattccaagtcgggaggagtgtttaagtggagtcttagagctggtccgaagctggatcactcggagcccgtaccatgttgtgtggctgaactgcaaagcggcttatggctatgaatatctgttcaccaaccttagtgaagaattaggagtccaggttcatgtgaataagctagacatgtttaggaacatgcctgagatccttcatcatctcacaacagaccgcaacactcagatccatgcatgccggcatcccaaggcagaggaatattttcagtggagcaaattaccctgtggaattacttccagaaatagaattccactccacataatcagcattaagccatccaccatgtggtttggagaaaggagcagaaaaacaaatgtaattgtgaggactggagagagttcatacagagcttgtttttcttttcactcctcctacagtgagattaaagatttcttgagctacctctgtcctgtgaacgcatatccaaatgtcattccagttggcacaactatggataaagttgtcgaaatcttaaagcctttatgccggtcttcccaaagtacggagccaaagtataaaccactgggaaaactgaagagagctagaacagttcaccgagactcagaggaggaagatgactatctctttgatgatcctctgccaatacctttaaggcacaaagttccatacccggaaacttttcaccctgaggtattttcaatgactgcagtatcagaaaagcagcctgaaaaactgagacaaaccccaggatgctgcagagcagagtgtatgcagagctctcgtttcacaaactttgtagattgtgaagaatccaacagtgaaagtgaagaagaagtaggaatcccagcttcactgcaaggagatctgggctctgtacttcacctgcaaaaggctgatggggatgtaccccagtgggaagtattctttaaaagaaatgatgaaatcacagatgagagtttggaaaacttcccttcctccacagtggcagggggatctcagtcaccaaagcttttcagtgactctgatggagaatcaactcacatctcctcccagaattcttcccagtcaacacacataacagaacaaggaagtcaaggctgggacagccaatctgatactgttttgttatcttcccaagagagaaacagtggggatattacttccttggacaaagctgactacagaccaacaatcaaagagaatattcctgcctctctcatggaacaaaatgtaatttgcccaaaggatacttactctgatttgaaaagcagagataaagatgtgacaatagttcctagtactggagaaccaactactctaagcagtgagacacatatacccgaggaaaaaagtttgctaaatcttagcacaaatgcagattcccagagctcttctgattttgaagttccctcaactccagaagctgagttacctaaacgagagcatttacaatatttatatgagaagctggcaactggtgagagtatagcagtcaaaaaaagaaaatgctcactcttagatacctaagaattcaaagcgtttcaacctagagcaaccactaaaaaacctgcacagagatgacagtcaatattacaatagagaaaatacagtacttaaaaatgttcaaataacctggttgggtgtggtggctcacacttgtaatcccagcactttgaggtgggcaatggcttgagcccaggagttcgacaccagcctggccaacacagtgaaatgtgtctctacttacaaaaaaaaaaaaaaaaa

SEQ ID NO: 1404 - DNA, 2485 bp, Homo sapiens
  source 1..2485: mol_type = genomic DNA
gcggttttggggtcccggactctgggatcggcggcgctatgagttctttcgaggggcagatggccgagtatccaactatctccatagaccgcttcgatagggagaacctgagggcccgcgcctacttcctgtcccactgccacaaagatcacatgaaaggattaagagcccctaccttgaaaagaaggttggagtgcagacacacctgatcacatacaagcgcgtatttccaagtaacaatggtgagggaccactgttggaggaggtccagggacaccgtgtttccacccccaccttgtgctcttggtggcactgaaatggtgtgcatagcttgaaggtttatctatactgttcacctgtgactaaggagttgttgttaacgagcccgaaatacagattttggaagaaacgaattatatctattgaaatcgagactcctacccagatatctttagtggatgaagcatcaggagagaaggaagagattgttgtgactctcttaccagctggtcactgtccgggatcagttatgtttttatttcagggcaataatggaactgtcctgtacacaggagacttcagattggcgcaaggagaagctgctagaatggagcttctgcactccgggggcagagtcaaagacatccaaagtgtatatttggatactacgttctgtgatccaagattttaccaaattccaagtcgggaggagtgtttaagtggagtcttagagctggtccgaagctggatcactcggagcccgtaccatgttgtgtggctgaactgcaaagcggcttatggctatgaatatctgttcaccaaccttagtgaagaattaggagtccaggttcatgtgaataagctagacatgtttaggaacatgcctgagatccttcatcatctcacaacagaccgcaacactcagatccatgcatgccggcatcccaaggcagaggaatattttcagtggagcaaattaccctgtggaattacttccagaaatagaattccactccacataatcagcattaagccatccaccatgtggtttggagaaaggagcagaaaaacaaatgtaattgtgaggactggagagagttcatacagagcttgtttttcttttcactcctcctacagtgagattaaagatttcttgagctacctctgtcctgtgaacgcatatccaaatgtcattccagttggcacaactatggataaagttgtcgaaatcttaaagcctttatgccggtcttcccaaagtacggagccaaagtataaaccactgggaaaactgaagagagctagaacagttcaccgagactcagaggaggaagatgactatctctttgatgatcctctgccaatacctttaaggcacaaagttccatacccggaaacttttcaccctgaggtattttcaatgactgcagtatcagaaaagcagcctgaaaaactgagacaaaccccaggatgctgcagagcagagtgtatgcagagctctcgtttcacaaactttgtagattgtgaagaatccaacagtgaaagtgaagaagaagtaggaatcccagcttcactgcaaggagatctgggctctgtacttcacctgcaaaaggctgatggggatgtaccccagtgggaagtattctttaaaagaaatgatgaaatcacagatgagagtttggaaaacttcccttcctccacagtggcagggggatctcagtcaccaaagcttttcagtgactctgatggagaatcaactcacatctcctcccagaattcttcccagtcaacacacataacagaacaaggaagtcaaggctgggacagccaatctgatactgttttgttatcttcccaagagagaaacagtggggatattacttccttggacaaagctgactacagaccaacaatcaaagagaatattcctgcctctctcatggaacaaaatgtaatttgcccaaaggatacttactctgatttgaaaagcagagataaagatgtgacaatagttcctagtactggagaaccaactactctaagcagtgagacacatatacccgaggaaaaaagtttgctaaatcttagcacaaatgcagattcccagagctcttctgattttgaagttccctcaactccagaagctgagttacctaaacgagagcatttacaatatttatatgagaagctggcaactggtgagagtatagcagtcaaaaaaagaaaatgctcactcttagatacctaagaattcaaagcgtttcaacctagagcaaccactaaaaaacctgcacagagatgacagtcaatattacaatagagaaaatacagtacttaaaaatgttcaaataacctggttgggtgtggtggctcacacttgtaatcccagcactttgaggtgggcaatggcttgagcccaggagttcgacaccagcctggccaacacagtgaaatgtgtctctacttacaaaaaaaaaaaaaaaaa

SEQ ID NO: 1405 - DNA, 2807 bp, Homo sapiens
  source 1..2807: mol_type = genomic DNA
gcggttttggggtcccggactctgggatcggcggcgctatgagttctttcgaggggcagatggccgagtatccaactatctccatagaccgcttcgatagggagaacctgagggcccgcgcctacttcctgtcccactgccacaaagatcacatgaaaggattaagagcccctaccttgaaaagaaggttggagtgcagacacacctgatcacatacaagcgcgtatttccaagtaacaatggtgagggaccactgttggaggaggtccagggacaccgtgtttccacccccaccttgtgctcttggtggcactgaaatggtgtgcatagcttgaaggtttatctatactgttcacctgtgactaaggagttgttgttaacgagcccgaaatacagattttggaagaaacgaattagcagtcacaacagcagggttgttcctgttgtctctggcattcagcttgaagttactacaggtcagcccggccagcagtcaggaaggaaagctggaagagaagtggaggggaacagagacaaactggaaggcagaatggcccactaggacagaccgaaacccacttctgtctctcacttcctctggcctcaatagtgctggtctcccgctttggctctgaagcacatgcacctgccccaggactcggaggagctgcacacgggcacccagcagaagctgatgttgctgcggccctgccccagactctgagttaagccagaagatatctattgaaatcgagactcctacccagatatctttagtggatgaagcatcaggagagaaggaagagattgttgtgactctcttaccagctggtcactgtccgggatcagttatgtttttatttcagggcaataatggaactgtcctgtacacaggagacttcagattggcgcaaggagaagctgctagaatggagcttctgcactccgggggcagagtcaaagacatccaaagtgtatatttggatactacgttctgtgatccaagattttaccaaattccaagtcgggaggagtgtttaagtggagtcttagagctggtccgaagctggatcactcggagcccgtaccatgttgtgtggctgaactgcaaagcggcttatggctatgaatatctgttcaccaaccttagtgaagaattaggagtccaggttcatgtgaataagctagacatgtttaggaacatgcctgagatccttcatcatctcacaacagaccgcaacactcagatccatgcatgccggcatcccaaggcagaggaatattttcagtggagcaaattaccctgtggaattacttccagaaatagaattccactccacataatcagcattaagccatccaccatgtggtttggagaaaggagcagaaaaacaaatgtaattgtgaggactggagagagttcatacagagcttgtttttcttttcactcctcctacagtgagattaaagatttcttgagctacctctgtcctgtgaacgcatatccaaatgtcattccagttggcacaactatggataaagttgtcgaaatcttaaagcctttatgccggtcttcccaaagtacggagccaaagtataaaccactgggaaaactgaagagagctagaacagttcaccgagactcagaggaggaagatgactatctctttgatgatcctctgccaatacctttaaggcacaaagttccatacccggaaacttttcaccctgaggtattttcaatgactgcagtatcagaaaagcagcctgaaaaactgagacaaaccccaggatgctgcagagcagagtgtatgcagagctctcgtttcacaaactttgtagattgtgaagaatccaacagtgaaagtgaagaagaagtaggaatcccagcttcactgcaaggagatctgggctctgtacttcacctgcaaaaggctgatggggatgtaccccagtgggaagtattctttaaaagaaatgatgaaatcacagatgagagtttggaaaacttcccttcctccacagtggcagggggatctcagtcaccaaagcttttcagtgactctgatggagaatcaactcacatctcctcccagaattcttcccagtcaacacacataacagaacaaggaagtcaaggctgggacagccaatctgatactgttttgttatcttcccaagagagaaacagtggggatattacttccttggacaaagctgactacagaccaacaatcaaagagaatattcctgcctctctcatggaacaaaatgtaatttgcccaaaggatacttactctgatttgaaaagcagagataaagatgtgacaatagttcctagtactggagaaccaactactctaagcagtgagacacatatacccgaggaaaaaagtttgctaaatcttagcacaaatgcagattcccagagctcttctgattttgaagttccctcaactccagaagctgagttacctaaacgagagcatttacaatatttatatgagaagctggcaactggtgagagtatagcagtcaaaaaaagaaaatgctcactcttagatacctaagaattcaaagcgtttcaacctagagcaaccactaaaaaacctgcacagagatgacagtcaatattacaatagagaaaatacagtacttaaaaatgttcaaataacctggttgggtgtggtggctcacacttgtaatcccagcactttgaggtgggcaatggcttgagcccaggagttcgacaccagcctggccaacacagtgaaatgtgtctctacttacaaaaaaaaaaaaaaaaa

SEQ ID NO: 1406 - DNA, 2463 bp, Homo sapiens
  source 1..2463: mol_type = genomic DNA
tcagggctggccttggcttcagctgcggttttggggtcccggactctgggatcggcggcgctatgagttctttcgaggggcagatggccgagtatccaactatctccatagaccgcttcgatagggagaacctgagggcccgcgcctacttcctgtcccactgccacaaagatcacatgaaaggattaagagcccctaccttgaaaagaaggttggagtgcagatgaggaaactgaggaaccagagaggttaaattagttgcccagtgtcacacagccagtaagtggcaggaccaggattccagccagcttgaaggtttatctatactgttcacctgtgactaaggagttgttgttaacgagcccgaaatacagattttggaagaaacgaattatatctattgaaatcgagactcctacccagatatctttagtggatgaagcatcaggagagaaggaagagattgttgtgactctcttaccagctggtcactgtccgggatcagttatgtttttatttcagggcaataatggaactgtcctgtacacaggagacttcagattggcgcaaggagaagctgctagaatggagcttctgcactccgggggcagagtcaaagacatccaaagtgtatatttggatactacgttctgtgatccaagattttaccaaattccaagtcgggaggagtgtttaagtggagtcttagagctggtccgaagctggatcactcggagcccgtaccatgttgtgtggctgaactgcaaagcggcttatggctatgaatatctgttcaccaaccttagtgaagaattaggagtccaggttcatgtgaataagctagacatgtttaggaacatgcctgagatccttcatcatctcacaacagaccgcaacactcagatccatgcatgccggcatcccaaggcagaggaatattttcagtggagcaaattaccctgtggaattacttccagaaatagaattccactccacataatcagcattaagccatccaccatgtggtttggagaaaggagcagaaaaacaaatgtaattgtgaggactggagagagttcatacagagcttgtttttcttttcactcctcctacagtgagattaaagatttcttgagctacctctgtcctgtgaacgcatatccaaatgtcattccagttggcacaactatggataaagttgtcgaaatcttaaagcctttatgccggtcttcccaaagtacggagccaaagtataaaccactgggaaaactgaagagagctagaacagttcaccgagactcagaggaggaagatgactatctctttgatgatcctctgccaatacctttaaggcacaaagttccatacccggaaacttttcaccctgaggtattttcaatgactgcagtatcagaaaagcagcctgaaaaactgagacaaaccccaggatgctgcagagcagagtgtatgcagagctctcgtttcacaaactttgtagattgtgaagaatccaacagtgaaagtgaagaagaagtaggaatcccagcttcactgcaaggagatctgggctctgtacttcacctgcaaaaggctgatggggatgtaccccagtgggaagtattctttaaaagaaatgatgaaatcacagatgagagtttggaaaacttcccttcctccacagtggcagggggatctcagtcaccaaagcttttcagtgactctgatggagaatcaactcacatctcctcccagaattcttcccagtcaacacacataacagaacaaggaagtcaaggctgggacagccaatctgatactgttttgttatcttcccaagagagaaacagtggggatattacttccttggacaaagctgactacagaccaacaatcaaagagaatattcctgcctctctcatggaacaaaatgtaatttgcccaaaggatacttactctgatttgaaaagcagagataaagatgtgacaatagttcctagtactggagaaccaactactctaagcagtgagacacatatacccgaggaaaaaagtttgctaaatcttagcacaaatgcagattcccagagctcttctgattttgaagttccctcaactccagaagctgagttacctaaacgagagcatttacaatatttatatgagaagctggcaactggtgagagtatagcagtcaaaaaaagaaaatgctcactcttagatacctaagaattcaaagcgtttcaacctagagcaaccactaaaaaacctgcacagagatgacagtcaatattacaatagagaaaatacagtacttaaaaatgttcaaataacctggttgggtgtggtggctcacacttgtaatcccagcactttgaggtgggcaatggcttgagcccaggagttcgacaccagcctggccaacacagtgaaatgtgtctctacttacaaaaaaaaaaaaaaaaa

SEQ ID NO: 1407 - DNA, 2354 bp, Homo sapiens
  source 1..2354: mol_type = genomic DNA
gcggttttggggtcccggactctgggatcggcggcgctatgagttctttcgaggggcagatggccgagtatccaactatctccatagaccgcttcgatagggagaacctgagggcccgcgcctacttcctgtcccactgccacaaagatcacatgaaaggattaagagcccctaccttgaaaagaaggttggagtgcagcttgaaggtttatctatactgttcacctgtgactaaggagttgttgttaacgagcccgaaatacagattttggaagaaacgaattatatctattgaaatcgagactcctacccagatatctttagtggatgaagcatcaggagagaaggaagagattgttgtgactctcttaccagctggtcactgtccgggatcagttatgtttttatttcagggcaataatggaactgtcctgtacacaggagacttcagattggcgcaaggagaagctgctagaatggagcttctgcactccgggggcagagtcaaagacatccaaagtgtatatttggatactacgttctgtgatccaagattttaccaaattccaagtcgggaggagtgtttaagtggagtcttagagctggtccgaagctggatcactcggagcccgtaccatgttgtgtggctgaactgcaaagcggcttatggctatgaatatctgttcaccaaccttagtgaagaattaggagtccaggttcatgtgaataagctagacatgtttaggaacatgcctgagatccttcatcatctcacaacagaccgcaacactcagatccatgcatgccggcatcccaaggcagaggaatattttcagtggagcaaattaccctgtggaattacttccagaaatagaattccactccacataatcagcattaagccatccaccatgtggtttggagaaaggagcagaaaaacaaatgtaattgtgaggactggagagagttcatacagagcttgtttttcttttcactcctcctacagtgagattaaagatttcttgagctacctctgtcctgtgaacgcatatccaaatgtcattccagttggcacaactatggataaagttgtcgaaatcttaaagcctttatgccggtcttcccaaagtacggagccaaagtataaaccactgggaaaactgaagagagctagaacagttcaccgagactcagaggaggaagatgactatctctttgatgatcctctgccaatacctttaaggcacaaagttccatacccggaaacttttcaccctgaggtattttcaatgactgcagtatcagaaaagcagcctgaaaaactgagacaaaccccaggatgctgcagagcagagtgtatgcagagctctcgtttcacaaactttgtagattgtgaagaatccaacagtgaaagtgaagaagaagtaggaatcccagcttcactgcaaggagatctgggctctgtacttcacctgcaaaaggctgatggggatgtaccccagtgggaagtattctttaaaagaaatgatgaaatcacagatgagagtttggaaaacttcccttcctccacagtggcagggggatctcagtcaccaaagcttttcagtgactctgatggagaatcaactcacatctcctcccagaattcttcccagtcaacacacataacagaacaaggaagtcaaggctgggacagccaatctgatactgttttgttatcttcccaagagagaaacagtggggatattacttccttggacaaagctgactacagaccaacaatcaaagagaatattcctgcctctctcatggaacaaaatgtaatttgcccaaaggatacttactctgatttgaaaagcagagataaagatgtgacaatagttcctagtactggagaaccaactactctaagcagtgagacacatatacccgaggaaaaaagtttgctaaatcttagcacaaatgcagattcccagagctcttctgattttgaagttccctcaactccagaagctgagttacctaaacgagagcatttacaatatttatatgagaagctggcaactggtgagagtatagcagtcaaaaaaagaaaatgctcactcttagatacctaagaattcaaagcgtttcaacctagagcaaccactaaaaaacctgcacagagatgacagtcaatattacaatagagaaaatacagtacttaaaaatgttcaaataacctggttgggtgtggtggctcacacttgtaatcccagcactttgaggtgggcaatggcttgagcccaggagttcgacaccagcctggccaacacagtgaaatgtgtctctacttacaaaaaaaaaaaaaaaaa

SEQ ID NO: 1408 - DNA, 3532 bp, Homo sapiens
  source 1..3532: mol_type = genomic DNA
cggaacgaagaatgatttctaagcgcagttccgcagcccactcacctcgtcggctggggccacctgctctgggagtttcgatttcccttcccgcgactgcacctccacagacatgggcaacgccttaccagagcaacacctgtgtttgttgggcgggaatgagccttgcactgggcagggctcagggcccatcgcgtgcagcgaagcgcgggtgatttaaacccaagcagcgggcgcctagaacccgaccggatgctccttgactttgcccccggtctccggactcctctgattggacgtggctgcgttcggccgcccaatggcgaggcagcgcgcggcttcccggaagtggcggcgcggtcagggctggccttggcttcagctgcggttttggggtcccggactctgggatcggcggcgctatgagttctttcgaggggcagatggccgagtatccaactatctccatagaccgcttcgatagggagaacctgagggcccgcgcctacttcctgtcccactgccacaaagatcacatgaaaggattaagagcccctaccttgaaaagaaggttggagtgcagcttgaaggtttatctatactgttcacctgtgactaaggagttgttgttaacgagcccgaaatacagattttggaagaaacgaattatatctattgaaatcgagactcctacccagatatctttagtggatgaagcatcaggagagaaggaagagattgttgtgactctcttaccagctggtcactgtccgggatcagttatgtttttatttcagggcaataatggaactgtcctgtacacaggagacttcagattggcgcaaggagaagctgctagaatggagcttctgcactccgggggcagagtcaaagacatccaaagtgtatatttggatactacgttctgtgatccaagattttaccaaattccaagtcgggaggagtgtttaagtggagtcttagagctggtccgaagctggatcactcggagcccgtaccatgttgtgtggctgaactgcaaagcggcttatggctatgaatatctgttcaccaaccttagtgaagaattaggagtccaggttcatgtgaataagctagacatgtttaggaacatgcctgagatccttcatcatctcacaacagaccgcaacactcagatccatgcatgccggcatcccaaggcagaggaatattttcagtggagcaaattaccctgtggaattacttccagaaatagaattccactccacataatcagcattaagccatccaccatgtggtttggagaaaggagcagaaaaacaaatgtaattgtgaggactggagagagttcatacagagcttgtttttcttttcactcctcctacagtgagattaaagatttcttgagctacctctgtcctgtgaacgcatatccaaatgtcattccagttggcacaactatggataaagttgtcgaaatcttaaagcctttatgccggtcttcccaaagtacggagccaaagtataaaccactgggaaaactgaagagagctagaacagttcaccgagactcagggtctcactctgtcactcaggctagaatgcggtggtgccatcatgactccctgtatcctttaactcctgggatcaagcgatcttcctgcctcagcctcctgactagctggatcacaggtgcataccgccatgcccagctaatgatttagtttttatagagatgtggggtctcactatgttgcccacactggtctggaactcctgggctcaagtgagcctccagccttgacctccccaagtgctgggattaactgtaactggttgatttatgactttttaaacaggatttgagcagtacattggaacactgcattactttcattataattaggatgttcaaaaagctatacaactatagctctctacaggacacaactgaatgttaaggactaaatctgcaagtatatgctctaaatatgatccaggcacatttttcctataacttatatatatgcagttacaaatggaaaattgttaaaaatacaggggagaagctatgttaactttggaatggaaggttttgtttttgtagaatatgttattttcatgcaattctgtaagtctaagatcgtcatctacagttctgctcttaagaacacaagttttatgacacgctcggcttaagaaaccaaaagtgtctaaagtactttatgttaccaaccaaatttggctgctgcactcattaagaatgcaacttaaaaaattttggttaacaaaaagagtaatttgattatacaagatcttgtatactgaataatttataataatctaccactgtctaaaagtgtaagaatcaaaacagccatctaatttagtttcagaattatagatgaatacagataattataggtgacccaattccaactaaaaaatccagagttgacaactccagatatgtagccatgcttgtgtctttctagtcacagctcaacctacccttcagtttgaagcagtgtggtgccatggtgaagactactgattttagagctttgaatctcggttcttattactatgtgacctgtgtgaccttgggcaaggtactcaatttctctacaataatggacataacagtactacttctcaaaaaaaaaaaaaaaaaaaaaaaaaaaagaaacagtactacctcactgagttttggagaggattagtgaattaatacatcaagtgcttagaatagtatgtgacacacggcaaatactttttacatttatatatatatatacatatatatgatttgtatacaaataaatttgctagtatttgtatggtagttttgagaatggtcttcacagttcaaaagtaagttacagattatggatgcaataaatgcttgtgtatattttacaaaactcataaatatagtatctttcatgttgatccaaaatagagttctgccaactacatttaatcatatttggtcaaatagatgaagtaaattaaaactttcaagtttcaaagcagcatgtgttacatctgagtttcttcttaggacttttgggtaaaaacagttgtcatattttaaattttacaaatcctaggtttgactagtaggaatgtgtatttgttgaaagatgactatatcaatttgttttaacgtatattttttattcatataaaagttttttatttctaaatatgccagtgaactcttctcctaaatctgaataaatttctacatatctgcaaatgaaaatatcaaaatgtaccaagtatctcttaaagagataaaaaggtaattttccaaaagtataaaccttgcatgtccatcatttactacgtggcaaatgaaacatacctctccaacatattccatgacaaaactcattcttttaatcttcacaagggtctttacaccccagccacgtccattgctagttcgaaagatgcaaagcgaatactgtgtgcctttttgtacaatcctattgggacaatcaggaccacactgacaccttga

SEQ ID NO: 1409 - DNA, 2761 bp, Homo sapiens
  source 1..2761: mol_type = genomic DNA
gcggttttggggtcccggactctgggatcggcggcgctatgagttctttcgaggggcagatggccgagtatccaactatctccatagaccgcttcgatagggagaacctgagggcccgcgcctacttcctgtcccactgccacaaagatcacatgaaaggattaagagcccctaccttgaaaagaaggttggagtgcagatgaggaaactgaggaaccagagaggttaaattagttgcccagtgtcacacagccagtaagtggcaggaccaggattccagccagcttgaaggtttatctatactgttcacctgtgactaaggagttgttgttaacgagcccgaaatacagattttggaagaaacgaattagcagtcacaacagcagggttgttcctgttgtctctggcattcagcttgaagttactacaggtcagcccggccagcagtcaggaaggaaagctggaagagaagtggaggggaacagagacaaactggaaggcagaatggcccactaggacagaccgaaacccacttctgtctctcacttcctctggcctcaatagtgctggtctcccgctttggctctgaagcacatgcacctgccccaggactcggaggagctgcacacgggcacccagcagaagctgatgttgctgcggccctgccccagactctgagttaagccagaagatatctattgaaatcgagactcctacccagatatctttagtggatgaagcatcaggagagaaggaagagattgttgtgactctcttaccagctggtcactgtccgggatcagttatgtttttatttcagggcaataatggaactgtcctgtacacaggagacttcagattggcgcaaggagaagctgctagaatggagcttctgcactccgggggcagagtcaaagacatccaaagtgtatatttggatactacgttctgtgatccaagattttaccaaattccaagtcgggaggagtgtttaagtggagtcttagagctggtccgaagctggatcactcggagcccgtaccatgttgtgtggctgaactgcaaagcggcttatggctatgaatatctgttcaccaaccttagtgaagaattaggagtccaggttcatgtgaataagctagacatgtttaggaacatgcctgagatccttcatcatctcacaacagaccgcaacactcagatccatgcatgccggcatcccaaggcagaggaatattttcagtggagcaaattaccctgtggaattacttccagaaatagaattccactccacataatcagcattaagccatccaccatgtggtttggagaaaggagcagaaaaacaaatgtaattgtgaggactggagagagttcatacagagcttgtttttcttttcactcctcctacagtgagattaaagatttcttgagctacctctgtcctgtgaacgcatatccaaatgtcattccagttggcacaactatggataaagttgtcgaaatcttaaagcctttatgccggtcttcccaaagtacggagccaaagtataaaccactgggaaaactgaagagagctagaacagttcaccgagactcagaggaggaagatgactatctctttgatgatcctctgccaatacctttaaggcacaaagttccatacccggaaacttttcaccctgaggtattttcaatgactgcagtatcagaaaagcagcctgaaaaactgagacaaaccccaggatgctgcagagcagagtgtatgcagagctctcgtttcacaaactttgtagattgtgaagaatccaacagtgaaagtgaagaagaagtaggaatcccagcttcactgcaaggagatctgggctctgtacttcacctgcaaaaggctgatggggatgtaccccagtgggaagtattctttaaaagaaatgatgaaatcacagatgagagtttggaaaacttcccttcctccacagtggcagggggatctcagtcaccaaagcttttcagtgactctgatggagaatcaactcacatctcctcccagaattcttcccagtcaacacacataacagaacaaggaagtcaaggctgggacagccaatctgatactgttttgttatcttcccaagagagaaacagtggggatattacttccttggacaaagctgactacagaccaacaatcaaagagaatattcctgcctctctcatggaacaaaatgtaatttgcccaaaggatacttactctgatttgaaaagcagagataaagatgtgacaatagttcctagtactggagaaccaactactctaagcagtgagacacatatacccgaggaaaaaagtttgctaaatcttagcacaaatgcagattcccagagctcttctgattttgaagttccctcaactccagaagctgagttacctaaacgagagcatttacaatatttatatgagaagctggcaactggtgagagtatagcagtcaaaaaaagaaaatgctcactcttagatacctaagaattcaaagcgtttcaacctagagcaaccactaaaaaacctgcacagagatgacagtcaatattacaatagagaaaatacagtacttaaaaatgttcaaataacctggttgggtgtggtggctcacacttgtaatcccagcactttgaggtgggcaatggcttgagcccaggagttcgacaccagcctggccaacacagtgaaatgtgtctctacttacaaaaaaaaaaaaaaaaa

SEQ ID NO: 1410 - DNA, 901 bp, Homo sapiens
  source 1..901: mol_type = genomic DNA
gactctgggatcggcggcgctatgagttctttcgaggggcagatggccgagtatccaactatctccatagaccgcttcgatagggagaacctgagggcccgcgcctacttcctgtcccactgccacaaagatcacatgaaaggattaagagcccctaccttgaaaagaaggttggagtgcagacacacctgatcacatacaagcgcgtatttccaagtaacaatggtgagggaccactgttggaggaggtccagggacaccgtgtttccacccccaccttgtgctcttggtggcactgaaatggtgtgcatagcttgaaggtttatctatactgttcacctgtgactaaggagttgttgttaacgagcccgaaatacagattttggaagaaacgaattatatctattgaaatcgagactcctacccagatatctttagtggatgaagcatcaggagagaaggaagagattgttgtgactctcttaccagctggtcactgtccgggatcagttatgagacttcagattggcgcaaggagaagctgctagaatggagcttctgcactccgggggcagagtcaaagacatccaaagtgtatatttggatactacgttctgtgatccaagattttaccaaattccaagtcgggaggagtgtttaagtggagtcttagagctggtccgaagctggatcactcggagcccgtaccatgttgtgtggctgaactgcaaagcggcttatggctatgaatatctgttcaccaaccttagtgaagaattaggagtccaggttcatgtgaataagctagacatgtttaggaacatgcctgagatccttcatcatctcacaacagaccgcaacactcagatccatgcatgccggcatcccaaggcagaggaat

SEQ ID NO: 1411 - DNA, 3674 bp, Homo sapiens
  source 1..3674: mol_type = genomic DNA
gcttcccggaagtggcggcgcggtcagggctggccttggcttcagctgcggttttggggtcccggactctgggatcggcggcgctatgagttctttcgaggggcagatggccgagtatccaactatctccatagaccgcttcgatagggagaacctgagggcccgcgcctacttcctgtcccactgccacaaagatcacatgaaaggattaagagcccctaccttgaaaagaaggttggagtgcagcttgaaggtttatctatactgttcacctgtgactaaggagttgttgttaacgagcccgaaatacagattttggaagaaacgaattatatctattgaaatcgagactcctacccagatatctttagtggatgaagcatcaggagagaaggaagagattgttgtgactctcttaccagctggtcactgtccgggatcagttatgtttttatttcagggcaataatggaactgtcctgtacacaggagacttcagattggcgcaaggagaagctgctagaatggagcttctgcactccgggggcagagtcaaagacatccaaagtgtatatttggatactacgttctgtgatccaagattttaccaaattccaagtcgggaggagtgtttaagtggagtcttagagctggtccgaagctggatcactcggagcccgtaccatgttgtgtggctgaactgcaaagcggcttatggctatgaatatctgttcaccaaccttagtgaagaattaggagtccaggttcatgtgaataagctagacatgtttaggaacatgcctgagatccttcatcatctcacaacagaccgcaacactcagatccatgcatgccggcatcccaaggcagaggaatattttcagtggagcaaattaccctgtggaattacttccagaaatagaattccactccacataatcagcattaagccatccaccatgtggtttggagaaaggagcagaaaaacaaatgtaattgtgaggactggagagagttcatacagagcttgtttttcttttcactcctcctacagtgagattaaagatttcttgagctacctctgtcctgtgaacgcatatccaaatgtcattccagttggcacaactatggataaagttgtcgaaatcttaaagcctttatgccggtcttcccaaagtacggagccaaagtataaaccactgggaaaactgaagagagctagaacagttcaccgagactcagaggaggaagatgactatctctttgatgatcctctgccaatacctttaaggcacaaagttccatacccggaaacttttcaccctgaggtattttcaatgactgcagtatcagaaaagcagcctgaaaaactgagacaaaccccaggatgctgcagagcagagtgtatgcagagctctcgtttcacaaactttgtagattgtgaagaatccaacagtgaaagtgaagaagaagtaggaatcccagcttcactgcaaggagatctgggctctgtacttcacctgcaaaaggctgatggggatgtaccccagtgggaagtattctttaaaagaaatgatgaaatcacagatgagagtttggaaaacttcccttcctccacagtggcagggggatctcagtcaccaaagcttttcagtgactctgatggagaatcaactcacatctcctcccagaattcttcccagtcaacacacataacagaacaaggaagtcaaggctgggacagccaatctgatactgttttgttatcttcccaagagagaaacagtggggatattacttccttggacaaagctgactacagaccaacaatcaaagagaatattcctgcctctctcatggaacaaaatgtaatttgcccaaaggatacttactctgatttgaaaagcagagataaagatgtgacaatagttcctagtactggagaaccaactactctaagcagtgagacacatatacccgaggaaaaaagtttgctaaatcttagcacaaatgcagattcccagagctcttctgattttgaagttccctcaactccagaagctgagttacctaaacgagagcatttacaatatttatatgagaagctggcaactggtgagagtatagcagtcaaaaaaagaaaatgctcactcttagatacctaagaattcaaagcgtttcaacctagagcaaccactaaaaaacctgcacagagatgacagtcaatattacaatagagaaaatacagtacttaaaaatgttcaaataacctggttgggtgtggtggctcacacttgtaatcccagcactttgaggtgggcaatggcttgagcccaggagttcgacaccagcctggccaacacagtgaaatgtgtctctacttacaaaaaaaaaaaaaaaaaaaaaagccaggcatggtggtgggctactctggaggcccttgaggatcacttgagcccaggagattgaggctgcagtgagccatgactgtgccactgcacctctagtctgggtgacagagcaagaccctgtttaaaaaagaaaaaggccaggcacggtggctcatgcctgtaatcccagctacgcaggaggccaaggcaggagaatcacttgaacctgggaggtggtggttgcagtgagctgagattgtgtcattgcactccagcctgggcaacaagagcaaaactctgtctcaaaaaaaaaaaaaaaaaaaaagaaaaaaaaatggtagaactaaacccatacgtatcaatgattacattaaatgtaaatggtctaagtgcatcaatgacaagagacacggaaaaaaccaacataacccagtgatctgctgtctataaagaaagtcaattcaagtgattgataggttaaaaggatggaaaaaccatgtaaacaattaaaaatggagtggttatatggacagtttcctaatgataaaaggtctagttcaccaagaagacaaaataatcctaaacgtatatgcacctaacagctccaaaaatttatgaagctagaacagctgaaaagagacaaactaatgcacaattacagctagggattaatttaacatccctccttagtaacagaactagtatatacacattaatcagtaagaatatagaactgaaaatcataagccgactggattaaattgacatttatagaacacaccaccccaaactagcagaatgtatctcctgaagtacacatggaacattcagcatgatcatatctttgctcataaacacacctgatttaaattgacaaacttggatctagtatgataaactgatggctatagacaaaatcagcaccttatttatccccaaagatgttaagtcacttaaccttgatgtgaatacggtggccaaattagaagcggacaattagaatataaaagaaaatgctcaagaattaaatggtggccaggcacagtaactcctgcctgcaatcccagtactttgggaggctcgcttgagctcagggttttgagtccagcctgggcaacacacagggagaccctgtctccacaaaatgttagccagacatggtggtgtgcacctgtagtcctcgctacttggaaggcttaggtggcaggatggattgagcccaggaggttgaaactgcagtgagctgattgtgcccagcctgggcaacaaagcaagaccccatctc

SEQ ID NO: 1412 - DNA, 877 bp, Homo sapiens
  source 1..877: mol_type = genomic DNA
ggcggcgctatgagttctttcgaggggcagatggccgagtatccaactatctccatagaccgcttcgatagggagaacctgagggcccgcgcctacttcctgtcccactgccacaaagatcacatgaaaggattaagagcccctaccttgaaaagaaggttggagtgcagatgaggaaactgaggaaccagagaggttaaattagttgcccagtgtcacacagccagtaagtggcaggaccaggattccagccagcttgaaggtttatctatactgttcacctgtgactaaggagttgttgttaacgagcccgaaatacagattttggaagaaacgaattagcagtcacaacagcagggttgttcctgttgtctctggcattcagcttgaagttactacaggtcagcccggccagcagtcaggaaggaaagctggaagagaagtggaggggaacagagacaaactggaaggcagaatggcccactaggacagaccgaaacccacttctgtctctcacttcctctggcctcaatagtgctggtctcccgctttggctctgaagcacatgcacctgccccaggactcggaggagctgcacacgggcacccagcagaagctgatgttgctgcggccctgccccagactctgagttaagccagaagatatctattgaaatcgagactcctacccagatatctttagtggatgaagcatcaggagaggtttttatttcagggcaataatggaactgtcctgtacacaggagacttcagattggcgcaaggagaagctgctagaatggagcttctgcactccgggggcagagtcaaagacatccaaagtgtatatttggatactacgttctgtgatccaagat

SEQ ID NO: 1413 - DNA, 1403 bp, Homo sapiens
  source 1..1403: mol_type = genomic DNA
cgaaggtgggcaggtcccaccttgtggaggatggaggtgaccggggacgccggggtaccagaatctggcgagatccggactctaaagccgtgtctgctgcgccgcaactacagccgcgaacagcacggcgtggccgcctcctgcctcgaagacctgaggagcaaggcctgtgacattctggccattgataagtccctgacaccagtcaccctggtcctggcagaggatggcaccatagtggatgatgacgattactttctgtgtctaccttccaatactaagtttgtggcattggctagtaatgagaaatgggcatacaacaattcagatggaggtacagcttggatttcccaagagtcctttgatgtagatgaaacagacagcggggcagggttgaagtggaagaatgtggccaggcagctgaaagaagatctgtccagcatcatcctcctatcagaggaggacctccagatgcttgttgacgctccctgctcagacctggctcaggaactacgtcagagttgtgccaccgtccagcggctgcagcacacactccaacaggtgcttgaccaaagagaggaagtgcgtcagtccaagcagctcctgcagctgtacctccaggctttggagaaagagggcagcctcttgtcaaagcaggaagagtccaaagctgcctttggtgaggaggtggatgcagtagacacgggtatcagcagagagacctcctcggacgttgcgctggcgagccacatccttactgcactgagggagaagcaggctccagagctgagcttatctagtcaggatttggaggtgggcggaaaccagggtcactgagctacagaggaggacatgccctgggatgtagtagtatcatgcagaggtgtgtgggcccttttgttcacctctgcagactgtgaatcctagctgccagtttgcctattatatgccaaggcatttgcaaaaatctcattaatctaaatcaaaatagctttaaagaaaaatgcatacacttcctcagatcatcaaacagactctggtccaaggttggtaatgaaatgactgttcctgacagggaggaatagcagggcccaatcttctgagatggcttctgggtctttccatggtcagagaagatctatagtccgtcctgaggtctgtcaatgtcacaggaaaaggcaaacttgaggggatcgtcgcctgctggctaagaccagggagctaaaaacttgaggaagggaacctgcctgggtgggtgctacttctgattcattgtccttgtccctgtcataagtacctccctattgtagatagaagggaaggaaactgttgacttgagcttggctaaatttcctgaaggtggaggaccttagagttgctccaagtaaactttccaaggactt

SEQ ID NO: 1414 - DNA, 6032 bp, Homo sapiens
  source 1..6032: mol_type = genomic DNA
gagtagaaggaccgccgctccggcctcccgcgacttctcgaaggtgggcaggtcccaccttgtggaggatggaggtgaccggggacgccggggtaccagaatctggcgagatccggactctaaagccgtgtctgctgcgccgcaactacagccgcgaacagcacggcgtggccgcctcctgcctcgaagacctgaggagcaaggcctgtgacattctggccattgataagtccctgacaccagtcaccctggtcctggcagaggatggcaccatagtggatgatgacgattactttctgtgtctaccttccaatactaagtttgtggcattggctagtaatgagaaatgggcatacaacaattcagatggaggtacagcttggatttcccaagagtcctttgatgtagatgaaacagacagcggggcagggttgaagtggaagaatgtggccaggcagctgaaagaagatctgtccagcatcatcctcctatcagaggaggacctccagatgcttgttgacgctccctgctcagacctggctcaggaactacgtcagagttgtgccaccgtccagcggctgcagcacacactccaacaggtgcttgaccaaagagaggaagtgcgtcagtccaagcagctcctgcagctgtacctccaggctttggagaaagagggcagcctcttgtcaaagcaggaagagtccaaagctgcctttggtgaggaggtggatgcagtagacacgggtatcagcagagagacctcctcggacgttgcgctggcgagccacatccttactgcactgagggagaagcaggctccagagctgagcttatctagtcaggatttggagttggttaccaaggaagaccccaaagcactggctgttgccttgaactgggacataaagaagacggagactgttcaggaggcctgtgagcgggagctcgccctgcgcctgcagcagacgcagagcttgcattctctccggagcatctcagcaagcaaggcctcaccacctggtgacctgcagaatcctaagcgagccagacaggatcccacatagcagcagcgggaagtgtgccaaggaagctctgtggcgttgtgttattggtagacaccctcagcctcatcatttgactacctatgtactactctaccccctgccttagagcaccttccagagaagctattccaggtctcaacatacgccgttccaccaattttttttttagccccaccagcttcaggacttctgccaattttgaatgatatagctgcaccaacaatatcccgcctcctctaattacatatgatgttctctgttcaaaagtaattggcagtgattggccaggcgcagtggctcacgcctgtaatcccagcactgggaggccgaggggggcggatcgtgaagtcaggagatcgagaccatcctggctaacatggtgaaaccctgtctctactaaaaatacaaaaaaaattagccagccatggtggcgggcgcctgtaatcccagctacttgggaggctgaggcaggagaatggcatgaacctgggaggcagagcttgcagtgagctgagattgcgccactgcactccagcctgggcaacagagcgagactccgtctcaaaaaaaaaaaaaaaaaaagtaattggcagtgactatgggcgcactgcctaacatttagccctgccccatatggaacatgttaaaaaaaaaaaaagccaggccgagcgtgttggctcacgcttgtaatcccagcactttgggaggccgaggcgggtggatcacgaggtcaggagatcgagaccatcctggctaacacagtgaaacgtgtttttactaaaagtacaaaaaactagctgggcgtggtggcaggagcctgtagtcccagctactcgggaggctgaggcaggagaattgcttgaaccggggaggcagaagttgcagtgagccgagattatgccactgtactccagcctgggtgacagagtgacactctgtctcaaaaaaaaaaaaaaaaaggacaggcacgacagtggctcacacctttgatcccagcactttggaggccgatgcaggcggatcacatgaggtcaggagttcaagaccaacctggccaatatggtgaaaccccgtctctactaaaaatacaaaaattagctgggcatgatggcgggtgcctgtaatcccagctactcggtaggcagaggttgcagtgagctgagagcgcaccactgcactccagcctgggtgacagagctagactccgtatctcaagaaaaaaaaaaagttttgttttgtttttttgagacagagtctcactctgtcacctagtctggagtgcagtggcacattctcggctcactgcaacccccacctcccaggttcaagcgattctcctgtttcagcctcctgagcagctgggattacaggcacgtgccaccatgcccggctaatttttgtatttttagtagagacagggttttgtcacattggccaggctggtctcaaactcctgacctcaggtgatccacccacctcagcctcccaaagtgctgggattacaggtgtgagccaccacccctggccagaaaaaaaagcttttaaataaagtaattgtcagcttaggcaacatagcaagaccctgtctctacaaaaaaaaaatttaagttagccaggcatggtggcactgacctataatcctagctactctggaggctaaggcgagagtatcacttgagcccaggagctcaaggctgatcatgccaccatactccagcctggatgatagagtaagaccctacttttttttttttttttttaaaaaggtaaccatcaagggcaatgaaaagaaatggtcgtatttccaattcattatccttattctgaagatagtacggcagaattttaagcagagatagtggtgaagatggtgacattatagagtgttgactatggccacaatcttgtttctccagttaatgaatttttttatgtgtttgtttaaagatacatattaagcttgtagaccatagggacatacggagagtccattgctaatatctcactcagtattgtgaaattctatctcaccaccgtgaaactcttcagttttctaattgctttatcagcagggggtataaaaggtcatgaaagcaatttccacatgctgtggctccaggtctctgggtgtgaagcagagcaagcctggtttgtcctcctcctgtctccacacagacggcttctgcaggtttggtaatctacagtacactccttgcagggaaaaggtgatgagtcatcatggacttatttgaccactttttatgcatgcttagaggaaaacagaatactgttaagagattcatctgctagttattaagtaaagaaatatcacaataggccgggcgcagtggctcacacctgtaatcccagcattttgggaggccaaggtgggcggatcacctgaggtcaggagttcgagaccagcctagccaacatggtgaaaccccgtctctactgaaattataaaaaattagccgggtgtagtggtacacgcctgtagtcccagttacttgggaggctgaggcatgagaattgcttgaacccaggaagtggaggtggaggtgagccgaaattgtgccactgtactccagcctgcaacagagtgagacactgtcacacaaaaaagaaagaaatatcacaatatgtcacaataggccgggcgcagtggctcacacctgcagtcccagcactttgggaggccaaggcagatggatcacctgaggtcaggagtttgagaccagcctggccaacgtgacaaaacccagtctactaaaaatacaaaaattagccaggcgtgatggtgggcacctgtaatcccagctactcaggaggctgagacatgagaatcgcttgaacccaggaggtggagattgcactgagctgagatcctgccactgggctccagcctgggtgacagaatgagactctgtctttaaaaaaaaaaaaaaaagaaaatcacaataagtcctagggtaaagatgggggtacagaaaacaattaaatagaacaaaaacaactgtttccttttcctgtgattcaagaagggcttagatcttctactcagcatccttttactaatgccctccattggctctcaccccaacatttccttttttatagcttattttgtaatgcctccttaattatcctttaatagaagccaccgctgataagctacctacactcatacagaagcattaatataatgccccagatgtactgtttcagggcaaaaaggaaaataatttccaacaaagtggtgtgtgtttcactgtcagatgcttgcacttacacacggaatcgctgtgcatccgacagaggctgattggcacatggggcacggggattgtcagctcaaacaccgtcagcagcgttgcccttggaaatgggatttcccagaacagtaaacgtgtctgtccttgatttacagagtagctacattcctaggaaatccagggtacattaaaactcaccatgttacccaggctggtctcaaactccaggcctcaagcaatcctcccacatcagcttcccagaattttgggattacaggcatgagccaccacacccagccagaatattttatttctgttagacacacagagcgttcgttgactcgtctgggcgttagtgttaatattctgtacttgaagcaagcccaccaagcggctgaactgggtggataatggaaaatgtcctgtggatttgggagtgagacaaaccggcttgagtctaacctctcagttagtctaaggctccaagcttgaaagggttaaatgaagtactatatttgttttgtttcgttttcgttttgtttgaggctttgctctgttgcccaggctggagtgtagtggcacaatctctgctcactgcaacctccatctcccaggttcaggcgattctcttgcctcagcctccagagtagctgggattacaggtgcccgccaccacacccggctaagttttttttggtatttttagtagacacagggtttcaccatgttggctagactggtctcaaactcctgacctcaagtgatccacctgccttggcctcccaaagtgctgggagtataggtggtgagccaccacgcctggcctaaatgaagtaccacatgaccgacagaccgacctggggaacatagcaagaccccatctctacaaaaatgtaaaaaataaaaattagccgggtgtagtggtacatgcctgtaatcctagatactcgggaggctaaggcagaaggatcacttgagcccaggagttcgaggctacaatgagctgtgatcgtgccactgcactccatcctgggtggcagagtgaggccctgtctcaaaataaataatccagtcccccccaagaaaggaatgaagtgctataatgagaaaaatcctagtacctaacatatagtagacagtggagagtggttctctttcgtttctcaggggcagacagatggggtgctggagtcctctatcaaagagtcagagctctatcccagatgtgtaatgaacgtggtcacagacatattgtcccattaccatttaccttccctataaccactgtgcctccagccttgtagaatagacacataggagcgcagcaatacgtctaaaaataggagtgagagagggcagggcatgcccgttcttgtggtagaagaaaagaatgtcaaagaaagcagctgggactaatgaactttacattagccatattccattatttcagcttaagtcaaatgtcggtcctcatgaggcaactggctttgacaggagctacgctaattaccacttaccaacctttaatttctgggtaaaagcaaaagagaaaaactaatggatttttcattttccagagagacaagaataaaataatagtagtctgtagaaaaaagaaaacctgcatcaattacaagaattattaatgtatctttaataaataaccacattatttagctgtttaatttcctaa

SEQ ID NO: 1415 - DNA, 906 bp, Homo sapiens
  source 1..906: mol_type = genomic DNA
gaggtcagagacttaagtctaaggcactgagcgtatcatgttaaagatgagcgggtggcagcgacagagccaaaatcagagctggaacctgaggagagagtgttcaagaaggaagtgtatcttcatacatcaccacacctgaaagcagatgtgcttttccagactgatccaactgcagagatggcagctgagtcattgcctttctccttcgggacactgtccagctgggagctggaagcctggtatgaggacctgcaagaggtcctgtcttcagatgaaaatgggggtacctatgtttcacctcctggaaatgaagaggaagaatcaaaaatcttcaccactcttgaccctgcttctctggcttggctgactgaggaggagccagaaccagcagaggtcacaagcacctcccagagccctcactctccagattccagtcagagctccctggctcaggaggaagaggaggaagaccaagggagaaccaggaaacggaaacagagtggtcattccccagcccgggctggaaagcagcgcatgaaggagaaagaacaggagaatgaaaggaaagtggcacagctagctgaagagaatgaacggctcaagcaggaaatcgagcgcctgaccagggaagtagaggcgactcgccgagctctgattgaccgaatggtgaatctgcaccaagcatgaacaattgggagcatcagtcccccacttgggccacactacccacctttcccagaagtggctactgactaccctctcactagtgccaatgatgtgaccctcaatcccacatacgcagggggaaggcttggagtagacaaaaggaaaggtctcagcttgtatatagagattgtacatttatttattactgtccctatctattaaagtgactttctatga

SEQ ID NO: 1416 - DNA, 872 bp, Homo sapiens
  source 1..872: mol_type = genomic DNA
actgagcgtatcatgttaaagatgagcgggtggcagcgacagagccaaaatcagagctggaacctgaggagagagtgttcaagaaggaagtgtatcttcatacatcaccacacctgaaagcagactgatccaactgcagagatggcagctgagtcattgcctttctccttcgggacactgtccagctgggagctggaagcctggtatgaggacctgcaagaggtcctgtcttcagatgaaaatgggggtacctatgtttcacctcctggaaatgaagaggaagaatcaaaaatcttcaccactcttgaccctgcttctctggcttggctgactgaggaggagccagaaccagcagaggtcacaagcacctcccagagccctcactctccagattccagtcagagctccctggctcaggaggaagaggaggaagaccaagggagaaccaggaaacggaaacagagtggtcattccccagcccgggctggaaagcagcgcatgaaggagaaagaacaggagaatgaaaggaaagtggcacagctagctgaagagaatgaacggctcaagcaggaaatcgagcgcctgaccagggaagtagaggcgactcgccgagctctgattgaccgaatggtgaatctgcaccaagcatgaacaattgggagcatcagtcccccacttgggccacactacccacctttcccagaagtggctactgactaccctctcactagtgccaatgatgtgaccctcaatcccacatacgcagggggaaggcttggagtagacaaaaggaaaggtctcagcttgtatatagagattgtacatttatttattactgtccctatctattaaagtgactttctatgagccaa

SEQ ID NO: 1417 - DNA, 644 bp, Homo sapiens
  source 1..644: mol_type = genomic DNA
agagacttaagtctaaggcactgagcgtatcatgttaaagatgagcgggtggcagcgacagagccaaaatcagagctggaacctgaggagagagtgttcaagaaggaagtgtatcttcatacatcaccacacctgaaagcagtacaactttacctacaaaaacaggcatcagaccagcttgccaacttgtggcatagactgtttgctacatggagcttgttccagccactccccattatcctgcagatgtgcttttccagactgatccaactgcagagatggcagctgagtcattgcctttctccttcgggacactgtccagctgggagctggaagcctggtatgaggacctgcaagaggtcctgtcttcagatgaaaatgggggtacctatgtttcacctcctggaaatgaagaggaagaatcaaaaatcttcaccactcttgaccctgcttctctggcttggctgactgaggaggagccagaaccagcagaggtcacaagcacctcccagagccctcactctccagattccagtcagagctccctggctcaggaggaagaggaggaagaccaagggagaaccaggaaacggaaacagagtggtcattccccagcccgggctggaaagcagcgcatgaaggag

SEQ ID NO: 1418 - DNA, 1067 bp, Homo sapiens
  source 1..1067: mol_type = genomic DNA
gaggtcagagacttaagtctaaggcactgagcgtatcatgttaaagatgagcgggtggcagcgacagagccaaaatcagagctggaacctgaggagagagtgttcaagaaggaagtgtatcttcatacatcaccacacctgaaagcagcaccaaagcagccataaacaatatgtaaataaacagatgtggctgtattccagtacaactttacctacaaaaacaggcatcagaccagcttgccaacttgtggcatagactgtttgctacatggagcttgttccagccactccccattatcctgcagatgtgcttttccagactgatccaactgcagagatggcagctgagtcattgcctttctccttcgggacactgtccagctgggagctggaagcctggtatgaggacctgcaagaggtcctgtcttcagatgaaaatgggggtacctatgtttcacctcctggaaatgaagaggaagaatcaaaaatcttcaccactcttgaccctgcttctctggcttggctgactgaggaggagccagaaccagcagaggtcacaagcacctcccagagccctcactctccagattccagtcagagctccctggctcaggaggaagaggaggaagaccaagggagaaccaggaaacggaaacagagtggtcattccccagcccgggctggaaagcagcgcatgaaggagaaagaacaggagaatgaaaggaaagtggcacagctagctgaagagaatgaacggctcaagcaggaaatcgagcgcctgaccagggaagtagaggcgactcgccgagctctgattgaccgaatggtgaatctgcaccaagcatgaacaattgggagcatcagtcccccacttgggccacactacccacctttcccagaagtggctactgactaccctctcactagtgccaatgatgtgaccctcaatcccacatacgcagggggaaggcttggagtagacaaaaggaaaggtctcagcttgtatatagagattgtacatttatttattactgtccctatctattaaagtgactttctatgagcca

SEQ ID NO: 1419 - DNA, 951 bp, Homo sapiens
  source 1..951: mol_type = genomic DNA
agagacttaagtctaaggcactgagcgtatcatgttaaagatgagcgggtggcagcgacagagccaaaatcagagctggaacctgaggagagagtgttcaagaaggaagtgtatcttcatacatcaccacacctgaaagcaggtaaacttaacctacccttttccaaaaattttaaacggcaggacagtaaatattttagatgttaaaagtcctatagtctctagcgtgactcttcatctctgccactgtagcaccaaagcagccataaacaatatgtaaataaacagatgtggctgtattccagtacaactttacctacaaaaacaggcatcagaccagcttgccaacttgtggcatagactgtttgctacatggagcttgttccagccactccccattatcctgcagatgtgcttttccagactgatccaactgcagagatggcagctgagtcattgcctttctccttcgggacactgtccagctgggagctggaagcctggtatgaggacctgcaagaggtcctgtcttcagatgaaaatgggggtacctatgtttcacctcctggaaatgaagaggaagaatcaaaaatcttcaccactcttgaccctgcttctctggcttggctgactgaggaggagccagaaccagcagaggtcacaagcacctcccagagccctcactctccagattccagtcagagctccctggctcaggaggaagaggaggaagaccaagggagaaccaggaaacggaaacagagtggtcattccccagcccgggctggaaagcagcgcatgaaggagaaagaacaggagaatgaaaggaaagtggcacagctagctgaagagaatgaacggctcaagcaggaaatcgagcgcctgaccagggaagtagaggcgactcgccgagctctgattgaccgaatggtgaatctgcaccaagcatga

SEQ ID NO: 1420 - DNA, 1161 bp, Homo sapiens
  source 1..1161: mol_type = genomic DNA
attccgcttccggcatctggctcagttccgccatggcctccttggaagtcagtcgtagtcctcgcaggtctcggcgggagctggaagtgcgcagtccacgacagaacaaatattcggtgcttttacctacctacaacgagcgcgagaacctgccgctcatcgtgtggctgctggtgaaaagcttctccgagagtggaatcaactatgaaattataatcatagatgatggaagcccagatggaacaagggatgttgctgaacagttggagaagatctatgggtcagacagaattcttctaagaccacgagagaaaaagttgggactaggaactgcatatattcatggaatgaaacatgccacaggaaactacatcattattatggatgctgatctctcacaccatccaaaatttattcctgaatttattaggaagcaaaaggagggtaattttgatattgtctctggaactcgctacaaaggaaatggaggtgtatatggctgggatttgaaaagaaaaataatcagtgatggagttttgccatgttgcccaggctggtcactcctgggctcaagtgatccagccatcttggcctcctgggattacagccgtggggccaattttttaactcagatcttgctgagaccaggagcatctgatttaacaggaagtttcagattataccgaaaagaagttctagagaaattaatagaaaaatgtgtttctaaaggctacgtcttccagatggagatgattgttcgggcaagacagttgaattatactattggcgaggttccaatatcatttgtggatcgtgtttatggtgaatccaagttgggaggaaatgaaatagtatctttcttgaaaggattattgactctttttgctactacataaaagaaagatactcatttatagttacgttcatttcaggttaaacatgaaagaagcctggttactgatttgtataaaatgtactcttaaagtataaaatataaggtaaggtaaatttcatgcatctttttatgaagaccacctattttatatttcaaattaaataattttaaagttgctggcctaatgagcaatgttctcaattttcgttttcattttgctgtattgagacctataaataaatgtatatttttttttgcataaagta

SEQ ID NO: 1421 - DNA, 956 bp, Homo sapiens
  source 1..956: mol_type = genomic DNA
agttccgccatggcctccttggaagtcagtcgtagtcctcgcaggtctcggcgggagctggaagtgcgcagtccacgacagaacaaatattcggtgcttttacctacctacaacgagcgcgagaacctgccgctcatcgtgtggctgctggtgaaaagcttctccgagagtggaatcaactatgaaattataatcatagatgatggaagcccagatggaacaagggatgttgctgaacagttggagaagatctatgggtcagacagaattcttctaagaccacgagagaaaaagttgggactaggaactgcatatattcatggaatgaaacatgccacaggaaactacatcattattatggatgctgatctctcacaccatccaaaatttattcctgaatttattagtgatggagttttgccatgttgcccaggctggtcactcctgggctcaagtgatccagccatcttggcctcctgggattacagccgtggggccaattttttaactcagatcttgctgagaccaggagcatctgatttaacaggaagtttcagattataccgaaaagaagttctagagaaattaatagaaaaatgtgtttctaaaggctacgtcttccagatggagatgattgttcgggcaagacagttgaattatactattggcgaggttccaatatcatttgtggatcgtgtttatggtgaatccaagttgggaggaaatgaaatagtatctttcttgaaaggattattgactctttttgctactacataaaagaaagatactcatttatagttacgttcatttcaggttaaacatgaaagaagcctggttactgatttgtataaaatgtactcttaaagtataaaatataaggtaaggtaaatttcatgcatctttttatgaagaccacctattttatatttcaaattaaataattttaaagttgctgg

SEQ ID NO: 1422 - DNA, 1073 bp, Homo sapiens
  source 1..1073: mol_type = genomic DNA
ggcctccttggaagtcagtcgtagtcctcgcaggtctcggcgggagctggaagtgcgcagtccacgacagaacaaatattcggtgcttttacctacctacaacgagcgcgagaacctgccgctcatcgtgtggctgctggtgaaaagcttctccgagagtggaatcaactatgaaattataatcatagatgatggaagcccagatggaacaagggatgttgctgaacagttggagaagatctatgggtcagacagaattcttctaagaccacgagagaaaaagttgggactaggaactgcatatattcatggaatgaaacatgccacaggaaactacatcattattatggatgctgatctctcacaccatccaaaatttattcctgaatttattaggaagcaaaaggagggtaattttgatattgtctctggaactcgctacaaaggaaatggaggtgtatatggctgggatttgaaaagaaaaataatcagtgatggagttttgccatgttgcccaggctggtcactcctgggctcaagtgatccagccatcttggcctcctgggattacaggtgtgagccaccgcgcctagccagccgtggggccaattttttaactcagatcttgctgagaccaggagcatctgatttaacaggaagtttcagattataccgaaaagaagttctagagaaattaatagaaaaatgtgtttctaaaggctacgtcttccagatggagatgattgttcgggcaagacagttgaattatactattggcgaggttccaatatcatttgtggatcgtgtttatggtgaatccaagttgggaggaaatgaaatagtatctttcttgaaaggattattgactctttttgctactacataaaagaaagatactcatttatagttacgttcatttcaggttaaacatgaaagaagcctggttactgatttgtataaaatgtactcttaaagtataaaatataaggtaaggtaaatttcatgcatctttttatgaagaccacctattttatatttcaaattaaataattttaaagttgctggcctaatga

SEQ ID NO: 1423 - DNA, 1075 bp, Homo sapiens
  source 1..1075: mol_type = genomic DNA
gcttccggcatctggctcagttccgccatggcctccttggaagtcagtcgtagtcctcgcaggtctcggcgggagctggaagtgcgcagtccacgacagaacaaatattcggtgcttttacctacctacaacgagcgcgagaacctgccgctcatcgtgtggctgctggtgaaaagcttctccgagagtggaatcaactatgaaattataatcatagatgatggaagcccagatggaacaagggatgttgctgaacagttggagaagatctatgggtcagacagaattcttctaagaccacgagagaaaaagttgggactaggaactgcatatattcatggaatgaaacatgccacaggaaactacatcattattatggatgctgatctctcacaccatccaaaatttattcctgaatttattaggaagcaaaaggagggtaattttgatattgtctctggaactcgctacaaaggaaatggaggtgtatatggctgggatttgaaaagaaaaataatcagccgtggggccaattttttaactcagatcttgctgagaccaggagcatctgatttaacaggaagtttcagattataccgaaaagaagttctagagaaattaatagaaaaatgtgtttctaaaggctacgtcttccagatggagatgattgttcgggcaagacagttgaattatactattggcgaggttccaatatcatttgtggatcgtgtttatggtgaatccaagttgggaggaaatgaaatagtatctttcttgaaaggattattgactctttttgctactacataaaagaaagatactcatttatagttacgttcatttcaggttaaacatgaaagaagcctggttactgatttgtataaaatgtactcttaaagtataaaatataaggtaaggtaaatttcatgcatctttttatgaagaccacctattttatatttcaaattaaataattttaaagttgctggcctaatgagcaatgttctcaattttcgttttcattttgctgtattgagacctataaataaatgtatatttttttttgcataaagta

SEQ ID NO: 1424 - DNA, 672 bp, Homo sapiens
  source 1..672: mol_type = genomic DNA
agttccgccatggcctccttggaagtcagtcgtagtcctcgcaggtctcggcgggagctggaagtgcgcagtccacgacagaacaaatattcggtgcttttacctacctacaacgagcgcgagaacctgccgctcatcgtgtggctgctggtgaaaagcttctccgagagtggaatcaactatgaaattataatcatagatgatggaagcccagatggaacaagggatgttgctgaacagttggagaagatctatgggtcagacagaattcttctaagaccacgagagaaaaagttgggactaggaactgcatatattcatggaatgaaacatgccacaggaaactacatcattattatggatgctgatctctcacaccatccaaaatttattcctgaatttattagtgatggagttttgccatgttgcccaggctggtcactcctgggctcaagtgatccagccatcttggcctcctgggattacagccgtggggccaattttttaactcagatcttgctgagaccaggagcatctgatttaacaggaagtttcagattataccgaaaagaagttctagagaaattaatagaaaaatgtgtttctaaaggctacgtcttccagatggagatgattgttcgggcaagacagttgaattatactattggcgag

SEQ ID NO: 1425 - DNA, 1076 bp, Homo sapiens
  source 1..1076: mol_type = genomic DNA
agttccgccatggcctccttggaagtcagtcgtagtcctcgcaggtctcggcgggagctggaagtgcgcagtccacgacagaacaaatattcggtgcttttacctacctacaacgagcgcgagaacctgccgctcatcgtgtggctgctggtgaaaagcttctccgagagtggaatcaactatgaaattataatcatagatgatggaagcccagatggaacaagggatgttgctgaacagttggagaagatctatgggtcagacagaattcttctaagaccacgagagaaaaagttgggactaggaactgcatatattcatggaatgaaacatgccacaggaaactacatcattattatggatgctgatctctcacaccatccaaaatttattcctgaatttattaggaagcaaaaggagggtaattttgatattgtctctggaactcgctacaaaggaaatggaggtgtatatggctgggatttgaaaagaaaaataatcagtgatggagttttgccatgttgcccaggctggtcactcctgggctcaagtgatccagccatcttggcctcctgggattacaggtgtgagccaccgcgcctagccagccgtggggccaattttttaactcagatcttgctgagaccaggagcatctgatttaacaggaagtttcagattataccgaaaagaagttctagagaaattaatagaaaaatgtgtttctaaaggctacgtcttccagatggagatgattgttcgggcaagacagttgaattatactattggcgaggttccaatatcatttgtggatcgtgtttatggtgaatccaagttgggaggaaatgaaatagtatctttcttgaaaggattattgactctttttgctactacataaaagaaagatactcatttatagttacgttcatttcaggttaaacatgaaagaagcctggttactgatttgtataaaatgtactcttaaagtataaaatataaggtaaggtaaatttcatgcatctttttatgaagaccacctattttatatttcaaattaaataattttaaagttgctgg

SEQ ID NO: 1426 - DNA, 2194 bp, Homo sapiens
  source 1..2194: mol_type = genomic DNA
ctgtctttttagtaccacatgcgcaggcaggtgatggcggcgctggtcgtatccggggcagcggagcagggcggccgagacggccctggcagaggtcgggcccctcggggccgcgtggccaatcagatcccccctgagatcctgaagaaccctcagctgcaggcagcaatccgggtcctgccttccaactacaactttgagatccccaagaccatctggaggatccaacaagcccaggccaagaaggtggccttgcaaatgccggaaggcctcctcctctttgcctgtaccattgtggatatcttggaaaggttcacggaggccgaagtgatggtgatgggtgacgtgacctacggggcttgctgtgtggatgacttcacagcgagggccctgggagctgacttcttggtgcactacggccacagttgcctgattcccatggacacctcggcccaagacttccgggtgctgtacgtctttgtggacatccggatagacactacacacctcctggactctctccgcctcacctttcccccagccactgcccttgccctggtcagcaccattcagtttgtgtcgaccttgcaggcagccgcccaggagctgaaagccgagtatcgtgtgagtgtcccacagtgcaagcccctgtcccctggagagatcctgggctgcacatccccccgactgtccaaagaggtggaggccgttgtgtatcttggagatggccgcttccatctggagtctgtcatgattgccaaccccaatgtccccgcttaccggtatgacccatatagcaaagtcctatccagagaacactatgaccaccagcgcatgcaggctgctcgccaagaagccatagccactgcccgctcagctaagtcctggggccttattctgggcactttgggccgccagggcagtcctaagatcctggagcacctggaatctcgactccgagccttgggcctttcctttgtgaggctgctgctctctgagatcttccccagcaagcttagcctacttcctgaggtggatgtgtgggtgcaggtggcatgtccacgtctctccattgactggggcacagccttccccaagccgctgctgacaccctatgaggcggccgtggctctgagggacatttcctggcagcagccctacccgatggacttctacgctggcagctccttggggccctggacggtgaaccacggccaggaccgccgtccccacgccccgggccggcccgcgcgggggaaggtgcaggaggggtccgcgcgtcccccttcggccgtggcttgcgaggactgcagctgcagggacgagaaggtggcgccgctggctccttgacgcgctcccgggcctcagggtcctgccctccggaggagcagcctcgaggctggtggttttcagagcaggaggccgacgttttctccgcattggaagagcccgccgtctgcaggggcctggaggaatcactggggatggtggcacaggcactgaacaggctggggccttttgacggccttcttggtttcagccaaggggctgcgctagcagcccttgtgtgtgccctgggccaggcaggcgatccccgcttccccttgccacggtttatcctcttggtgtctggtttctgtccccggggcattgggttcaaggaatccatcctgcaaaggcccttgtcattgccttcgctccatgtttttggggacactgacaaagtcatcccctctcaggagagtgtgcaactggccagccaatttcccggagccatcaccctcacccactctggtggccacttcattccagcagctgcaccccagcgtcaggcctacctcaagttcttggaccagtttgcagagtgaaagatcaagaaatgtctctgctcctacatccagctcctctaggggcagcctccgtcatccatgccctcccaggaccctccactcactgctgtgagtgcgcctcaccagaaccagttaagagacaactatcaattcttgagacccaaattataagggccctgccctgtactgaagaaaaggggagcacaaggccttaatggacattgacttgtgaaaacgcaaacatgaatatggttggagagccctggattaggagggtgacatggggaaggcagaggctggcaccatggtgactgccacataataaagtggtgatttggattttg

SEQ ID NO: 1427 - DNA, 4359 bp, Homo sapiens
  source 1..4359: mol_type = genomic DNA
tttgtttctgcactctacattgttttaatgaaaataaaatgttattttaagaaaaaaggttttcttctgattttctgcacaaccagacgtttgtttgtttgctttaaaatgtttcaacaaaatcctggtttgtttcgaaatatgttggattagcatttaacacctcatcggtcactaaagcccagtcagttcaccagccccaacacagcctcggctaaaagaacatcagagcaaacagagctgggcctttaaaagtggcaaacaaatgccacacaccgcctaaagaaggggggttgggggaggggagggttaaggcgaacttgggtccaaatgagtttgaagggaatacaaagaacgaaaagtcagcacaagttttcctaaagctagctcgcgaacgcaagcgtcgcgaacaagggcttttgtgcatgctaattgcgccattggtgcgcaaaagttccgacgcgaagtgtgaactctcaacagaaggaaacatgagacaactgaagtgccctggtttatgtgccctgctcctcctccgctgccgcctccccttctttctccttcctcccgccgagcccgctgttgcagcttgtttgcactggggcttatccggagcggaaattcctttccgtttttgtgaatgacaaactcattaacaattcatcaacacaacctgttccagccggcccgtccccacggcaacagccccttccgcagcacgctcattggctggcccggagaatgtatccattgagacgctcgctgtttgtatccattgaggagctgcctcgcgcagggggtgtgcgaggctgagtccaagagatagcaaatcgagtcttaaataatccggggagaaagacgcccgggtagatttgaggtgcagccttggagggagggattagaagccgctagactttttttcctcccctctcagtagcacggagtccgaattaattggatttcattcactggggaggaacaaaaactatctgggcagcttcattgagagagattcattgacactaagagccagcggctgcagctgggtgcagagagaacctccggctttacttctgtctcgtctgccccaaccgctagcctcggcttgggtaaggcgaggcggaattaaaccccgctccgagagcggcagcttcgcgcgcggtgcgctcggcctatgcctgccccgaggggcgtctggtaggcaccccgccctctcccgcagctcgacccccatgatagatacgctcagacccgtgcccttcgcgtcggaaatggcgatcagcaagacggtggcgtggctcaacgagcagctggagctgggcaacgagcggctgctgctgatggactgccggccgcaggagctatacgagtcgtcgcacatcgagtcggccatcaacgtggccatcccgggcatcatgctgcggcgcctgcagaagggtaacctgccggtgcgcgcgctcttcacgcgcggcgaggaccgggaccgcttcacccggcgctgtggcaccgacacagtggtgctctacgacgagagcagcagcgactggaacgagaatacgggcggcgagtcggtgctcgggctgctgctcaagaagctcaaggacgagggctgccgggcgttctacctggaaggtggcttcagtaagttccaagccgagttctccctgcattgcgagaccaatctagacggctcgtgtagcagcagctcgccgccgttgccagtgctggggctcgggggcctgcggatcagctctgactcttcctcggacatcgagtctgaccttgaccgagaccccaatagtgcaacagactcggatggtagtccgctgtccaacagccagccttccttcccagtggagatcttgcccttcctctacttgggctgtgccaaagactccaccaacttggacgtgttggaggaattcggcatcaagtacatcttgaacgtcacccccaatttgccgaatctctttgagaacgcaggagagtttaaatacaagcaaatccccatctcggatcactggagccaaaacctgtcccagtttttccctgaggccatttctttcatagatgaagcccggggcaagaactgtggtgtcttggtacattgcttggctggcattagccgctcagtcactgtgactgtggcttaccttatgcagaagctcaatctgtcgatgaacgacgcctatgacattgtcaaaatgaaaaaatccaacatatcccctaacttcaacttcatgggtcagctgctggacttcgagaggacgctgggactcagcagcccatgtgacaacagggttccagcacagcagctgtattttaccaccccttccaaccagaatgtataccaggtggactctctgcaatctacgtgaaagaccccacacccctccttgctggaatgtgtctggcccttcagcagtttctcttggcagcatcagctgggctgctttctttgtgtgtggccccaggtgtcaaaatgacaccagctgtctgtactagacaaggttaccaagtgcggaattggttaatactaacagagagatttgctccattctctttggaataacaggacatgctgtatagatacaggcagtaggtttgctctgtacccatgtgtacagcctacccatgcagggactgggattcgaggacttccaggcgcatagggtagaaccaaatgatagggtaggagcatgtgttctttagggccttgtaaggctgtttccttttgcatctggaactgactatataattgtcttcaatgaagactaattcaattttgcatatagaggagccaaagagagatttcagctctgtatttgtggtatcagtttggaaaaaaaaatctgatactccatttgattattgtaaatatttgatcttgaatcacttgacagtgtttgtttgaattgtgtttgttttttcctttgatgggcttaaaagaaattatccaaagggagaaagagcagtatgccacttcttaaaacagaacaaaacaaaaaaagaaaattgtgctcttttctaatccaaagggtatatttgcagcatgcttgactttaccaattctgatgacatctttacggacactattatcactaagaccttgttatggcgaagtctttagtctttttcatgtattttcctcatgattttttctctttatgtagtttgactatgccttacctttgtaaatatttttgcttgtgttgtcgcaaaggggataatctgggaaagacaccaaatcatgggctcactttaaaaaaagaaagaataaaaaaaccttcagctgtgctaaacagtatattacctctgtataaaattcttcagggagtgtcacctcaaatgcaatactttgggttggtttctttcctttaaaaaaatttgtataaaactggaagtgtgtgtgtgtgagcatgggtacccatttgataagagaaatgcatttgattgtgaagaagggagagttaaattctccattatgttcgtggtgtaaagtttagagctggaatttattataagaatgtaaaaccttaaattattaataaataactattttggctattgaatgtgtgtttttaaaaactcagttatacctatgtgtgaagtgacacattttagaactttttcattcagggattgattttgacttgtaggcatagtagggcaaggttcttttaagcttttcctagaacgtttttcagcagcagtttatgaaattcatcgtttgccacgaataaagatgacatcctagaatggaccgactgtaccgtgtatatgaacaatacctcttatgagtatagttccggcttaagattttaaagcccctgaagaaaaatgaacctatagagcatagcttgctgaggaatacaatttggatattaaccacagagaggtgtagcagaataccaagatgacagccacatgttaacctcctccctatccttcactgtcaggatcttctgctttataatgctgagataatgccaaagaggaagtagggataattctttttccagtctgttgtcatgggcaattctacctgcagatatcctagtgtgagaatgctgaatccagaatgatgtctccactttttcccctagcatgcgcatggcaaggcatatctaagcttcctcaccgtgtcaggatatggctttagaattttacattggcacttaggaggcaactttgtcatccctgttgtaatgtgcttttttgtttaactggcttgggatgtgggtcagaaacccttattgaaacttgtggggattattttagtttcttttcaagctaaagactttatatcttgccatttttcttgggacctaccctctccttacctcaaatgtaaaaata

SEQ ID NO: 1428 - DNA, 1959 bp, Homo sapiens
  source 1..1959: mol_type = genomic DNA
gtagatttgaggtgcagccttggagggagggattagaagccgctagactttttttcctcccctctcagtagcacggagtccgaattaattggatttcattcactggggaggaacaaaaactatctgggcagcttcattgagagagattcattgacactaagagccagcggctgcagctgggtgcagagagaacctccggctttacttctgtctcgtctgccccaaccgctagcctcggcttgggtaaggcgaggcggaattaaaccccgctccgagagcggcagcttcgcgcgcggtgcgctcggcctatgcctgccccgaggggcgtctggtaggcaccccgccctctcccgcagctcgacccccatgatagatacgctcagacccgtgcccttcgcgtcggaaatggcgatcagcaagacggtggcgtggctcaacgagcagctggagctgggcaacgagcggctgctgctgatggactgccggccgcaggagctatacgagtcgtcgcacatcgagtcggccatcaacgtggccatcccgggcatcatgctgcggcgcctgcagaagggtaacctgccggtgcgcgcgctcttcacgcgcggcgaggaccgggaccgcttcacccggcgctgtggcaccgacacagtggtgctctacgacgagagcagcagcgactggaacgagaatacgggcggcgagtcggtgctcgggctgctgctcaagaagctcaaggacgagggctgccgggcgttctacctggaagatgaagcccggggcaagaactgtggtgtcttggtacattgcttggctggcattagccgctcagtcactgtgactgtggcttaccttatgcagaagctcaatctgtcgatgaacgacgcctatgacattgtcaaaatgaaaaaatccaacatatcccctaacttcaacttcatgggtcagctgctggacttcgagaggacgctgggactcagcagcccatgtgacaacagggttccagcacagcagctgtattttaccaccccttccaaccagaatgtataccaggtggactctctgcaatctacgtgaaagaccccacacccctccttgctggaatgtgtctggcccttcagcagtttctcttggcagcatcagctgggctgctttctttgtgtgtggccccaggtgtcaaaatgacaccagctgtctgtactagacaaggttaccaagtgcggaattggttaatactaacagagagatttgctccattctctttggaataacaggacatgctgtatagatacaggcagtaggtttgctctgtacccatgtgtacagcctacccatgcagggactgggattcgaggacttccaggcgcatagggtagaaccaaatgatagggtaggagcatgtgttctttagggccttgtaaggctgtttccttttgcatctggaactgactatataattgtcttcaatgaagactaattcaattttgcatatagaggagccaaagagagatttcagctctgtatttgtggtatcagtttggaaaaaaaaatctgatactccatttgattattgtaaatatttgatcttgaatcacttgacagtgtttgtttgaattgtgtttgttttttcctttgatgggcttaaaagaaattatccaaagggagaaagagcagtatgccacttcttaaaacagaacaaaacaaaaaaagaaaattgtgctcttttctaatccaaagggtatatttgcagcatgcttgactttaccaattctgatgacatctttacggacactattatcactaagaccttgttatggcgaagtctttagtctttttcatgtattttcctcatgattttttctctttatgtagtttgactatgccttacctttgtaaatatttttgcttgtgttgtcgcaaaggggataatctgggaaagacaccaaatcatgggctcacttt

SEQ ID NO: 1429 - DNA, 567 bp, Homo sapiens
  source 1..567: mol_type = genomic DNA
attgaggagctgcctcgcgcagggggtgtgcgaggctgagtccaagagatagcaaatcgagtcttaaataatccggggagaaagacgcccgggtagatttgaggcggaattaaaccccgctccgagagcggcagcttcgcgcgcggtgcgctcggcctatgcctgccccgaggggcgtctggtaggcaccccgccctctcccgcagctcgacccccatgatagatacgctcagacccgtgcccttcgcgtcggaaatggcgatcagcaagacggtggcgtggctcaacgagcagctggagctgggcaacgagcggctgctgctgatggactgccggccgcaggagctatacgagtcgtcgcacatcgagtcggccatcaacgtggccatcccgggcatcatgctgcggcgcctgcagaagggtaacctgccggtgcgcgcgctcttcacgcgcggcgaggaccgggaccgcttcacccggcgctgtggcaccgacacagtggtgctctacgacgagagcagcagcgactggaacgagaatacgggcggcgagtcggtgctcgggctg

SEQ ID NO: 1430 - DNA, 2577 bp, Homo sapiens
  source 1..2577: mol_type = genomic DNA
agcaaatcgcattgcgcagacgaccagcgggcgcctcggattccgcccccgggatggccccgcctcctcccgccccgcggcaaggcacgcacagggcagtgcgcgggtgggtgggtcctagcagcgcggcctgacgggaccaaggcggcgggagtctgcggtcgttccctcggctgtggaccgggcggcacgcacgcggtgcagggtaacatggcggatgcggaagtaattattttgccaaagaaacataagaagaaaaaggagcggaagtcattgccagaagaagatgtagccgaaatacaacacgctgaagaatttcttatcaaacctgaatccaaagttgctaagttggacacgtctcagtggccccttttgctaaagaattttgataagctgaatgtaaggacaacacactatacacctcttgcatgtggttcaaatcctctgaagagagagattggggactatatcaggacaggtttcattaatcttgacaagccctctaacccctcttcccatgaggtggtagcctggattcgacggatacttcgggtggagaagacagggcacagtggtacgctggatcccaaggtgactggttgtttaatcgtgtgcatagaacgagccactcgcttggtgaagtcacaacagagtgcaggcaaagagtatgtggggattgtccggctgcacaatgctattgaaggggggacccagctttctagggccctagaaactctgacaggtgccttattccagcgacccccacttattgctgcagtaaagaggcagctccgagtgaggaccatctacgagagcaaaatgattgaatacgatcctgaaagaagattaggaatcttttgggtgagttgtgaggctggcacctacattcggacattatgtgtgcaccttggtttgttattgggagttggtggtcagatgcaggagcttcggagggttcgttctggagtcatgagtgaaaaggaccacatggtgacaatgcatgatgtgcttgatgctcagtggctgtatgataaccacaaggatgagagttacctgcggcgagttgtttaccctttggaaaagctgttgacatctcataaacggctggttatgaaagacagtgcagtaaatgccatctgctatggggccaagattatgcttccaggtgttcttcgatatgaggacggcattgaggtcaatcaggagattgtggttatcaccaccaaaggagaagcaatctgcatggctattgcattaatgaccacagcggtcatctctacctgcgaccatggtatagtagccaagatcaagagagtgatcatggagagagacacttaccctcggaagtggggtttaggtccaaaggcaagtcagaagaagctgatgatcaagcagggccttctggacaagcatgggaagcccacagacagcacacctgccacctggaagcaggagtatgttgactacagtgagtctgccaaaaaagaggtggttgctgaagtggtaaaagccccgcaggtagttgccgaagcagcaaaaactgcgaagcggaagcgagagagtgagagtgaaagtgacgagactcctccagcagctcctcagttgatcaagaaggaaaagaagaagagtaagaaggacaagaaggccaaagctggtctggagagcggggccgagcctggagatggggacagtgataccaccaagaagaagaagaagaagaagaaagcaaaagaggtagaattggtttctgagtagtgaaggccacttgaagctggaggagaaactaaagccttattgagaaaacatgttatagatccttttgttgctgagagagtggaacataggtcctagacagggtgaagagttctggcacattttagctgctactttgagacctcggtgatgttacctggtgtggtcatcccatcttgtcctgttttaaggatatgggtggtgaaagatgaaagaggcagagtttatcccaatgacttctctgtttgagttgggaagcctcaccttcagacccagtaactgtccgcagctgtctgctagtggttgtcttaacatcgtagtcctagtttgcattttttaaatcccctctgtttaaaaggtttgtaaaacaaaaacaaaaaactaagtctgctcagtgaaatgctgtagaaccctaaataagtggtagaagagtgtcactgaattttgtctctgaattcagtataactgagttttgtccatgctggtgtctgggttataggcctgatgggcctggtagttttccatcttgttctggcctagaggtcagtcctttgcacttcctcaaagcttgtgtacagtgctcacctaaatccatctgactacttgttcctgtgccctcttgttttaggcctcgtttacttttaaaaaatgaaattgttcattgctgggagaagaatgttgtaatttttacttattaaagtcaacttgttaagttttttatgtattcctgttgggttttcttgttgatctcatgctagcagagcaaaaattgtaaaatattttgattaaaaatctagggacctttatgtcctatttgaaatgtga

SEQ ID NO: 1431 - DNA, 9585 bp, Homo sapiens
  source 1..9585: mol_type = genomic DNA
cttgtttgtgtgctaggctgggggggagagagggcgagagagagcgggcgagagtgggcaagcaggacgccgggctgagtgctaactgcgggagccagagagtgcggaggggagtcgggtcggagagaggcggcaggggccgagacagtggcagggggcccggggcgcacgggctgaggcgacccccagccccctcccgtccgcacacacccccaccgcggtccagcagccgggccggcgtcgacgcctaggggggaccattacataaccccgcgccccgcggcgtcttctcccgccgccgcgggcggccccgaacggagccccggggggcgggcgctcccagcacctggccgccggcggtgggggccgtagcagcggccgtatttatttattttccgcgggaaaggaaggcgaaggaggggagcgcggcgcgaggaggggccgcctgcgccgccgccggagcggggcctcctcggtgggctccgcgtcggcgcgggcgtgcgggcggcgctgctcggcccggccccctcggccctctggtccggccagctccgctcccggcgtccttgccgcgcctccgccggccgccgcgcgatgtgaggcggcggcgccagcctggctctcggctcgggcgagttctctgcggccattaggggccggtgcggcggcggcggcgcggagcgcggcggcaggaggagggttcggagggtgggggcgcaggcccgggagggggcaccgggaggaggtgagtgtctcttgtcgcctcctcctctccccccttttcgcccccgcctccttgtggcgatgagaaggaggaggacagcgccgaggaggaagaggttgatggcggcggcggagctccgagagacctcggctgggcaggggccggccgtggcgggccggggactgcgcctctagagccgcgagttctcgggaattcgccgcagcggacgcgctcggcgaatttgtgctcttgtgccctcctccgggcttgggcccaggcccggcccctcgcacttgcccttaccttttctatcgagtccgcatccctctccagccactgcgacccggcgaagagaaaaaggaacttcccccaccccctcgggtgccgtcggagccccccagcccacccctgggtgcggcgcggggaccccgggccgaagaagagatttcctgaggattctggttttcctcgcttgtatctccgaaagaattaaaaatggccgagaatgtggtggaaccggggccgccttcagccaagcggcctaaactctcatctccggccctctcggcgtccgccagcgatggcacagattttggctctctatttgacttggagcacgacttaccagatgaattaatcaactctacagaattgggactaaccaatggtggtgatattaatcagcttcagacaagtcttggcatggtacaagatgcagcttctaaacataaacagctgtcagaattgctgcgatctggtagttcccctaacctcaatatgggagttggtggcccaggtcaagtcatggccagccaggcccaacagagcagtcctggattaggtttgataaatagcatggtcaaaagcccaatgacacaggcaggcttgacttctcccaacatggggatgggcactagtggaccaaatcagggtcctacgcagtcaacaggtatgatgaacagtccagtaaatcagcctgccatgggaatgaacacagggatgaatgcgggcatgaatcctggaatgttggctgcaggcaatggacaagggataatgcctaatcaagtcatgaacggttcaattggagcaggccgagggcgacagaatatgcagtacccaaacccaggcatgggaagtgctggcaacttactgactgagcctcttcagcagggctctccccagatgggaggacaaacaggattgagaggcccccagcctcttaagatgggaatgatgaacaaccccaatccttatggttcaccatatactcagaatcctggacagcagattggagccagtggccttggtctccagattcagacaaaaactgtactatcaaataacttatctccatttgctatggacaaaaaggcagttcctggtggaggaatgcccaacatgggtcaacagccagccccgcaggtccagcagccaggcctggtgactccagttgcccaagggatgggttctggagcacatacagctgatccagagaagcgcaagctcatccagcagcagcttgttctccttttgcatgctcacaagtgccagcgccgggaacaggccaatggggaagtgaggcagtgcaaccttccccactgtcgcacaatgaagaatgtcctaaaccacatgacacactgccagtcaggcaagtcttgccaagtggcacactgtgcatcttctcgacaaatcatttcacactggaagaattgtacaagacatgattgtcctgtgtgtctccccctcaaaaatgctggtgataagagaaatcaacagccaattttgactggagcacccgttggacttggaaatcctagctctctaggggtgggtcaacagtctgcccccaacctaagcactgttagtcagattgatcccagctccatagaaagagcctatgcagctcttggactaccctatcaagtaaatcagatgccgacacaaccccaggtgcaagcaaagaaccagcagaatcagcagcctgggcagtctccccaaggcatgcggcccatgagcaacatgagtgctagtcctatgggagtaaatggaggtgtaggagttcaaacgccgagtcttctttctgactcaatgttgcattcagccataaattctcaaaacccaatgatgagtgaaaatgccagtgtgccctccctgggtcctatgccaacagcagctcaaccatccactactggaattcggaaacagtggcacgaagatattactcaggatcttcgaaatcatcttgttcacaaactcgtccaagccatatttcctacgccggatcctgctgctttaaaagacagacggatggaaaacctagttgcatatgctcggaaagttgaaggggacatgtatgaatctgcaaacaatcgagcggaatactaccaccttctagctgagaaaatctataagatccagaaagaactagaagaaaaacgaaggaccagactacagaagcagaacatgctaccaaatgctgcaggcatggttccagtttccatgaatccagggcctaacatgggacagccgcaaccaggaatgacttctaatggccctctacctgacccaagtatgatccgtggcagtgtgccaaaccagatgatgcctcgaataactccacaatctggtttgaatcaatttggccagatgagcatggcccagccccctattgtaccccggcaaacccctcctcttcagcaccatggacagttggctcaacctggagctctcaacccgcctatgggctatgggcctcgtatgcaacagccttccaaccagggccagttccttcctcagactcagttcccatcacagggaatgaatgtaacaaatatccctttggctccgtccagcggtcaagctccagtgtctcaagcacaaatgtctagttcttcctgcccggtgaactctcctataatgcctccagggtctcaggggagccacattcactgtccccagcttcctcaaccagctcttcatcagaattcaccctcgcctgtacctagtcgtacccccacccctcaccatactcccccaagcataggggctcagcagccaccagcaacaacaattccagcccctgttcctacacctcctgccatgccacctgggccacagtcccaggctctacatccccctccaaggcagacacctacaccaccaacaacacaacttccccaacaagtgcagccttcacttcctgctgcaccttctgctgaccagccccagcagcagcctcgctcacagcagagcacagcagcgtctgttcctaccccaacagcaccgctgcttcctccgcagcctgcaactccactttcccagccagctgtaagcattgaaggacaggtatcaaatcctccatctactagtagcacagaagtgaattctcaggccattgctgagaagcagccttcccaggaagtgaagatggaggccaaaatggaagtggatcaaccagaaccagcagatactcagccggaggatatttcagagtctaaagtggaagactgtaaaatggaatctaccgaaacagaagagagaagcactgagttaaaaactgaaataaaagaggaggaagaccagccaagtacttcagctacccagtcatctccggctccaggacagtcaaagaaaaagattttcaaaccagaagaactacgacaggcactgatgccaactttggaggcactttaccgtcaggatccagaatcccttccctttcgtcaacctgtggaccctcagcttttaggaatccctgattactttgatattgtgaagagccccatggatctttctaccattaagaggaagttagacactggacagtatcaggagccctggcagtatgtcgatgatatttggcttatgttcaataatgcctggttatataaccggaaaacatcacgggtatacaaatactgctccaagctctctgaggtctttgaacaagaaattgacccagtgatgcaaagccttggatactgttgtggcagaaagttggagttctctccacagacactgtgttgctacggcaaacagttgtgcacaatacctcgtgatgccacttattacagttaccagaacaggtatcatttctgtgagaagtgtttcaatgagatccaaggggagagcgtttctttgggggatgacccttcccagcctcaaactacaataaataaagaacaattttccaagagaaaaaatgacacactggatcctgaactgtttgttgaatgtacagagtgcggaagaaagatgcatcagatctgtgtccttcaccatgagatcatctggcctgctggattcgtctgtgatggctgtttaaagaaaagtgcacgaactaggaaagaaaataagttttctgctaaaaggttgccatctaccagacttggcacctttctagagaatcgtgtgaatgactttctgaggcgacagaatcaccctgagtcaggagaggtcactgttagagtagttcatgcttctgacaaaaccgtggaagtaaaaccaggcatgaaagcaaggtttgtggacagtggagagatggcagaatcctttccataccgaaccaaagccctctttgcctttgaagaaattgatggtgttgacctgtgcttctttggcatgcatgttcaagagtatggctctgactgccctccacccaaccagaggagagtatacatatcttacctcgatagtgttcatttcttccgtcctaaatgcttgaggactgcagtctatcatgaaatcctaattggatatttagaatatgtcaagaaattaggttacacaacagggcatatttgggcatgtccaccaagtgagggagatgattatatcttccattgccatcctcctgaccagaagatacccaagcccaagcgactgcaggaatggtacaaaaaaatgcttgacaaggctgtatcagagcgtattgtccatgactacaaggatatttttaaacaagctactgaagatagattaacaagtgcaaaggaattgccttatttcgagggtgatttctggcccaatgttctggaagaaagcattaaggaactggaacaggaggaagaagagagaaaacgagaggaaaacaccagcaatgaaagcacagatgtgaccaagggagacagcaaaaatgctaaaaagaagaataataagaaaaccagcaaaaataagagcagcctgagtaggggcaacaagaagaaacccgggatgcccaatgtatctaacgacctctcacagaaactatatgccaccatggagaagcataaagaggtcttctttgtgatccgcctcattgctggccctgctgccaactccctgcctcccattgttgatcctgatcctctcatcccctgcgatctgatggatggtcgggatgcgtttctcacgctggcaagggacaagcacctggagttctcttcactccgaagagcccagtggtccaccatgtgcatgctggtggagctgcacacgcagagccaggaccgctttgtctacacctgcaatgaatgcaagcaccatgtggagacacgctggcactgtactgtctgtgaggattatgacttgtgtatcacctgctataacactaaaaaccatgaccacaaaatggagaaactaggccttggcttagatgatgagagcaacaaccagcaggctgcagccacccagagcccaggcgattctcgccgcctgagtatccagcgctgcatccagtctctggtccatgcttgccagtgtcggaatgccaattgctcactgccatcctgccagaagatgaagcgggttgtgcagcataccaagggttgcaaacggaaaaccaatggcgggtgccccatctgcaagcagctcattgccctctgctgctaccatgccaagcactgccaggagaacaaatgcccggtgccgttctgcctaaacatcaagcagaagctccggcagcaacagctgcagcaccgactacagcaggcccaaatgcttcgcaggaggatggccagcatgcagcggactggtgtggttgggcagcaacagggcctcccttcccccactcctgccactccaacgacaccaactggccaacagccaaccaccccgcagacgccccagcccacttctcagcctcagcctacccctcccaatagcatgccaccctacttgcccaggactcaagctgctggccctgtgtcccagggtaaggcagcaggccaggtgacccctccaacccctcctcagactgctcagccaccccttccagggcccccacctgcagcagtggaaatggcaatgcagattcagagagcagcggagacgcagcgccagatggcccacgtgcaaatttttcaaaggccaatccaacaccagatgcccccgatgactcccatggcccccatgggtatgaacccacctcccatgaccagaggtcccagtgggcatttggagccagggatgggaccgacagggatgcagcaacagccaccctggagccaaggaggattgcctcagccccagcaactacagtctgggatgccaaggccagccatgatgtcagtggcccagcatggtcaacctttgaacatggctccacaaccaggattgggccaggtaggtatcagcccactcaaaccaggcactgtgtctcaacaagccttacaaaaccttttgcggactctcaggtctcccagctctcccctgcagcagcaacaggtgcttagtatccttcacgccaacccccagctgttggctgcattcatcaagcagcgggctgccaagtatgccaactctaatccacaacccatccctgggcagcctggcatgccccaggggcagccagggctacagccacctaccatgccaggtcagcagggggtccactccaatccagccatgcagaacatgaatccaatgcaggcgggcgttcagagggctggcctgccccagcagcaaccacagcagcaactccagccacccatgggagggatgagcccccaggctcagcagatgaacatgaaccacaacaccatgccttcacaattccgagacatcttgagacgacagcaaatgatgcaacagcagcagcaacagggagcagggccaggaataggccctggaatggccaaccataaccagttccagcaaccccaaggagttggctacccaccacagcagcagcagcggatgcagcatcacatgcaacagatgcaacaaggaaatatgggacagataggccagcttccccaggccttgggagcagaggcaggtgccagtctacaggcctatcagcagcgactccttcagcaacagatggggtcccctgttcagcccaaccccatgagcccccagcagcatatgctcccaaatcaggcccagtccccacacctacaaggccagcagatccctaattctctctccaatcaagtgcgctctccccagcctgtcccttctccacggccacagtcccagcccccccactccagtccttccccaaggatgcagcctcagccttctccacaccacgtttccccacagacaagttccccacatcctggactggtagctgcccaggccaaccccatggaacaagggcattttgccagcccggaccagaattcaatgctttctcagcttgctagcaatccaggcatggcaaacctccatggtgcaagcgccacggacctgggactcagcaccgataactcagacttgaattcaaacctctcacagagtacactagacatacactagagacaccttgtagtattttgggagcaaaaaaattattttctcttaacaagactttttgtactgaaaacaatttttttgaatctttcgtagcctaaaagacaattttccttggaacacataagaactgtgcagtagccgtttgtggtttaaagcaaacatgcaagatgaacctgagggatgatagaatacaaagaatatatttttgttatggctggttaccaccagcctttcttcccctttgtgtgtgtggttcaagtgtgcactgggaggaggctgaggcctgtgaagccaaacaatatgctcctgccttgcacctccaataggttttattattttttttaaattaatgaacatatgtaatattaatagttattatttactggtgcagatggttgacatttttccctattttcctcactttatggaagagttaaaacatttctaaaccagaggacaaaaggggttaatgttactttaaaattacattctatatatatataaatatatataaatatatattaaaataccagttttttttctctgggtgcaaagatgttcattcttttaaaaaatgtttaaaaaaaaaaaaaaactgcctttcttcccctcaagtcaacttttgtgctccagaaaattttctattctgtaagtctgagcgtaaaacttcaagtattaaaataatttgtacatgtagagagaaaaatgactttttcaaaaatatacaggggcagctgccaaattgatgtattatatattgtggtttctgtttcttgaaagaatttttttcgttatttttacatctaacaaagtaaaaaaattaaaaagagggtaagaaacgattccggtgggatgattttaacatgcaaaatgtccctgggggtttcttctttgcttgctttcttcctccttaccctaccccccactcacacacacacacacacacacacacacacacacacacacacactttctataaaacttgaaaatagcaaaaaccctcaactgttgtaaatcatgcaattaaagttgattacttataaatatgaactttggatcactgtatagactgttaaatttgatttcttattacctattgttaaataaactgtgtgagacagaca

SEQ ID NO: 1432 - DNA, 2503 bp, Homo sapiens
  source 1..2503: mol_type = genomic DNA
ttggcgcgtaaaagtggccgggactttgcaggcagcggcggccgggggcggagcgggatcgagccctcgccgaggcctgccgccatgggcccgcgccgccgccgccgcctgtcacccgggccgcgcgggccgtgagcgtcatggccttggccggggcccctgcgggcggcccatgcgcgccggcgctggaggccctgctcggggccggcgcgctgcggctgctcgactcctcgcagatcgtcatcatctccgccgcgcaggacgccagcgccccgccggctcccaccggccccgcggcgcccgccgccggcccctgcgaccctgacctgctgctcttcgccacaccgcaggcgccccggcccacacccagtgcgccgcggcccgcgctcggccgcccgccggtgaagcggaggctggacctggaaactgaccatcagtacctggccgagagcagtgggccagctcggggcagaggccgccatccaggaaaaggtgtgaaatccccgggggagaagtcacgctatgagacctcactgaatctgaccaccaagcgcttcctggagctgctgagccactcggctgacggtgtcgtcgacctgaactgggctgccgaggtgctgaaggtgcagaagcggcgcatctatgacatcaccaacgtccttgagggcatccagctcattgccaagaagtccaagaaccacatccagtggctgggcagccacaccacagtgggcgtcggcggacggcttgaggggttgacccaggacctccgacagctgcaggagagcgagcagcagctggaccacctgatgaatatctgtactacgcagctgcgcctgctctccgaggacactgacagccagcgcctggcctacgtgacgtgtcaggaccttcgtagcattgcagaccctgcagagcagatggttatggtgatcaaagcccctcctgagacccagctccaagccgtggactcttcggagaactttcagatctcccttaagagcaaacaaggcccgatcgatgttttcctgtgccctgaggagaccgtaggtgggatcagccctgggaagaccccatcccaggaggtcacttctgaggaggagaacagggccactgactctgccaccatagtgtcaccaccaccatcatctcccccctcatccctcaccacagatcccagccagtctctactcagcctggagcaagaaccgctgttgtcccggatgggcagcctgcgggctcccgtggacgaggaccgcctgtccccgctggtggcggccgactcgctcctggagcatgtgcgggaggacttctccggcctcctccctgaggagttcatcagcctttccccaccccacgaggccctcgactaccacttcggcctcgaggagggcgagggcatcagagacctcttcgactgtgactttggggacctcacccccctggatttctgacagggcttggagggaccagggtttccagagatgctcaccttgtctctgcagccctggagccccctgtccctggccgtcctcccagcctgtttggaaacatttaatttatacccctctcctctgtctccagaagcttctagctctggggtctggctaccgctaggaggctgagcaagccaggaagggaaggagtctgtgtggtgtgtatgtgcatgcagcctacacccacacgtgtgtaccgggggtgaatgtgtgtgagcatgtgtgtgtgcatgtaccggggaatgaaggtgaacatacacctctgtgtgtgcactgcagacacgccccagtgtgtccacatgtgtgtgcatgagtccatgtgtgcgcgtgggggggctctaactgcactttcggcccttttgctctgggggtcccacaaggcccagggcagtgcctgctcccagaatctggtgctctgaccaggccaggtggggaggctttggctggctgggcgtgtaggacggtgagagcacttctgtcttaaaggttttttctgattgaagctttaatggagcgttatttatttatcgaggcctctttggtgagcctggggaatcagcaaaggggaggaggggtgtggggttgataccccaactccctctacccttgagcaagggcaggggtccctgagctgttcttctgccccatactgaaggaactgaggcctgggtgatttatttattgggaaagtgagggagggagacagactgactgacagccatgggtggtcagatggtggggtgggccctctccagggggccagttcagggccccagctgccccccaggatggatatgagatgggagaggtgagtgggggaccttcactgatgtgggcaggaggggtggtgaaggcctcccccagcccagaccctgtggtccctcctgcagtgtctgaagcgcctgcctccccactgctctgccccaccctccaatctgcactttgatttgcttcctaacagctctgttccctcctgctttggttttaataaatattttgatgacgtt

SEQ ID NO: 1433 - DNA, 2100 bp, Homo sapiens
  source 1..2100: mol_type = genomic DNA
gcggaagtggcggcggcgccggcctggcctggcctggctgaggggaggcggcgggcgggcgcgatggcggaggccgggccacaggcgccgccgcccccgggcactccaagccggcacgaaaagagcctgggactgctcaccaccaagttcgtgtcccttctgcaggaggccaaggacggcgtgcttgacctcaagctggcagctgacaccctagctgtacgccagaagcggcggatttacgacattaccaatgttttggaaggtatcgggctaatcgagaaaaagtccaagaacagcatccagtggaagggtgtggggcctggctgcaatacccgggagattgctgacaaactgattgagctcaaggcagagatcgaggagctgcagcagcgggagcaagaactagaccagcacaaggtgtgggtgcagcagagcatccggaacgtcacagaggacgtgcagaacagctgtttggcctacgtcactcatgaggacatctgcagatgctttgctggagataccctcttggccatccgggccccatcaggcaccagcctggaggtgcccatcccagagggtctcaatgggcagaagaagtaccagattcacctgaagagtgtgagtggtcccattgaggttctgctggtgaacaaggaggcatggagctcaccccctgtggctgtgcctgtgccaccacctgaagatttgctccagagcccatctgctgtttctacacctccacctctgcccaagcctgccctagcccagtcccaggaagcctcacgtccaaatagtcctcagctcactcccactgctgtccctggcagtgcagaagtccagggaatggctggcccagcagctgagatcacagtgagtggcggccctgggactgatagcaaggacagtggtgagctcagttcactcccactgggcccaacaacactggacacccggccactgcagtcttctgccctgctggacagcagcagcagcagcagcagcagcagcagcagcagcagcaacagtaacagcagcagttcgtccggacccaacccttctacctcctttgagcccatcaaggcagaccccacaggtgttttggaactccccaaagagctgtcagaaatctttgatcccacacgagagtgcatgagctcggagctgctggaggagttgatgtcctcagaagtgtttgcccctctgcttcgtctttctccacccccgggagaccacgattatatctacaacctggacgagagtgaaggtgtctgtgacctctttgatgtgcctgttctcaacctctgactgacagggacatgccctgtgtggctgggacccagactgtctgacctgggggttgcctggggacctctcccacccgacccctacagagcttgagagccacagacgcctggcttctccggcctcccctcaccgcacagttctggccacagctcccgctcctgtgctggcacttctgtgctcgcagagcaggggaacaggactcagcccccatcaccgtggagccaaagtgtttgcttctccctttctgcggccttcgccagcccaggctcggctgccacccagtggcacagaaccgaggagctgccattaccccccatagggggcagtgtcttgttcctgccagcctcagtgtcttgcttctgccagctccttcccctaggagggaagggtggggtggaactgggcacatgccagcaccacttctagcttccttcgctatcccccaccccctgaccctccagctcctcctggccctctcacgtgcccacttctgctgggcctttagccctagaacctgcaggtggtgggggcggctaccaagaaggaacagaggtctctggggaggagtctgggtggtccagccctgatgattggccccacctcctgctgccccataaccctctcttcatttcggctttttcatttaccctcatttagagccatttgcagagatttagaaagatttacagtaacgaatggattcctatataaagattatttttatactttttgcagcaaaaggaaattgtaatatttgtacagtgttcaagtgaataaaaaccatgcctaaggcta

SEQ ID NO: 1434 - DNA, 4336 bp, Homo sapiens
  source 1..4336: mol_type = genomic DNA
gatcaatactgaggccgcgtccgacccccttgagccgagatccccccccagcccagcccccaccccaccccccgcacacgccccaccccccccacgacccagcctcataccgcaccagctgaggcacccaagaggattaccccctggggccctctcccgccccccaaaaaagagaagatcccctctcctggcccatcccttcccttcttccctcccccctccccccgaactttccctctcgcatgcttttcccctgcaccacggatcgcctctcggatgccgcttgcctggaagctgcgttaggagcgagcggcggcggtggcggcggtggcggcggcggcggcagctcgggagtgctatgaccggcaaactcgccgagaagctgccggtgaccatgagcagtttgctaaaccaactgcctgacaatctgtaccccgaggagatccccagcgcgctcaacctcttctccggcagcagcgactcggtagtccattacaatcagatggctacagagaatgtaatggacatcggtctgaccaacgagaagcccaacccggaactctcttactccggctccttccagccagcccccggcaacaagaccgtgacctacttgggaaagttcgccttcgactccccttccaactggtgccaggacaacatcattagcctcatgagcgccggcatcttgggggtgcccccggcttcaggggcgctcagcacgcagacgtccacggccagcatggtgcagccaccgcagggtgacgtggaggccatgtatcccgcgctacccccctactccaactgcggcgacctctactcagagcccgtgtctttccacgacccccagggcaatcccgggctcgcctattccccccaggattaccaatcggccaagccggcgttggacagcaatctcttccccatgattcctgactacaacctctaccaccaccccaacgacatgggctccattccggagcacaagcccttccagggcatggaccccatccgggtcaacccgccccctattacccctctggagaccatcaaggcattcaaagacaagcagatccacccgggctttggcagcctgccccagccgccgctcaccctcaagcccatccggccccgcaagtaccccaaccggcctagcaagacaccgctccacgaacggccccacgcgtgcccggccgagggctgcgaccgccgtttcagccgttcggacgagctgacccggcacctgcgcatccacacgggccacaagcccttccagtgccggatctgcatgcggagcttcagccgcagcgaccacctcaccactcacatccgcactcatacgggcgagaagccctttgcctgcgagttctgcgggcgcaagtttgcgcgcagcgacgagcgcaagcgccacgccaagatccacctcaagcaaaaggagaagaaggcggagaagggcggtgcaccctctgcatcctcggcgccccccgtgtcgctggcccccgtggtcaccacctgcgcctgaggatcgggcccccagatccccacttttcccctccagtgcctcccggctgctagcctgaaagcagcgggaaagccagccacggaggcgtaggggccgcgccctggcctctccatggacgtgcggccccttgcttccccttcgatgcccccggttcccaacctttcacgccggccagcggtcaggggccagggctggaggcgccttcccctcgcggtcccccacttagccaaggcgtgggggcggaaaggtggcgtctagcccgctttgttcagttcggatcgccttgatccaggggccgccgggccgcgccaaggacctgcaagggactgaaggcggagcccatccaaccctcgcccgacccaaacacctcattgtttcccccacgtctccctctataccccctcgaagactcgagagggggagggggtaaggagcgcaccaaagcgcagagcttgctgcccgccgcacgcacgcgcgcctgcgtgcggggatgcgcgcgagtgtgtgcgtgctcgcgtgtgtgtgtatgtgtgtgtgtgagtgtgtgtgtgtgcgcgcgcgcaagcgtgtgtgtttaagactcttgagctgaactgggctgtgtttaccccaaactcttccccacctcgggtccccaagccgctgggagatgtcccatgctgggggtccgcacgtggctggaggaggtggtcttccatccgctctgaaatcatgtttcttagagaaatgcctcggatgccgccgacgcggtgctgctgccgccgcttcgggtttggcccctcagaacccctccttttctgagcgcttccctcttaggcctcagggcagtttgatctgtggggagaaagagcagccatcgctgagcctgccttttaaaatatatgtgtatttccttagccccactctaagaaatctatgttcctgagtttgccccctgccctcccactccttccccttctcccctctaaaccttctcccatctctttcaaaatcttttcccagaaaggcaggcttcaaccagccactccagctttgtgtcttctctcaattacatagcaatttctccttcccaccatcatggggaagctggctctgcttttgccctttgtcatcaccaacacaacagatagaatttaaatataagtatatggtgtgcgtgtgtatgtatgtgtatgtatatgcatgcatgtgtataaagatgcacatgcgtacatatacataacatacacacaatatgtattcctagcaaaataaaatctctaaggtacttggttatccagtgcagtgcaccggaataaagagaatttgtaggcgtatacagctttaaatgatttattttttatgaaaatgttaactgatgagattatatctacatacgtgtgttatgtgtgtggatatagatgcacacatatctgtacatatacatgtgagtgtacatatatacacatatacacatctatgtatggatatgtgtgtatacacatatacacatctctgtccaaaatttcctcaaagatatggggattttttcatgaatccatgtggatgaatgaggtgtctcctttccatacccagtctcaccttctccccaccctacctcacctcttctcaggcacccctcttccccagctgtcctgccagcccttctcgtacagggtggctcctttgaagtggagtaatagggaaggttgctctctgccacagcttgcagcatggtcttgactgaatgtactgttcctgttagcgttacttctcctgtggtcagtaagttgcccagagagaaggaacaaaggtctggagtttacagaatgtctgtttttaaagtcactttatgcgttttccacttttttcttttttaagaaaaagaagtaccatttttgttttgttttgttttgatttttggtggtggataaataatactaaaaggactctagtggaaaggggggatatcgaagagcagggggttgtgaatttccaggtacttggactttttgtagaaggagagagaagaagatgaagtttgccaggagggcccatattttttcagctgaagggtaaaatctttctttgcagagacagtattttgctgaatactttttataatgtgatgattattaaaaaagcaaaaattttggtcacttccaagctagaaggaggaatcagataccctttaatattttttcctcgctccttctggtatatgcatgtcactgcatgataattgagttttcctttgttttaataaaactgttctcagacattaagctaaactaagagaaaaataactttgttgccaaaaggttgtgctatccagattttttatatgtctgcatgtttaaaaaaaaaaagcaacaaaagaaaatgcactctaacttatgtgaactgagagaaaaaaatcaggttttaaacaggaaaacctatggggaatgatattttttgaaagacttttgtataaagttgagtacttagaaaaaagacaaaccagatgtaatatattttgtggatgtttttatttcttggatttatagtaccttatactaaggttaaaaaaatatgcttgatattgtgaaaaggtgaaattcttcaccaacatttcatttgctcctttgtcatattgtaatgccaatataatatagttaatgaaaacagcatttttaaaaaccgaaatattgaaatggtgtaatgttgtaccatttgcactgtgagcaaatgctaatacagtaaatatattgtgtttgctgacaatcagccggcctataaatctccttattttatttcttgtttttatagcataaagctttagtttggcctgtt

SEQ ID NO: 1435 - DNA, 1095 bp, Homo sapiens
  source 1..1095: mol_type = genomic DNA
gatcgagaaggctaggttggcgacgccacggtagaggcttcggttctcccgggtgggggcagccgccgaccggagggagagaatgtaatggacatcggtctgaccaacgagaagcccaacccggaactctcttactccggctccttccagccagcccccggcaacaagaccgtgaccatgattcctgactacaacctctaccaccaccccaacgacatgggctccattccggagcacaagcccttccagggcatggaccccatccgggtcaacccgccccctattacccctctggagaccatcaaggcattcaaagacaagcagatccacccgggctttggcagcctgccccagccgccgctcaccctcaagcccatccggccccgcaagtaccccaaccggcctagcaagacaccgctccacgaacggccccacgcgtgcccggccgagggctgcgaccgccgtttcagccgttcggacgagctgacccggcacctgcgcatccacacgggccacaagcccttccagtgccggatctgcatgcggagcttcagccgcagcgaccacctcaccactcacatccgcactcatacgggcgagaagccctttgcctgcgagttctgcgggcgcaagtttgcgcgcagcgacgagcgcaagcgccacgccaagatccacctcaagcaaaaggagaagaaggcggagaagggcggtgcaccctctgcatcctcggcgccccccgtgtcgctggcccccgtggtcaccacctgcgcctgaggatcgggcccccagatccccacttttcccctccagtgcctcccggctgctagcctgaaagcagcgggaaagccagccacggaggcgtaggggccgcgccctggcctctccatggacgtgcggccccttgcttccccttcgatgcccccggttcccaacctttcacgccggccagcggtcaggggccagggctggaggcgccttcccctcgcggtcccccacttagccaaggcgtgggggcggaaaggtggcgtctagcccgctttgttcagttcggatcgccttgatccaggggccgccgggccgcgccaaggacctgca

SEQ ID NO: 1436 - DNA, 1553 bp, Homo sapiens
  source 1..1553: mol_type = genomic DNA
ctcttcccgggaggagcccggcgtctttttcacccgcgctctccccccttactccctcagcctcccacccgggatggagccatgtgcggcgtggagtccccgcggtgggagagagaatgtaatggacatcggtctgaccaacgagaagcccaacccggaactctcttactccggctccttccagccagcccccggcaacaagaccgtgacctacttgggaaagttcgccttcgactccccttccaactggtgccaggacaacatcattagcctcatgagcgccggcatcttgggggtgcccccggcttcaggggcgctcagcacgcagacgtccacggccagcatggtgcagccaccgcagggtgacgtggaggccatgtatcccgcgctacccccctactccaactgcggcgacctctactcagagcccgtgtctttccacgacccccagggcaatcccgggctcgcctattccccccaggattaccaatcggccaagccggcgttggacagcaatctcttccccatgattcctgactacaacctctaccaccaccccaacgacatgggctccattccggagcacaagcccttccagggcatggaccccatccgggtcaacccgccccctattacccctctggagaccatcaaggcattcaaagacaagcagatccacccgggctttggcagcctgccccagccgccgctcaccctcaagcccatccggccccgcaagtaccccaaccggcctagcaagacaccgctccacgaacggccccacgcgtgcccggccgagggctgcgaccgccgtttcagccgttcggacgagctgacccggcacctgcgcatccacacgggccacaagcccttccagtgccggatctgcatgcggagcttcagccgcagcgaccacctcaccactcacatccgcactcatacgggcgagaagccctttgcctgcgagttctgcgggcgcaagtttgcgcgcagcgacgagcgcaagcgccacgccaagatccacctcaagcaaaaggagaagaaggcggagaagggcggtgcaccctctgcatcctcggcgccccccgtgtcgctggcccccgtggtcaccacctgcgcctgaggatcgggcccccagatccccacttttcccctccagtgcctcccggctgctagcctgaaagcagcgggaaagccagccacggaggcgtaggggccgcgccctggcctctccatggacgtgcggccccttgcttccccttcgatgcccccggttcccaacctttcacgccggccagcggtcaggggccagggctggaggcgccttcccctcgcggtcccccacttagccaaggcgtgggggcggaaaggtggcgtctagcccgctttgttcagttcggatcgccttgatccaggggccgccgggccgcgccaaggacctgcaagggactgaaggcggagcccatccaaccctcgcccgacccaaacacctcattgtttcccccacgtctccctctataccccctcgaagactcgagagggggagggggtaa

SEQ ID NO: 1437 - DNA, 5165 bp, Homo sapiens
  source 1..5165: mol_type = genomic DNA
gggcgccgtccgcctgaggggctgcagatcccggctaccgcgagcgccgtggctggcttggctgttccatgtggctccggcggggatggaggactcggtggcggcggcggctgctgctgcggcggcgacggaggagcggctatgagaagggaacggggccagactcagcccgacagcgggattagagccctccagaatacccatcatatagcccctgaggtggcatggtgatgtctccatgagggaaccccttcccactcatcctgtcacgtatatcatagtgttcttgactgggccattcatctaagatgggatttaccctgtgaaacagggagaagacttatggaccccaagcatcatttcgagttgtagttgagtttttaaaagacatacatgcaaagttcctttgctttggaccctctgcattattaaagctgctgtattgctaacccagaactgctccagtgtcttgactgatcatcatggcttcagtttggaagagactgcagcgtgtgggaaaacatgcatccaagttccagtttgtggcctcctaccaggagctcatggttgagtgtacgaagaaatggcaaccagataaactggtggtagtttggaccagaagaagccgaaggaagtcttctaaggcacatagctggcaacctggaataaaaaatccctatcgtggtgttgttgtgtggcctgttcctgaaaacattgaaatcactgtaacactttttaaggatcctcatgcggaagaatttgaagacaaagagtggacatttgtcatagaaaatgaatccccttctggtcgaaggaaagctcttgctactagcagcatcaatatgaaacagtatgcaagccctatgccaactcagactgatgtcaagttaaaattcaagccattatctaaaaaagttgtatctgccgctcttcagttttcattatcttgcatttttctgagggaaggaaaagccacagatgaagacatgcaaagtttggctagtttgatgagtatgaagcaggctgacattggcaatttagatgacttcgaagaagataatgaagatgatgatgagaacagagtgaaccaagaagaaaaggcagctaaaattacagaaattgtaaaccagttgaatgctctgagcagcttagatgaagatcaagatgactgcataaagcaagcaaatatgcgttcagctaaatcagccagttcctctgaagagcttatcaacaaacttaactttttggatgaagcagaaaaggacttggccaccgtgaattcaaatccatttgatgatcctgatgctgcagaattaaatccatttggagatcctgactcagaagaacctatcactgaaacagcttcacctagaaaaacagaagactctttttataataacagctataatccctttaaagaggtgcagactccacagtatttgaacccattcgatgagccagaagcatttgtgaccataaaggattctcctccccagtctacaaaaagaaaaaatataagacctgtggatatgagcaagtacctctatgctgatagttctaaaactgaagaagaagaattggatgaatcaaatcctttttatgaacctaaatcaactcctcctccaaataatttggtaaatcctgttcaagaactagaaactgaaaggcgagtgaaaagaaaggccccggctccaccagtcctctcaccaaaaacaggagtattaaatgaaaacacagtttctgcaggaaaagatctctctacttctcctaagccaagccctataccaagtcctgttttggggcgaaagccaaatgctagtcagtctttgcttgtatggtgtaaagaagttacaaagaactaccgaggagtaaaaatcaccaattttactacatcgtggagaaatggtttatctttttgtgcaatattacaccactttagaccagatttaattgactacaagtctctgaatcctcaagatattaaagagaacaacaaaaaggcatacgatggatttgccagcataggaatttcccgattattggaaccttctgatatggtattattagcaattcctgataaactgactgttatgacttatctctatcaaataagggcacatttcagtggccaagaactaaatgtcgttcagatagaggaaaacagcagtaaaagcacatataaagttggaaactatgaaacagatacaaacagttctgttgatcaagaaaaattctatgcagagcttagtgatctgaagcgggagcctgaactacaacagcctatcagcggagcagtagacttcttatcacaggatgactctgtatttgtaaatgatagcggggttggagagtcagaaagtgagcatcaaactcctgatgatcaccttagtccaagcacagcctccccttactgtcgcaggactaaaagtgacacagaaccccagaagtctcagcagagctctggaaggacttcaggatctgatgaccctggaatatgttccaatacagattcaacccaagcacaggttttgttaggcaaaaagagactattgaaagctgagactttagaattgagtgacttatatgttagtgataagaagaaggatatgtctccaccctttatttgtgaggagacagatgaacaaaagcttcaaactctagacatcggtagtaacttggagaaagaaaaattagagaattccagatccttagaatgcagatcagatccagaatctcctatcaaaaaaacaagtttatctcctacttctaaacttggatactcatatagtagagatctagaccttgctaagaaaaaacatgcttccctgaggcagacggagtctgatccagatgctgatagaaccactttaaatcatgcagatcattcatcaaaaatagtccagcatcgattgttatctagacaagaagaacttaaggaaagagcaagagttctgcttgagcaagcaagaagagatgcagccttaaaggcggggaataagcacaataccaacacagccaccccattctgcaacaggcagctaagtgatcagcaagatgaagagcgacgtcggcagctgagagagagagctcgtcagctaatagcagaagctcgatctggagtgaagatgtcagaacttcccagctatggtgaaatggctgcagaaaagttgaaagaaaggtcaaaggcatctggagatgaaaatgataatattgagatagatactaacgaggagatccctgaaggctttgttgtaggaggtggagatgaacttactaacttagaaaatgaccttgatactcccgaacaaaacagtaagttggtggacttgaagctgaagaagctcctagaagttcagccacaggtggcaaattcaccctccagtgctgcccagaaagctgtaactgagagctcagagcaggacatgaaaagtggcacagaagatctccggactgaacgattacaaaaaacaacagaacgttttagaaatcctgttgtgttcagcaaagattctacagtcagaaaaactcaacttcagtctttcagccaatatattgagaatagaccagagatgaaaaggcagagatcaatacaggaagatacaaagaaaggaaatgaggagaaggcagcgataactgaaactcagaggaagccatcagaagatgaagtgcttaataaagggttcaaagacaccagtcagtatgtagtaggagaattggcagcactagagaatgagcaaaagcaaattgacacccgtgccgcgctggtggagaagcgccttcgctatctcatggacacaggaaggaacacagaagaagaagaagctatgatgcaggaatggtttatgttagttaataagaaaaatgccttaataaggagaatgaatcagctctctcttctggaaaaagaacatgatttagaacgacggtatgagctgctgaaccgggaattgagggcaatgctagccattgaagactggcagaagaccgaggcccagaagcgacgcgaacagcttctgctagatgagctggtggccctggtgaacaagcgcgatgcgctcgtcagggacctggacgcgcaggagaagcaggccgaagaagaagatgagcatttggagcgaactctggagcaaaacaaaggcaagatggccaagaaagaggagaaatgtgttcttcagtagccatcagatcagaaagaatctctcccaacattttagagtcttgcttcccaaaccagaaaaagtcagactcattgttgatttaaaacttttaacattttgtttggctggattgtactactttacctctactttaccaccaccacccttttcctccctcctttccaaataatatacagaactccaaaatagcttcatttaaggatttttttgtgagttaacaatttccttgaaatcctgtgaaatagatttgcacagacaccttgtgagtgattggtattggaggtgttcaagaaactgttcgaaaaagaacaaaaacacttccctcgttattttctctcattttttgatgagaggaaaatttgaaacattattcttgttgttgttggtaatagcataatgacagtgggaggggtacaaggggataagaaaaatgtcatgatttttttccggtcctgccacatgtaacacttactctgttacctaaattttatagttagatcatatccaatctacttattaaactgtgttctatttaccagtggagtttttctgcagtggttgcgtttcactgtaaggataatggagttcctctcctctgctttcctcagaggatggtcctttaacatagccagaaacaagccctgtggtttgaaggtgagctgtgaggatgggactaattgatatgcaccagtttacaaagacagtcttatcatccgagaatacaccatctttttctctggataattatttcttacatcatgcttgattcctacattttgttgggtctcaacattggctcacgaatgctgttaatatttattctgtattgataaaaagtctgtcttgccactacaagtaaatcccccatttaatattttcttctttagcatagcactgtcattttttgtgaaaatggttatgtttatttattacaatactgagtcatatataaattttcaataaaagcagaaactttcttaccttaaa

SEQ ID NO: 1438 - DNA, 5057 bp, Homo sapiens
  source 1..5057: mol_type = genomic DNA
gggcgccgtccgcctgaggggctgcagatcccggctaccgcgagcgccgtggctggcttggctgttccatgtggctccggcggggatggaggactcggtggcggcggcggctgctgctgcggcggcgacggaggagcggctatgagaagggaacggggccagactcagcccgacagcgggattagagccctccagaatacccatcatatagcccctgaggtggcatggtgatgtctccatgagggaaccccttcccactcatcctgtcacgtatatcatagtgttcttgactgggccattcatctaagatgggatttaccctgtgaaacagggagaagacttatggaccccaagcatcatttcgagttgtagttgagtttttaaaagacatacatgcaaagttcctttgctttggaccctctgcattattaaagctgctgtattgctaacccagaactgctccagtgtcttgactgatcatcatggcttcagtttggaagagactgcagcgtgtgggaaaacatgcatccaagttccagtttgtggcctcctaccaggagctcatggttgagtgtacgaagaaatggcaaccagataaactggtggtagtttggaccagaagaagccgaaggaagtcttctaaggcacatagctggcaacctggaataaaaaatccctatcgtggtgttgttgtgtggcctgttcctgaaaacattgaaatcactgtaacactttttaaggatcctcatgcggaagaatttgaagacaaagagtggacatttgtcatagaaaatgaatccccttctggtcgaaggaaagctcttgctactagcagcatcaatatgaaacagtatgcaagccctatgccaactcagactgatgtcaagttaaaattcaagccattatctaaaaaagttgtatctgccgctcttcagttttcattatcttgcatttttctgagggaaggaaaagccacagatgaagacatgcaaagtttggctagtttgatgagtatgaagcaggctgacattggcaatttagatgacttcgaagaagataatgaagatgatgatgagaacagagtgaaccaagaagaaaaggcagctaaaattacagagcttatcaacaaacttaactttttggatgaagcagaaaaggacttggccaccgtgaattcaaatccatttgatgatcctgatgctgcagaattaaatccatttggagatcctgactcagaagaacctatcactgaaacagcttcacctagaaaaacagaagactctttttataataacagctataatccctttaaagaggtgcagactccacagtatttgaacccattcgatgagccagaagcatttgtgaccataaaggattctcctccccagtctacaaaaagaaaaaatataagacctgtggatatgagcaagtacctctatgctgatagttctaaaactgaagaagaagaattggatgaatcaaatcctttttatgaacctaaatcaactcctcctccaaataatttggtaaatcctgttcaagaactagaaactgaaaggcgagtgaaaagaaaggccccggctccaccagtcctctcaccaaaaacaggagtattaaatgaaaacacagtttctgcaggaaaagatctctctacttctcctaagccaagccctataccaagtcctgttttggggcgaaagccaaatgctagtcagtctttgcttgtatggtgtaaagaagttacaaagaactaccgaggagtaaaaatcaccaattttactacatcgtggagaaatggtttatctttttgtgcaatattacaccactttagaccagatttaattgactacaagtctctgaatcctcaagatattaaagagaacaacaaaaaggcatacgatggatttgccagcataggaatttcccgattattggaaccttctgatatggtattattagcaattcctgataaactgactgttatgacttatctctatcaaataagggcacatttcagtggccaagaactaaatgtcgttcagatagaggaaaacagcagtaaaagcacatataaagttggaaactatgaaacagatacaaacagttctgttgatcaagaaaaattctatgcagagcttagtgatctgaagcgggagcctgaactacaacagcctatcagcggagcagtagacttcttatcacaggatgactctgtatttgtaaatgatagcggggttggagagtcagaaagtgagcatcaaactcctgatgatcaccttagtccaagcacagcctccccttactgtcgcaggactaaaagtgacacagaaccccagaagtctcagcagagctctggaaggacttcaggatctgatgaccctggaatatgttccaatacagattcaacccaagcacaggttttgttaggcaaaaagagactattgaaagctgagactttagaattgagtgacttatatgttagtgataagaagaaggatatgtctccaccctttatttgtgaggagacagatgaacaaaagcttcaaactctagacatcggtagtaacttggagaaagaaaaattagagaattccagatccttagaatgcagatcagatccagaatctcctatcaaaaaaacaagtttatctcctacttctaaacttggatactcatatagtagagatctagaccttgctaagaaaaaacatgcttccctgaggcagacggagtctgatccagatgctgatagaaccactttaaatcatgcagatcattcatcaaaaatagtccagcatcgattgttatctagacaagaagaacttaaggaaagagcaagagttctgcttgagcaagcaagaagagatgcagccttaaaggcggggaataagcacaataccaacacagccaccccattctgcaacaggcagctaagtgatcagcaagatgaagagcgacgtcggcagctgagagagagagctcgtcagctaatagcagaagctcgatctggagtgaagatgtcagaacttcccagctatggtgaaatggctgcagaaaagttgaaagaaaggtcaaaggcatctggagatgaaaatgataatattgagatagatactaacgaggagatccctgaaggctttgttgtaggaggtggagatgaacttactaacttagaaaatgaccttgatactcccgaacaaaacagtaagttggtggacttgaagctgaagaagctcctagaagttcagccacaggtggcaaattcaccctccagtgctgcccagaaagctgtaactgagagctcagagcaggacatgaaaagtggcacagaagatctccggactgaacgattacaaaaaacaacagaacgttttagaaatcctgttgtgttcagcaaagattctacagtcagaaaaactcaacttcagtctttcagccaatatattgagaatagaccagagatgaaaaggcagagatcaatacaggaagatacaaagaaaggaaatgaggagaaggcagcgataactgaaactcagaggaagccatcagaagatgaagtgcttaataaagggttcaaagacaccagtcagtatgtagtaggagaattggcagcactagagaatgagcaaaagcaaattgacacccgtgccgcgctggtggagaagcgccttcgctatctcatggacacaggaaggaacacagaagaagaagaagctatgatgcaggaatggtttatgttagttaataagaaaaatgccttaataaggagaatgaatcagctctctcttctggaaaaagaacatgatttagaacgacggtatgagctgctgaaccgggaattgagggcaatgctagccattgaagactggcagaagaccgaggcccagaagcgacgcgaacagcttctgctagatgagctggtggccctggtgaacaagcgcgatgcgctcgtcagggacctggacgcgcaggagaagcaggccgaagaagaagatgagcatttggagcgaactctggagcaaaacaaaggcaagatggccaagaaagaggagaaatgtgttcttcagtagccatcagatcagaaagaatctctcccaacattttagagtcttgcttcccaaaccagaaaaagtcagactcattgttgatttaaaacttttaacattttgtttggctggattgtactactttacctctactttaccaccaccacccttttcctccctcctttccaaataatatacagaactccaaaatagcttcatttaaggatttttttgtgagttaacaatttccttgaaatcctgtgaaatagatttgcacagacaccttgtgagtgattggtattggaggtgttcaagaaactgttcgaaaaagaacaaaaacacttccctcgttattttctctcattttttgatgagaggaaaatttgaaacattattcttgttgttgttggtaatagcataatgacagtgggaggggtacaaggggataagaaaaatgtcatgatttttttccggtcctgccacatgtaacacttactctgttacctaaattttatagttagatcatatccaatctacttattaaactgtgttctatttaccagtggagtttttctgcagtggttgcgtttcactgtaaggataatggagttcctctcctctgctttcctcagaggatggtcctttaacatagccagaaacaagccctgtggtttgaaggtgagctgtgaggatgggactaattgatatgcaccagtttacaaagacagtcttatcatccgagaatacaccatctttttctctggataattatttcttacatcatgcttgattcctacattttgttgggtctcaacattggctcacgaatgctgttaatatttattctgtattgataaaaagtctgtcttgccactacaagtaaatcccccatttaatattttcttctttagcatagcactgtcattttttgtgaaaatggttatgtttatttattacaatactgagtcatatataaattttcaataaaagcagaaactttcttacctt

SEQ ID NO: 1439 - DNA, 4108 bp, Homo sapiens
  source 1..4108: mol_type = genomic DNA
aactgggaggctccccagtttgtgggtaacatctgactctccctccccaaagagagactccagcgagagactggggatttggaggtccaagtcatggcagaactgggttgcttgctaggacacaaggttagcatgcccctgtagcagcaatgtgagaatcagaaaaggtgactgtgcatctcaagaagccgaatcaaaaagccaagccaaccacctaaccagtgattttcaagccctccagaatacccatcatatagcccctgaggtggcatggtgatgtctccatgagggaaccccttcccactcatcctgtcacgtatatcatagtgttcttgactgggccattcatctaagatgggatttaccctgtgaaacagggagaagacttatggaccccaagcatcatttcgagttgtagttgagtttttaaaagacatacatgcaaagttcctttgctttggaccctctgcattattaaagctgctgtattgctaacccagaactgctccagtgtcttgactgatcatcatggcttcagtttggaagagactgcagcgtgtgggaaaacatgcatccaagttccagtttgtggcctcctaccaggagctcatggttgagtgtacgaagaaatggcaaccagataaactggtggtagtttggaccagaagaagccgaaggaagtcttctaaggcacatagctggcaacctggaataaaaaatccctatcgtggtgttgttgtgtggcctgttcctgaaaacattgaaatcactgtaacactttttaaggatcctcatgcggaagaatttgaagacaaagagtggacatttgtcatagaaaatgaatccccttctggtcgaaggaaagctcttgctactagcagcatcaatatgaaacagtatgcaagccctatgccaactcagactgatgtcaagttaaaattcaagccattatctaaaaaagttgtatctgccgctcttcagttttcattatcttgcatttttctgagggaaggaaaagccacagatgaagacatgcaaagtttggctagtttgatgagtatgaagcaggctgacattggcaatttagatgacttcgaagaagataatgaagatgatgatgagaacagagtgaaccaagaagaaaaggcagctaaaattacagagcttatcaacaaacttaactttttggatgaagcagaaaaggacttggccaccgtgaattcaaatccatttgatgatcctgatgctgcagaattaaatccatttggagatcctgactcagaagaacctatcactgaaacagcttcacctagaaaaacagaagactctttttataataacagctataatccctttaaagaggtgcagactccacagtatttgaacccattcgatgagccagaagcatttgtgaccataaaggattctcctccccagtctacaaaaagaaaaaatataagacctgtggatatgagcaagtacctctatgctgatagttctaaaactgaagaagaagaattggatgaatcaaatcctttttatgaacctaaatcaactcctcctccaaataatttggtaaatcctgttcaagaactagaaactgaaaggcgagtgaaaagaaaggccccggctccaccagtcctctcaccaaaaacaggagtattaaatgaaaacacagtttctgcaggaaaagatctctctacttctcctaagccaagccctataccaagtcctgttttggggcgaaagccaaatgctagtcagtctttgcttgtatggtgtaaagaagttacaaagaactaccgaggagtaaaaatcaccaattttactacatcgtggagaaatggtttatctttttgtgcaatattacaccactttagaccagatttaattgactacaagtctctgaatcctcaagatattaaagagaacaacaaaaaggcatacgatggatttgccagcataggaatttcccgattattggaaccttctgatatggtattattagcaattcctgataaactgactgttatgacttatctctatcaaataagggcacatttcagtggccaagaactaaatgtcgttcagatagaggaaaacagcagtaaaagcacatataaagttggaaactatgaaacagatacaaacagttctgttgatcaagaaaaattctatgcagagcttagtgatctgaagcgggagcctgaactacaacagcctatcagcggagcagtagacttcttatcacaggatgactctgtatttgtaaatgatagcggggttggagagtcagaaagtgagcatcaaactcctgatgatcaccttagtccaagcacagcctccccttactgtcgcaggactaaaagtgacacagaaccccagaagtctcagcagagctctggaaggacttcaggatctgatgaccctggaatatgttccaatacagattcaacccaagcacaggttttgttaggcaaaaagagactattgaaagctgagactttagaattgagtgacttatatgttagtgataagaagaaggatatgtctccaccctttatttgtgaggagacagatgaacaaaagcttcaaactctagacatcggtagtaacttggagaaagaaaaattagagaattccagatccttagaatgcagatcagatccagaatctcctatcaaaaaaacaagtttatctcctacttctaaacttggatactcatatagtagagatctagaccttgctaagaaaaaacatgcttccctgaggcagacggagtctgatccagatgctgatagaaccactttaaatcatgcagatcattcatcaaaaatagtccagcatcgattgttatctagacaagaagaacttaaggaaagagcaagagttctgcttgagcaagcaagaagagatgcagccttaaaggcggggaataagcacaataccaacacagccaccccattctgcaacaggcagctaagtgatcagcaagatgaagagcgacgtcggcagctgagagagagagctcgtcagctaatagcagaagctcgatctggagtgaagatgtcagaacttcccagctatggtgaaatggctgcagaaaagttgaaagaaaggtcaaaggcatctggagaacaaaacagtaagttggtggacttgaagctgaagaagctcctagaagttcagccacaggtggcaaattcaccctccagtgctgcccagaaagctgtaactgagagctcagagcaggacatgaaaagtggcacagaagatctccggactgaacgattacaaaaaacaacagaacgttttagaaatcctgttgtgttcagcaaagattctacagtcagaaaaactcaacttcagtctttcagccaatatattgagaatagaccagagatgaaaaggcagagatcaatacaggaagatacaaagaaaggaaatgaggagaaggcagcgataactgaaactcagaggaagccatcagaagatgaagtgcttaataaagggttcaaagacaccagtcagtatgtagtaggagaattggcagcactagagaatgagcaaaagcaaattgacacccgtgccgcgctggtggagaagcgccttcgctatctcatggacacaggaaggaacacagaagaagaagaagctatgatgcaggaatggtttatgttagttaataagaaaaatgccttaataaggagaatgaatcagctctctcttctggaaaaagaacatgatttagaacgacggtatgagctgctgaaccgggaattgagggcaatgctagccattgaagactggcagaagaccgaggcccagaagcgacgcgaacagcttctgctagatgagctggtggccctggtgaacaagcgcgatgcgctcgtcagggacctggacgcgcaggagaagcaggccgaagaagaagatgagcatttggagcgaactctggagcaaaacaaaggcaagatggccaagaaagaggagaaatgtgttcttcagtagccatcagatcagaaagaatctctcccaacattttagagtcttgcttcccaaaccagaaaaagtcagactcattgttgatttaaaacttttaacattt

SEQ ID NO: 1440 - DNA, 3591 bp, Homo sapiens
  source 1..3591: mol_type = genomic DNA
atggcttcagtttggaagagactgcagcgtgtgggaaaacatgcatccaagttccagtttgtggcctcctaccaggagctcatggttgagtgtacgaagaaatggcaaccagataaactggtggtagtttggaccagaagaagccgaaggaagtcttctaaggcacatagctggcaacctggaataaaaaatccctatcgtggtgttgttgtgtggcctgttcctgaaaacattgaaatcactgtaacactttttaaggatcctcatgcggaagaatttgaagacaaagagtggacatttgtcatagaaaatgaatccccttctggtcgaaggaaagctcttgctactagcagcatcaatatgaaacagtatgcaagccctatgccaactcagactgatgtcaagttaaaattcaagccattatctaaaaaagttgtatctgccgctcttcagttttcattatcttgcatttttctgagggaaggaaaagccacagatgaagacatgcaaagtttggctagtttgatgagtatgaagcaggctgacattggcaatttagatgacttcgaagaagataatgaagatgatgatgagaacagagtgaaccaagaagaaaaggcagctaaaattacagagcttatcaacaaacttaactttttggatgaagcagaaaaggacttggccaccgtgaattcaaatccatttgatgatcctgatgctgcagaattaaatccatttggagatcctgactcagaagaacctatcactgaaacagcttcacctagaaaaacagaagactctttttataataacagctataatccctttaaagaggtgcagactccacagtatttgaacccattcgatgagccagaagcatttgtgaccataaaggattctcctccccagtctacaaaaagaaaaaatataagacctgtggatatgagcaagtacctctatgctgatagttctaaaactgaagaagaagaattggatgaatcaaatcctttttatgaacctaaatcaactcctcctccaaataatttggtaaatcctgttcaagaactagaaactgaaaggcgagtgaaaagaaaggccccggctccaccagtcctctcaccaaaaacaggagtattaaatgaaaacacagtttctgcaggaaaagatctctctacttctcctaagccaagccctataccaagtcctgttttggggcgaaagccaaatgctagtcagtctttgcttgtatggtgtaaagaagttacaaagaactaccgaggagtaaaaatcaccaattttactacatcgtggagaaatggtttatctttttgtgcaatattacaccactttagaccagatttaattgactacaagtctctgaatcctcaagatattaaagagaacaacaaaaaggcatacgatggatttgccagcataggaatttcccgattattggaaccttctgatatggtattattagcaattcctgataaactgactgttatgacttatctctatcaaataagggcacatttcagtggccaagaactaaatgtcgttcagatagaggaaaacagcagtaaaagcacatataaagttggaaactatgaaacagatacaaacagttctgttgatcaagaaaaattctatgcagagcttagtgatctgaagcgggagcctgaactacaacagcctatcagcggagcagtagacttcttatcacaggatgactctgtatttgtaaatgatagcggggttggagagtcagaaagtgagcatcaaactcctgatgatcaccttagtccaagcacagcctccccttactgtcgcaggactaaaagtgacacagaaccccagaagtctcagcagagctctggaaggacttcaggatctgatgaccctggaatatgttccaatacagattcaacccaagcacaggttttgttaggcaaaaagagactattgaaagctgagactttagaattgagtgacttatatgttagtgataagaagaaggatatgtctccaccctttatttgtgaggagacagatgaacaaaagcttcaaactctagacatcggtagtaacttggagaaagaaaaattagagaattccagatccttagaatgcagatcagatccagaatctcctatcaaaaaaacaagtttatctcctacttctaaacttggatactcatatagtagagatctagaccttgctaagaaaaaacatgcttccctgaggcagacggagtctgatccagatgctgatagaaccactttaaatcatgcagatcattcatcaaaaatagtccagcatcgattgttatctagacaagaagaacttaaggaaagagcaagagttctgcttgagcaagcaagaagagatgcagccttaaaggcggggaataagcacaataccaacacagccaccccattctgcaacaggcagctaagtgatcagcaagatgaagagcgacgtcggcagctgagagagagagctcgtcagctaatagcagaagctcgatctggagtgaagatgtcagaacttcccagctatggtgaaatggctgcagaaaagttgaaagaaaggtcaaaggcatctggagatgaaaatgataatattgagatagatactaacgaggagatccctgaaggctttgttgtaggaggtggagatgaacttactaacttagaaaatgaccttgatactcccgaacaaaacagtaagttggtggacttgaagctgaagaagctcctagaagttcagccacaggtggcaaattcaccctccagtgctgcccagaaagctgtaactgagagctcagagcaggacatgaaaagtggcacagaagatctccggactgaacgattacaaaaaacaacagaacgttttagaaatcctgttgtgttcagcaaagattctacagtcagaaaaactcaacttcagtctttcagccaatatattgagaatagaccagagatgaaaaggcagagatcaatacaggaagatacaaagaaaggaaatgaggagaaggcagcgataactgaaactcagaggaagccatcagaagatgaagtgcttaataaagggttcaaagacaccagtcagtatgtagtaggagaattggcagcactagagaatgagcaaaagcaaattgacacccgtgccgcgctggtggagaagcgccttcgctatctcatggacacaggaaggaacacagaagaagaagaagctatgatgcaggaatggtttatgttagttaataagaaaaatgccttaataaggagaatgaatcagctctctcttctggaaaaagaacatgatttagaacgacggtatgagctgctgaaccgggaattgagggcaatgctagccattgaagactggcagaagaccgaggcccagaagcgacgcgaacagcttctgctagatgagctggtggccctggtgaacaagcgcgatgcgctcgtcagggacctggacgcgcaggagaagcaggccgaagaagaagatgagcatttggagcgaactctggagcaaaacaaaggcaagatggccaagaaagaggagaaatgtgttcttcagtag

SEQ ID NO: 1441 - DNA, 1311 bp, Homo sapiens
  source 1..1311: mol_type = genomic DNA
acgcgcggggcctggccaatggcggcggggcggtggaggttgagctgccgtgggtagggttagtgtgagaggtgcggcgggggagccctccagaatacccatcatatagcccctgaggtggcatggtgatgtctccatgagggaaccccttcccactcatcctgtcacgtatatcatagtgttcttgactgggccattcatctaagatgggatttaccctgtgaaacagggagaagacttatggaccccaagcatcatttcgagttgtagttgagtttttaaaagacatacatgcaaagttcctttgctttggaccctctgcattattaaagctgctgtattgctaacccagaactgctccagtgtcttgactgatcatcatggcttcagtttggaagagactgcagcgtgtgggaaaacatgcatccaagttccagtttgtggcctcctaccaggagctcatggttgagtgtacgaagaaatggcaaccagataaactggtggtagtttggaccagaagaagccgaaggaagtcttctaaggcacatagctggcaacctggaataaaaaatccctatcgtggtgttgttgtgtggcctgttcctgaaaacattgaaatcactgtaacactttttaaggatcctcatgcggaagaatttgaagacaaagagtggacatttgtcatagaaaatgaatccccttctggtcgaaggaaagctcttgctactagcagcatcaatatgaaacagtatgcaagccctatgccaactcagactgatgtcaagttaaaattcaagccattatctaaaaaagttgtatctgccgctcttcagttttcattatcttgcatttttctgagggaaggaaaagccacagatgaagacatgcaaagtttggctagtttgatgagtatgaagcaggctgacattggcaatttagatgacttcgaagaagataatgaagatgatgatgagaacagagtgaaccaagaagaaaaggcagctaaaattacagagcttatcaacaaacttaactttttggatgaagcagaaaaggacttggccaccgtgaattcaaatccatttgatgatcctgatgctgcagaattaaatccatttggagatcctgactcagaagaacctatcactgaaacagcttcacctagaaaaacagaagactctttttataataacagctataatccctttaaagaggtgcagactccacagtatttgaacccattcgatgagccagaagcatttgtgaccataaaggattctcctccccagtctacaaaaagaaaaaatataa

SEQ ID NO: 1442 - DNA, 581 bp, Homo sapiens
  source 1..581: mol_type = genomic DNA
acgcgcggggcctggccaatggcggcggggcggtggaggttgagctgccgtggccctccagaatacccatcatatagcccctgaggtggcatggtgatgtctccatgagggaaccccttcccactcatcctgtcacgtatatcatagtgttcttgactgggccattcatctaagatgggatttaccctgtgaaacagggagaagacttatggaccccaagcatcatttcgagttgtagttgagtttttaaaagacatacatgcaaagttcctttgctttggaccctctgcattattaaagctgctgtattgctaacccagaactgctccagtgtcttgactgatcatcatggcttcagtttggaagagactgcagcgtgtgggaaaacatgcatccaagttccagtttgtggcctcctaccaggagctcatggttgagtgtacgaagaaatggcaaccagataaactggtggtagtttggaccagaagaagccgaaggaagtcttctaaggcacatagctggcaacctggaataaaaaatccctatcgtggtgttgttgtgtggcctgttcctgaaaacat

SEQ ID NO: 1443 - DNA, 5076 bp, Homo sapiens
  source 1..5076: mol_type = genomic DNA
gatgatggtggcggaggagaaaggcgggggagggggtgctgggcgctgagcggtggctctggcagggcttggtagggtgggggacggtcgcggggcgatctgtcagggagggggtgggcgtgaggggcgccgtccgcctgaggggctgcagatcccggctaccgcgagcgccgtggctggcttggctgttccatgtggctccggcggggatggaggactcggtggcggcggcggctgctgctgcggcggcgacggaggagcggctatgagaagggaacggggccagactcagcccgacagcgggattagagccctccagaatacccatcatatagcccctgaggtggcatggtgatgtctccatgagggaaccccttcccactcatcctgtcacgtatatcatagtgttcttgactgggccattcatctaagatgggatttaccctgtgaaacagggagaagacttatggaccccaagcatcatttcgagttgtagttgagtttttaaaagacatacatgcaaagttcctttgctttggaccctctgcattattaaagctgctgtattgctaacccagaactgctccagtgtcttgactgatcatcatggcttcagtttggaagagactgcagcgtgtgggaaaacatgcatccaagttccagtttgtggcctcctaccaggagctcatggttgagtgtacgaagaaatggcaaccagataaactggtggtagtttggaccagaagaagccgaaggaagtcttctaaggcacatagctggcaacctggaataaaaaatccctatcgtggtgttgttgtgtggcctgttcctgaaaacattgaaatcactgtaacactttttaaggatcctcatgcggaagaatttgaagacaaagagtggacatttgtcatagaaaatgaatccccttctggtcgaaggaaagctcttgctactagcagcatcaatatgaaacagtatgcaagccctatgccaactcagactgatgtcaagttaaaattcaagccattatctaaaaaagttgtatctgccgctcttcagttttcattatcttgcatttttctgagggaaggaaaagccacagatgaagacatgcaaagtttggctagtttgatgagtatgaagcaggctgacattggcaatttagatgacttcgaagaagataatgaagatgatgatgagaacagagtgaaccaagaagaaaaggcagctaaaattacagagcttatcaacaaacttaactttttggatgaagcagaaaaggacttggccaccgtgaattcaaatccatttgatgatcctgatgctgcagaattaaatccatttggagatcctgactcagaagaacctatcactgaaacagcttcacctagaaaaacagaagactctttttataataacagctataatccctttaaagaggtgcagactccacagtatttgaacccattcgatgagccagaagcatttgtgaccataaaggattctcctccccagtctacaaaaagaaaaaatataagacctgtggatatgagcaagtacctctatgctgatagttctaaaactgaagaagaagaattggatgaatcaaatcctttttatgaacctaaatcaactcctcctccaaataatttggtaaatcctgttcaagaactagaaactgaaaggcgagtgaaaagaaaggccccggctccaccagtcctctcaccaaaaacaggagtattaaatgaaaacacagtttctgcaggaaaagatctctctacttctcctaagccaagccctataccaagtcctgttttggggcgaaagccaaatgctagtcagtctttgcttgtatggtgtaaagaagttacaaagaactaccgaggagtaaaaatcaccaattttactacatcgtggagaaatggtttatctttttgtgcaatattacaccactttagaccagatttaattgactacaagtctctgaatcctcaagatattaaagagaacaacaaaaaggcatacgatggatttgccagcataggaatttcccgattattggaaccttctgatatggtattattagcaattcctgataaactgactgttatgacttatctctatcaaataagggcacatttcagtggccaagaactaaatgtcgttcagatagaggaaaacagcagtaaaagcacatataaagttggaaactatgaaacagatacaaacagttctgttgatcaagaaaaattctatgcagagcttagtgatctgaagcgggagcctgaactacaacagcctatcagcggagcagtagacttcttatcacaggatgactctgtatttgtaaatgatagcggggttggagagtcagaaagtgagcatcaaactcctgatgatcaccttagtccaagcacagcctccccttactgtcgcaggactaaaagtgacacagaaccccagaagtctcagcagagctctggaaggacttcaggatctgatgaccctggaatatgttccaatacagattcaacccaagcacaggttttgttaggcaaaaagagactattgaaagctgagactttagaattgagtgacttatatgttagtgataagaagaaggatatgtctccaccctttatttgtgaggagacagatgaacaaaagcttcaaactctagacatcggtagtaacttggagaaagaaaaattagagaattccagatccttagaatgcagatcagatccagaatctcctatcaaaaaaacaagtttatctcctacttctaaacttggatactcatatagtagagatctagaccttgctaagaaaaaacatgcttccctgaggcagacggagtctgatccagatgctgatagaaccactttaaatcatgcagatcattcatcaaaaatagtccagcatcgattgttatctagacaagaagaacttaaggaaagagcaagagttctgcttgagcaagcaagaagagatgcagccttaaaggcggggaataagcacaataccaacacagccaccccattctgcaacaggcagctaagtgatcagcaagatgaagagcgacgtcggcagctgagagagagagctcgtcagctaatagcagaagctcgatctggagtgaagatgtcagaacttcccagctatggtgaaatggctgcagaaaagttgaaagaaaggtcaaaggcatctggagaacaaaacagtaagttggtggacttgaagctgaagaagctcctagaagttcagccacaggtggcaaattcaccctccagtgctgcccagaaagctgtaactgagagctcagagcaggacatgaaaagtggcacagaagatctccggactgaacgattacaaaaaacaacagaacgttttagaaatcctgttgtgttcagcaaagattctacagtcagaaaaactcaacttcagtctttcagccaatatattgagaatagaccagagatgaaaaggcagagatcaatacaggaagatacaaagaaaggaaatgaggagaaggcagcgataactgaaactcagaggaagccatcagaagatgaagtgcttaataaagggttcaaagacaccagtcagtatgtagtaggagaattggcagcactagagaatgagcaaaagcaaattgacacccgtgccgcgctggtggagaagcgccttcgctatctcatggacacaggaaggaacacagaagaagaagaagctatgatgcaggaatggtttatgttagttaataagaaaaatgccttaataaggagaatgaatcagctctctcttctggaaaaagaacatgatttagaacgacggtatgagctgctgaaccgggaattgagggcaatgctagccattgaagactggcagaagaccgaggcccagaagcgacgcgaacagcttctgctagatgagctggtggccctggtgaacaagcgcgatgcgctcgtcagggacctggacgcgcaggagaagcaggccgaagaagaagatgagcatttggagcgaactctggagcaaaacaaaggcaagatggccaagaaagaggagaaatgtgttcttcagtagccatcagatcagaaagaatctctcccaacattttagagtcttgcttcccaaaccagaaaaagtcagactcattgttgatttaaaacttttaacattttgtttggctggattgtactactttacctctactttaccaccaccacccttttcctccctcctttccaaataatatacagaactccaaaatagcttcatttaaggatttttttgtgagttaacaatttccttgaaatcctgtgaaatagatttgcacagacaccttgtgagtgattggtattggaggtgttcaagaaactgttcgaaaaagaacaaaaacacttccctcgttattttctctcattttttgatgagaggaaaatttgaaacattattcttgttgttgttggtaatagcataatgacagtgggaggggtacaaggggataagaaaaatgtcatgatttttttccggtcctgccacatgtaacacttactctgttacctaaattttatagttagatcatatccaatctacttattaaactgtgttctatttaccagtggagtttttctgcagtggttgcgtttcactgtaaggataatggagttcctctcctctgctttcctcagaggatggtcctttaacatagccagaaacaagccctgtggtttgaaggtgagctgtgaggatgggactaattgatatgcaccagtttacaaagacagtcttatcatccgagaatacaccatctttttctctggataattatttcttacatcatgcttgattcctacattttgttgggtctcaacattggctcacgaatgctgttaatatttattctgtattgataaaaagtctgtcttgccactacaagtaaatcccccatttaatattttcttctttagcatagcactgtcattttttgtgaaaatggttatgtttatttattacaatactgagtcatatataaattttcaataaaagcagaaactttcttaccttaaa

SEQ ID NO: 1444 - DNA, 1999 bp, Homo sapiens
  source 1..1999: mol_type = genomic DNA
gatactcatatagtagagatctagaccttgctaagaaaaaacatgcttccctgaggcagacggagtctgatccagatgctgatagaaccactttaaatcatgcagatcattcatcaaaaatagtccagcatcgattgttatctagacaagaagaacttaaggaaagagcaagagttctgcttgagcaagcaagaagagatgcagccttaaaggcggggaataagcacaataccaacacagccaccccattctgcaacaggcagctaagtgatcagaagatctccggactgaacgattacaaaaaacaacagaacgttttagaaatcctgttgtgttcagcaaagattctacagtcagaaaaactcaacttcagtctttcagccaatatattgagaatagaccagagatgaaaaggcagagatcaatacaggaagatacaaagaaaggaaatgaggagaaggcagcgataactgaaactcagaggaagccatcagaagatgaagtgcttaataaagggttcaaagacaccagtcagtatgtagtaggagaattggcagcactagagaatgagcaaaagcaaattgacacccgtgccgcgctggtggagaagcgccttcgctatctcatggacacaggaaggaacacagaagaagaagaagctatgatgcaggaatggtttatgttagttaataagaaaaatgccttaataaggagaatgaatcagctctctcttctggaaaaagaacatgatttagaacgacggtatgagctgctgaaccgggaattgagggcaatgctagccattgaagactggcagaagaccgaggcccagaagcgacgcgaacagcttctgctagatgagctggtggccctggtgaacaagcgcgatgcgctcgtcagggacctggacgcgcaggagaagcaggccgaagaagaagatgagcatttggagcgaactctggagcaaaacaaaggcaagatggccaagaaagaggagaaatgtgttcttcagtagccatcagatcagaaagaatctctcccaacattttagagtcttgcttcccaaaccagaaaaagtcagactcattgttgatttaaaacttttaacattttgtttggctggattgtactactttacctctactttaccaccaccacccttttcctccctcctttccaaataatatacagaactccaaaatagcttcatttaaggatttttttgtgagttaacaatttccttgaaatcctgtgaaatagatttgcacagacaccttgtgagtgattggtattggaggtgttcaagaaactgttcgaaaaagaacaaaaacacttccctcgttattttctctcattttttgatgagaggaaaatttgaaacattattcttgttgttgttggtaatagcataatgacagtgggaggggtacaaggggataagaaaaatgtcatgatttttttccggtcctgccacatgtaacacttactctgttacctaaattttatagttagatcatatccaatctacttattaaactgtgttctatttaccagtggagtttttctgcagtggttgcgtttcactgtaaggataatggagttcctctcctctgctttcctcagaggatggtcctttaacatagccagaaacaagccctgtggtttgaaggtgagctgtgaggatgggactaattgatatgcaccagtttacaaagacagtcttatcatccgagaatacaccatctttttctctggataattatttcttacatcatgcttgattcctacattttgttgggtctcaacattggctcacgaatgctgttaatatttattctgtattgataaaaagtctgtcttgccactacaagtaaatcccccatttaatattttcttctttagcatagcactgtcattttttgtgaaaatggttatgtttatttattacaatactgagtcatatataaattttcaataaaagcagaaactttcttacctt

SEQ ID NO: 1445 - DNA, 2695 bp, Homo sapiens
  source 1..2695: mol_type = genomic DNA
cgcgtatggagcccccgccccccggagctgccaacattgccaacgccaccgccacgctacacacaggtacccctgggatggcgtgagcactcccccagcgatggacccatctgtgacgctgtggcagtttctgctgcagctgctgagagagcaaggcaatggccacatcatctcctggacttcacgggatggtggtgaattcaagctggtggatgcagaggaggtggcccggctgtgggggctacgcaagaacaagaccaacatgaattacgacaagctcagccgggccttgcggtactactatgacaagaacatcatccgcaaggtgagcggccagaagttcgtctacaagtttgtgtcctaccctgaggtcgcagggtgctccactgaggactgcccgccccagccagaggtgtctgttacctccaccatgccaaatgtggcccctgctgctatacatgccgccccaggggacactgtctctggaaagccaggcacacccaagggtgcaggaatggcaggcccaggcggtttggcacgcagcagccggaacgagtacatgcgctcgggcctctattccaccttcaccatccagtctctgcagccgcagccaccccctcatcctcggcctgctgtggtgctccccagtgcagctcctgcaggggcagcagcgcccccctcggggagcaggagcaccagtccaagccccttggaggcctgtctggaggctgaagaggccggcttgcctctgcaggtcatcctgaccccgcccgaggccccaaacctgaaatcggaagagcttaatgtggagccgggtttgggccgggctttgcccccagaagtgaaagtagaagggcccaaggaagagttggaagttgcgggggagagagggtttgtgccagaaaccaccaaggccgagccagaagtccctccacaggagggcgtgccagcccggctgcccgcggttgttatggacaccgcagggcaggcgggcggccatgcggcttccagccctgagatctcccagccgcagaagggccggaagccccgggacctagagcttccactcagcccgagcctgctaggtgggccgggacccgaacggaccccaggatcgggaagtggctccggcctccaggctccggggccggcgctgaccccatccctgcttcctacgcatacattgaccccggtgctgctgacacccagctcgctgcctcctagcattcacttctggagcaccctgagtcccattgcgccccgtagcccggccaagctctccttccagtttccatccagtggcagcgcccaggtgcacatcccttctatcagcgtggatggcctctcgacccccgtggtgctctccccagggccccagaagccatgactactaccaccaccaccaccaccccttctggggtcactccatccatgctctctccagccagccatctcaaggagaaacatagttcaactgaaagactcatgctctgattgtggtggggtggggatccttgggaagaattactcccaagagtaactctcattatctcctccacagaaaacacacagcttccacaacttctctgttttctgtcagtcccccagtggccgcccttacacgtctcctacttcaatggtaggggcggtttatttatttattttttgaaggccactgggaggagcctgacctaaccttttagggtggttaggacatctcccccacctccccacttttttccccaagacaagacaatcgaggtctggcttgagaacgacctttctttctttatttctcagcctgcccttggggagatgagggagccctgtctgcgtttttggatgtgagtagaagagttagtttgttttgttttattattcctggccatactcaggggtccaggaagaatttgtaccatttaatgggttgggagtcttggccaaggaagaatcacacccttggaatagaaatttccacctccccaacctttctctcagacagcttatccttttcaaccaactttttggccagggaggaatgtcccttttgttcttccccctgagaagccattcctttgtctgccaacctccctggggtcctgcctgtttcctcccaatggagggtttttttggggggtggtccccgtctggggggcccctccagccagtactccaggtctccctgtctctcccccgctgccattttgatagtataatctatttttaaatggggcttttcaataggggagagggagtcatctcttcctatatttggtggggtgggtgggaaggaagggatttgggggggaatcttcctgccgcctcccccactccaagtgtttatttttgataccaaacatgaattttcagttccctccctcccagccccccaatttcctgcgggcgggtacaaaggaccctttcaatgtccctggagttgggagggaggaatgggggacataaagcctgtcctgtctctattctaggcaagagagagtgggttcaaaagactcctgggctcacctgttagcgctggcccagcccaggccttgggacctgggggttggtgatttgggggacagtgctacactcgtctccactgtttgttttacttccccaaaatggaccttttttttttctaaagagtcccagagaatggggaattgttcctgtaaatatatatttttcaaagtga

SEQ ID NO: 1446 - DNA, 504 bp, Homo sapiens
  source 1..504: mol_type = genomic DNA
ctcgggcccacgtgagctgtagggaaacgcaggggcggcttctaggtgctgccgccgccaccgccaccaccacctccaccgccgcctcggaacccaggcctggggggcggtggggccgcgtatggagcccccgccccccggagctgccaacattgccaacgccaccgccacgctacacacaggtacccctgggatggcgtgagcactcccccagcgatggacccatctgtgacgctgtggcagtttctgctgcagctgctgagagagcaaggcaatggccacatcatctcctggacttcacgggatggtggtgaattcaagctggtggatgcagaggaggtggcccggctgtgggggctacgcaagaacaagaccaacatgaattacgacaagctcagccgggccttgcggtactactatgacaagaacatcatccgcaaggtgagcggccagaagttcgtctacaagtttgtgtcctaccctgagtcccattgcgccccgtag

SEQ ID NO: 1447 - DNA, 2258 bp, Homo sapiens
  source 1..2258: mol_type = genomic DNA
gagctgtagggaaacgcaggggcggcttctaggtgctgccgccgccaccgccaccaccacctccaccgccgcctcggaacccaggcctggggggcggtggggccgcgtatggagcccccgccccccggagctgccaacattgccaacgccaccgccacgctacacacagcctcaactttcaggagacccgtccgtggccttatttattccacccttcctgtacatcgtagcgaatcaatccgtggcgccgcactcctccgcatccctctttaacagtacccctgggatggcgtgagcactcccccagcgatggacccatctgtgacgctgtggcagtttctgctgcagctgctgagagagcaaggcaatggccacatcatctcctggacttcacgggatggtggtgaattcaagctggtggatgcagaggaggtggcccggctgtgggggctacgcaagaacaagaccaacatgaattacgacaagctcagccgggccttgcggtactactatgacaagaacatcatccgcaaggtgagcggccagaagttcgtctacaagtttgtgtcctaccctgaggtcgcagggtgctccactgaggactgcccgccccagccagaggtgtctgttacctccaccatgccaaatgtggcccctgctgctatacatgccgccccaggggacactgtctctggaaagccaggcacacccaagggtgcaggaatggcaggcccaggcggtttggcacgcagcagccggaacgagtacatgcgctcgggcctctattccaccttcaccatccagtctctgcagccgcagccaccccctcatcctcggcctgctgtggtgctccccagtgcagctcctgcaggggcagcagcgcccccctcggggagcaggagcaccagtccaagccccttggaggcctgtctggaggctgaagaggccggcttgcctctgcaggtcatcctgaccccgcccgaggccccaaacctgaaatcggaagagcttaatgtggagccgggtttgggccgggctttgcccccagaagtgaaagtagaagggcccaaggaagagttggaagttgcgggggagagagggtttgtgccagaaaccaccaaggccgagccagaagtccctccacaggagggcgtgccagcccggctgcccgcggttgttatggacaccgcagggcaggcgggcggccatgcggcttccagccctgagatctcccagccgcagaagggccggaagccccgggacctagagcttccactcagcccgagcctgctaggtgggccgggacccgaacggaccccaggatcgggaagtggctccggcctccaggctccggggccggcgctgaccccatccctgcttcctacgcatacattgaccccggtgctgctgacacccagctcgctgcctcctagcattcacttctggagcaccctgagtcccattgcgccccgtagcccggccaagctctccttccagtttccatccagtggcagcgcccaggtgcacatcccttctatcagcgtggatggcctctcgacccccgtggtgctctccccagggccccagaagccatgactactaccaccaccaccaccaccccttctggggtcactccatccatgctctctccagccagccatctcaaggagaaacatagttcaactgaaagactcatgctctgattgtggtggggtggggatccttgggaagaattactcccaagagtaactctcattatctcctccacagaaaacacacagcttccacaacttctctgttttctgtcagtcccccagtggccgcccttacacgtctcctacttcaatggtaggggcggtttatttatttattttttgaaggccactgggaggagcctgacctaaccttttagggtggttaggacatctcccccacctccccacttttttccccaagacaagacaatcgaggtctggcttgagaacgacctttctttctttatttctcagcctgcccttggggagatgagggagccctgtctgcgtttttggatgtgagtagaagagttagtttgttttgttttattattcctggccatactcaggggtccaggaagaatttgtaccatttaatgggttgggagtcttggccaaggaagaatcacacccttggaatagaaatttccacctccccaacctttctctcagacagcttatccttttcaaccaactttttggccagggaggaatgtccctttt

SEQ ID NO: 1448 - DNA, 1859 bp, Homo sapiens
  source 1..1859: mol_type = genomic DNA
ctgaaatcggaagagcttaatgtggagccgggtttgggccgggctttgcccccagaagtgaaagtagaagggcccaaggaagagttggaagttgcgggggagagagggtttgtgccagaaaccaccaaggccgagccagaagtccctccacaggagggcgtgccagcccggctgcccgcggttgttatggacaccgcagggcaggcgggcggccatgcggcttccagccctgagatctcccagccgcagaagggccggaagccccgggacctagagcttccactcagcccgagcctgctaggtgggccgggacccgaacggaccccagccctgcttcctacgcatacattgaccccggtgctgctgacacccagctcgctgcctcctagcattcacttctggagcaccctgagtcccattgcgccccgtagcccggccaagctctccttccagtttccatccagtggcagcgcccaggtgcacatcccttctatcagcgtggatggcctctcgacccccgtggtgctctccccagggccccagaagccatgactactaccaccaccaccaccaccccttctggggtcactccatccatgctctctccagccagccatctcaaggagaaacatagttcaactgaaagactcatgctctgattgtggtggggtggggatccttgggaagaattactcccaagagtaactctcattatctcctccacagaaaacacacagcttccacaacttctctgttttctgtcagtcccccagtggccgcccttacacgtctcctacttcaatggtaggggcggtttatttatttattttttgaaggccactgggaggagcctgacctaaccttttagggtggttaggacatctcccccacctccccacttttttccccaagacaagacaatcgaggtctggcttgagaacgacctttctttctttatttctcagcctgcccttggggagatgagggagccctgtctgcgtttttggatgtgagtagaagagttagtttgttttgttttattattcctggccatactcaggggtccaggaagaatttgtaccatttaatgggttgggagtcttggccaaggaagaatcacacccttggaatagaaatttccacctccccaacctttctctcagacagcttatccttttcaaccaactttttggccagggaggaatgtcccttttgttcttccccctgagaagccattcctttgtctgccaacctccctggggtcctgcctgtttcctcccaatggagggtttttttggggggtggtccccgtctggggggcccctccagccagtactccaggtctccctgtctctcccccgctgccattttgatagtataatctatttttaaatggggcttttcaataggggagagggagtcatctcttcctatatttggtggggtgggtgggaaggaagggatttgggggggaatcttcctgccgcctcccccactccaagtgtttatttttgataccaaacatgaattttcagttccctccctcccagccccccaatttcctgcgggcgggtacaaaggaccctttcaatgtccctggagttgggagggaggaatgggggacataaagcctgtcctgtctctattctaggcaagagagagtgggttcaaaagactcctgggctcacctgttagcgctggcccagcccaggccttgggacctgggggttggtgatttgggggacagtgctacactcgtctccactgtttgttttacttccccaaaatggaccttttttttttctaaagagtcccagagaatggggaattgttcctgtaaatatatatttttcaaagtg

SEQ ID NO: 1449 - DNA, 2758 bp, Homo sapiens
  source 1..2758: mol_type = genomic DNA
cggcggccgggcgcgcggccccggcgggcacccctcagagggcggccgaggaagctccgggaggaggagcaggaccacgaggaggtgggaggcggcggccgcctggggaccagctccgcgcctcggcctctccgccccctccccagcctttctctcgccctcttctcccacactcccggccggcgcctcggctttgtgcgaggagatggtgtagccccctggccgccgaaggaggagccggacacttgtctcccgtctccgagctgctccccacccctggaggagagacccccccctcggctcggcgccttctgcgtctcccggctggtggggaagcctctgcgccgccggcaccatgagtgaacagagtatctgtcaggcaagagctgctgtgatggtttatgatgatgccaataagaagtgggtgccagctggtggctcaactggattcagcagagttcatatctatcaccatacaggcaacaacacattcagagtggtgggcaggaagattcaggaccatcaggtcgtgataaactgtgccattcctaaagggttgaagtacaatcaagctacacagaccttccaccagtggcgagatgctagacaggtgtatggtctcaactttggcagcaaagaggatgccaatgtcttcgcaagtgccatgatgcatgccttagaagtgttaaattcacaggaaacagggccaacattgcctagacaaaactcacaactacctgctcaagttcaaaatggcccatcccaagaagaattggaaattcaaagaagacaactacaagaacagcaacggcaaaaggagctggagcgggaaaggctggagcgagaaagaatggaaagagaaaggttggagagagagaggttagaaagggaaaggctggagagggagcgactggaacaagaacagctggagagagagagacaagaacgggaacggcaggaacgcctggagcggcaggaacgcctggagcggcaggaacgcctggagcggcaggaacgcctggatcgggagaggcaagaaagacaagaacgagagaggctggagagactggaacgggagaggcaagaaagggagcgacaagagcagttagaaagggaacagctggaatgggagagagagcgcagaatatcaagtgctgctgcccctgcctctgttgagactcctctaaactctgtgctgggagactcttctgcttctgagccaggcttgcaggcagcctctcagccggccgagactccatcccaacagggcattgtcttgggaccacttgcacctccacctcctccaccactcccaccagggcctgcacaggcttcagtagccctccctcctcccccagggccccctccacctcctccactcccatccaccgggcctccaccgccccctcctccccctcctctccctaatcaagtaccccctcctcctccaccacctcctgccccacccctccctgcatctggattctttttggcatccatgtcagaagacaatcgccctttaactggacttgcagctgcaattgccggagcaaaacttaggaaagtgtcacggatggaggatacctctttcccaagtggagggaatgctattggtgtgaactccgcctcatctaaaacagatacaggccgtggaaatggaccccttcctttagggggtagtggtttaatggaagaaatgagtgccctgctggccaggaggagaagaattgctgaaaagggatcaacaatagaaacagaacaaaaagaggacaaaggtgaagattcagagcctgtaacttctaaggcctcttcaacaagtacacctgaaccaacaagaaaaccttgggaaagaacaaatacaatgaatggcagcaagtcacctgttatctccagaccaaaatccacacccttatcacagcccagtgccaatggagtccagacggaaggacttgactatgacaggctgaagcaggacattttagatgaaatgagaaaagaattaacaaagctaaaagaagagctcattgatgcaatcaggcaggaactgagcaagtcaaatactgcatagaggaacagactaaggagagataggactttaatctggaggaaaaatatcctacaaacaacaactgttcacaacagcaaacccctacatttatgagctgtaagaagaaaatggagacaaacagaaggagggaaaaaccaacctactctgaaagccttcagacattatgactctggtgataagctctttccctctccgtttgctgcttttttctggcctttacaacagaatggaagagaatcatttaagagttcctgtaacagttatgcagaaaatactaaaacccatcaggcaagatcaccacgcattgaaatattttcatatcaagataaagtcgcacattttccacaatacattgctaaaataaagaggagaaaggcttaggaagtttttttgcagagagtgctggtaaagaattgagcaagtttgctattgtattgtaatgtttctctcaggtttgttcttcctatcatgtttgatattccatgaataattgagatcagccctatgtaagttaagatcataatatgtggaacaaatggaattgtaagtgctttcaaagggtaatatttataagaaagtgtccgaaaaatgtttcttcagcttgagaaattttagaatgataggaagtttctcgagttagccttcatgcaattttgtagattaaaacataaaatttgtccagaacttaaa

SEQ ID NO: 1450 - DNA, 7167 bp, Homo sapiens
  source 1..7167: mol_type = genomic DNA
ggttcctcgcggcgatcccgactctcctcccgcggctgcagcagctgccggttgcacacggcctcggcggcggcgcggcgagcgcgggcctgtggagcggcggccgggcgcgcggccccggcgggcacccctcagagggcggccgaggaagctccgggaggaggagcaggaccacgaggaggtgggaggcggcggccgcctggggaccagctccgcgcctcggcctctccgccccctccccagcctttctctcgccctcttctcccacactcccggccggcgcctcggctttgtgcgaggagatggtgtagccccctggccgccgaaggaggagccggacacttgtctcccgtctccgagctgctccccacccctggaggagagacccccccctcggctcggcgccttctgcgtctcccggctggtggggaagcctctgcgccgccggcaccatgagtgaacagagtatctgtcaggcaagagctgctgtgatggtttatgatgatgccaataagaagtgggtgccagctggtggctcaactggattcagcagagttcatatctatcaccatacaggcaacaacacattcagagtggtgggcaggaagattcaggaccatcaggtcgtgataaactgtgccattcctaaagggttgaagtacaatcaagctacacagaccttccaccagtggcgagatgctagacaggtgtatggtctcaactttggcagcaaagaggatgccaatgtcttcgcaagtgccatgatgcatgccttagaagtgttaaattcacaggaaacagggccaacattgcctagacaaaactcacaactacctgctcaagttcaaaatggcccatcccaagaagaattggaaattcaaagaagacaactacaagaacagcaacggcaaaaggagctggagcgggaaaggctggagcgagaaagaatggaaagagaaaggttggagagagagaggttagaaagggaaaggctggagagggagcgactggaacaagaacagctggagagagagagacaagaacgggaacggcaggaacgcctggagcggcaggaacgcctggagcggcaggaacgcctggagcggcaggaacgcctggatcgggagaggcaagaaagacaagaacgagagaggctggagagactggaacgggagaggcaagaaagggagcgacaagagcagttagaaagggaacagctggaatgggagagagagcgcagaatatcaagtgctgctgcccctgcctctgttgagactcctctaaactctgtgctgggagactcttctgcttctgagccaggcttgcaggcagcctctcagccggccgagactccatcccaacagggcattgtcttgggaccacttgcacctccacctcctccaccactcccaccagggcctgcacaggcttcagtagccctccctcctcccccagggccccctccacctcctccactcccatccaccgggcctccaccgccccctcctccccctcctctccctaatcaagtaccccctcctcctccaccacctcctgccccacccctccctgcatctggattctttttggcatccatgtcagaagacaatcgccctttaactggacttgcagctgcaattgccggagcaaaacttaggaaagtgtcacggatggaggatacctctttcccaagtggagggaatgctattggtgtgaactccgcctcatctaaaacagatacaggccgtggaaatggaccccttcctttagggggtagtggtttaatggaagaaatgagtgccctgctggccaggaggagaagaattgctgaaaagggatcaacaatagaaacagaacaaaaagaggacaaaggtgaagattcagagcctgtaacttctaaggcctcttcaacaagtacacctgaaccaacaagaaaaccttgggaaagaacaaatacaatgaatggcagcaagtcacctgttatctccagacgggattctccaaggaaaaatcagattgtttttgacaacaggtcctatgattcattacacagaccaaaatccacacccttatcacagcccagtgccaatggagtccagacggaaggacttgactatgacaggctgaagcaggacattttagatgaaatgagaaaagaattaacaaagctaaaagaagagctcattgatgcaatcaggcaggaactgagcaagtcaaatactgcatagaggaacagactaaggagagataggactttaatctggaggaaaaatatcctacaaacaacaactgttcacaacagcaaacccctacatttatgagctgtaagaagaaaatggagacaaacagaaggagggaaaaaccaacctactctgaaagccttcagacattatgactctggtgataagctctttccctctccgtttgctgcttttttctggcctttacaacagaatggaagagaatcatttaagagttcctgtaacagttatgcagaaaatactaaaacccatcaggcaagatcaccacgcattgaaatattttcatatcaagataaagtcgcacattttccacaatacattgctaaaataaagaggagaaaggcttaggaagtttttttgcagagagtgctggtaaagaattgagcaagtttgctattgtattgtaatgtttctctcaggtttgttcttcctatcatgtttgatattccatgaataattgagatcagccctatgtaagttaagatcataatatgtggaacaaatggaattgtaagtgctttcaaagggtaatatttataagaaagtgtccgaaaaatgtttcttcagcttgagaaattttagaatgataggaagtttctcgagttagccttcatgcaattttgtagattaaaacataaaatttgtccagaacttaaagatttagatgccttcctaaattgttacaatgctttaccaaatctatgacttctacataacacaaaccagtggtcaaatgtaaacactatattgtagatttactgtaggttttcaaccttttttagatttatgcatgtggacatttttataatgtaattacaatcaccacaaggttagcttttttaattgcagacagtaatgcatgtcacactaatatgtagtggccttttcaaggcctagtcccagggaaaacattttgtagagtataggggagtgggaggaaggggaggaataattttttatttaaagttgatttctgcactatctttttctcagttacctgcatgaataaataatgagaaatattttgtgactttaattggtaaatatgttacaaaaccaagtacttaatcttttacatcatgtcttcagctatttgtattttaaccagtaatttcaatggtctgaaacatgattctgagcttcacataatatcttaactgtggaactcaaaagtttgatcactgaatttggcagttattattacctaggtacccccgctgttacacaggtgtttagatacgtgttcctgaatgaagctgcttttgaattttgttatgttgaaatgcaagaaataacaatgatggcagcaattaaggtcacagaaatcattaggtaaaggaaaaccaatgaggagttctgcagttttcttttaataagtaaagtgagacttgggtggtgggaagaaggaaggtgggaagaaggaattagacactctgcctgccactctgcgtgtgtgtgctctcgcgcacgtgctgtctatatggaagccactcccttttctttcctttgaaactggtaaggttaaaataggggagaaatcctacatgttggaatgatagctttttggaaaatttaagaaactctccaggctctccatcttgatttatgcttgagttgttatgtgccatatttgctttgaactctgattatcagaagttttactaaaactttgaaataattcactttcatctgctttctagattttgtacatctcagtccataaagcaaagcttgttgatagtgtagttttctaaacgctgcaaatttgcagcctttaccactacaaagaagtttggatgagggattttttttttctttgtcaaaatagttcctgtttctgtagaaatttcatttttagattaaactgtgatggatgagctatcataattcaagtatacatttcttttttctatcagatattcattgtcatgcagtagtagtaaaaacatcaaagatgcagcaagcttattaagtattattttctaaaagaaataggaggcattttcatctttattattgtacttttggttatgcaaacactttgataatataaacagttatgtcccctataaatctggtcagcaacctcttttgattttgttgggtaagttaaatagtctgtagtaggtagagtactgggtacaagtggtccaaactaagataagagactaaaataaaatgctaaatcttaaaagaaactgggtttatgcactaaacgttttgtgccttggtctaatattaacatgatgtatgtgtaaactgacaaaaaaaaaaaaaaaaaaaaaccagtgttgaatcatgctatatttcccatcatcccagattgctaaatgttctttccaagaagtctgaatgaattattatatacatttgctatcatacatgacagttgtgtcattattagagatttcagtaattaaaatgggaaacagaagcctaagttatttaccttatcaaaaccacgttccttggaaccacattattatgatggtttttgtgctcttgtacgttggatgtcttaagctgagtacagtttaggggatcctttctaatgacaggaaggcactgctttcctcaacactgtgatctgacctgtgacaagtctgtactatccactatgtaaatggctcacaagtcaattgcaaacaaactgaatgtacaaatcttagtgctggtgctgaaatctcttcagaatagtcatcatgatttaaaagtttgtttaaaaatttgcaagcatcaagtgtcaatcaaaactgaagatgaaacactaatgaatgttgaattctcatgcttttaggtgtacttcctttttagaattttcagttttctgctatttttaccgtaactatttcgtttaaatttgtttcatttaagtttcctacacgctaacttcgtttgtgcgattgaaataaaattgcagtatatatatgttgcttgtttgtgacacttagataatcttctgaaataatttgttttaaagtaagttatattggatgtgaaaaacaccttttaaagtccaagactttactacttaaaagtttacatgtcacgtcactattctttacagatttcatagaagtcgtgaatactaagtaatgtatacaaaagaaatatgtgatgatgtgtctactttttgtttgaaataactgttgggtgttccctcttcttattttctctctgcccaccttgacacagtaacttcctcttatagtcaagatgatgattaagtgtttaatttttattccattttgttctgcaacacgttcaggtacttaaaactcattcatgcagttagaattatcctttatgtagtttgcatggtaaaggacattgtgtggtaaagggcattattgagtaatgaattttaagtatagcaaaatatgtatagtgtttatacatgatgctgatttcttaaaacctacatataagcagtagtactttttctctattataaagtattaattttgagttccattttataattctgatgtcttcattagaaatacaaaaatacaatccttgtattttttctttgaccagacccaaattttccccttcccccctccattctcctctccacttctcgtggaccgcgtgttcccaatattcattaacatttgcagccattacagagttacagttgtaaaattttcagctgtttttttttttttttttttgctctagcctgtctcatgttcttgcttctcttcatatgtaagtcagtatttttgtctacaaattaaaagtcacttgtcattcaaaaatgagttaagtaacatgataatcttttaaatttacctagctacaacttttatgtctcttgtaaatttatatatactttcagtgccattgtgaagaattggccttttaattctaagtagtattaccctatgaagcacagtgtgcaaaggtatgctacaaggtctctttaattcctgtgtggccattataattttataacaccattaccctttaaattctaccgattataagcagcgtaaaagtaactatataaagcaaacatcgcaaaggaactctgcaggagctcttaattcctttatgtagctatcataaaattcactttcctgaagacatttactctcattcacttccaaactccaaacctttttctggtagcaccacttttgtttttaatagaaagatgagttcatatctgtacatctctccaaagctctaaggaatgagaaaaggatcctagtatattgaaattactgatgtttaatacctctgccttttcactaaaagccatttaatatttttaaagtcaaaacttgacatacaggtatttataaggaatctccatgactctgaaggaatgaaattgatgtaggtagctttggctatgtaaagacatagtagaggacaattacttaaagaagagttttcttttgaggatttgtagatttgactaagcagctgaagtcagtaacccctcaagaaagtccgtttatagaagccaagaactgttggaggtctgtgatgcaggtttttctgttcccaacatcaaaagctgtggattatttggtgtgttcccctttatgttatctctcgataatttttgagacatcaagattttttaaaatatcaatactggaaagatgaaaccttcaaattaaaacctaaaattgattagaaagaaaagtaaaatattaatgcagtaaatttaggatggttacagatactcaccatcaacataaataaatggagttctaggataaattatttgtggaatactaatggtcaagtcacataagagtaaaatcttttggtgaggagacacatttgacaactgctaaagaattaactaaatttgtctttctaaatagttttctttataaagtaacagaaacattgtaaaaggataaatgactgtcataatgactta

SEQ ID NO: 1451 - DNA, 1609 bp, Homo sapiens
  source 1..1609: mol_type = genomic DNA
agtgaacagagtatctgtcaggcaagagctgctgtgatggtttatgatgatgccaataagaagtgggtgccagctggtggctcaactggattcagcagagttcatatctatcaccatacaggcaacaacacattcagagtggtgggcaggaagattcaggaccatcaggtcgtgataaactgtgccattcctaaagggttgaagtacaatcaagctacacagaccttccaccagtggcgagatgctagacaggtgtatggtctcaactttggcagcaaagaggatgccaatgtcttcgcaagtgccatgatgcatgccttagaagtgttaaattcacaggaaacagggccaacattgcctagacaaaactcacaactacctgctcaagttcaaaatggcccatcccaagaagaattggaaattcaaagaagacaactacaagaacagcaacggcaaaaggagctggagcgggaaaggctggagcgagaaagaatggaaagagaaaggttggagagagagaggttagaaagggaaaggctggagagggagcgactggaacaagaacagctggagagagagagacaagaacgggaacggcaggaacgcctggagcggcaggaacgcctggagcggcaggaacgcctggagcggcaggaacgcctggatcgggagaggcaagaaagacaagaacgagagaggctggagagactggaacgggagaggcaagaaagggagcgacaagagcagttagaaagggaacagctggaatgggagagagagcgcagaatatcaagtgctggcattgtcttgggaccacttgcacctccacctcctccaccactcccaccagggcctgcacaggcttcagtagccctccctcctcccccagggccccctccacctcctccactcccatccaccgggcctccaccgccccctcctccccctcctctccctaatcaagtaccccctcctcctccaccacctcctgccccacccctccctgcatctggattctttttggcatccatgtcagaagacaatcgccctttaactggacttgcagctgcaattgccggagcaaaacttaggaaagtgtcacggatggaggatacctctttcccaagtggagggaatgctattggtgtgaactccgcctcatctaaaacagatacaggccgtggaaatggaccccttcctttagggggtagtggtttaatggaagaaatgagtgccctgctggccaggaggagaagaattgctgaaaagggatcaacaatagaaacagaacaaaaagaggacaaaggtgaagattcagagcctgtaacttctaaggcctcttcaacaagtacacctgaaccaacaagaaaaccttgggaaagaacaaatacaatgaatggcagcaagtcacctgttatctccagaccaaaatccacacccttatcacagcccagtgccaatggagtccagacggaaggacttgactatgacaggctgaagcaggacattttagatgaaatgagaaaagaattaacaaagctaaaagaagagctcattgatgcaatcaggcaggaactgagcaagtcaaatactgcatagaggaacagac

SEQ ID NO: 1452 - DNA, 3059 bp, Homo sapiens
  source 1..3059: mol_type = genomic DNA
cctggggccaggactgctgctgtcactgccatccattggagcccagcaccccctccccgcccatccttcggacagcaactccagcccagccccgcgtccctgtgtccacttctcctgacccctcggccgccaccccagaaggctggagcagggacgccgtcgctccggccgcctgctcccctcgggtccccgtgcgagcccacgccggccccggtgcccgcccgcagccctgccactggacacaggataaggcccagcgcacaggcccccacgtggacagcatggaccgcggcacgctccctctggctgttgccctgctgctggccagctgcagcctcagccccacaagtcttgcagaaacagtccattgtgaccttcagcctgtgggccccgagaggggcgaggtgacatataccactagccaggtctcgaagggctgcgtggctcaggcccccaatgccatccttgaagtccatgtcctcttcctggagttcccaacgggcccgtcacagctggagctgactctccaggcatccaagcaaaatggcacctggccccgagaggtgcttctggtcctcagtgtaaacagcagtgtcttcctgcatctccaggccctgggaatcccactgcacttggcctacaattccagcctggtcaccttccaagagcccccgggggtcaacaccacagagctgccatccttccccaagacccagatccttgagtgggcagctgagaggggccccatcacctctgctgctgagctgaatgacccccagagcatcctcctccgactgggccaagcccaggggtcactgtccttctgcatgctggaagccagccaggacatgggccgcacgctcgagtggcggccgcgtactccagccttggtccggggctgccacttggaaggcgtggccggccacaaggaggcgcacatcctgagggtcctgccgggccactcggccgggccccggacggtgacggtgaaggtggaactgagctgcgcacccggggatctcgatgccgtcctcatcctgcagggtcccccctacgtgtcctggctcatcgacgccaaccacaacatgcagatctggaccactggagaatactccttcaagatctttccagagaaaaacattcgtggcttcaagctcccagacacacctcaaggcctcctgggggaggcccggatgctcaatgccagcattgtggcatccttcgtggagctaccgctggccagcattgtctcacttcatgcctccagctgcggtggtaggctgcagacctcacccgcaccgatccagaccactcctcccaaggacacttgtagcccggagctgctcatgtccttgatccagacaaagtgtgccgacgacgccatgaccctggtactaaagaaagagcttgttgcgcatttgaagtgcaccatcacgggcctgaccttctgggaccccagctgtgaggcagaggacaggggtgacaagtttgtcttgcgcagtgcttactccagctgtggcatgcaggtgtcagcaagtatgatcagcaatgaggcggtggtcaatatcctgtcgagctcatcaccacagcggaaaaaggtgcactgcctcaacatggacagcctctctttccagctgggcctctacctcagcccacacttcctccaggcctccaacaccatcgagccggggcagcagagctttgtgcaggtcagagtgtccccatccgtctccgagttcctgctccagttagacagctgccacctggacttggggcctgagggaggcaccgtggaactcatccagggccgggcggccaagggcaactgtgtgagcctgctgtccccaagccccgagggtgacccgcgcttcagcttcctcctccacttctacacagtacccatacccaaaaccggcaccctcagctgcacggtagccctgcgtcccaagaccgggtctcaagaccaggaagtccataggactgtcttcatgcgcttgaacatcatcagccctgacctgtctggttgcacaagcaaaggcctcgtcctgcccgccgtgctgggcatcacctttggtgccttcctcatcggggccctgctcactgctgcactctggtacatctactcgcacacgcgtgagtaccccaggcccccacagtgagcatgccgggcccctccatccacccgggggagcccagtgaagcctctgagggattgaggggccctggccaggaccctgacctccgcccctgcccccgctcccgctcccaggttcccccagcaagcgggagcccgtggtggcggtggctgccccggcctcctcggagagcagcagcaccaaccacagcatcgggagcacccagagcaccccctgctccaccagcagcatggcatagccccggccccccgcgctcgcccagcaggagagactgagcagccgccagctgggagcactggtgtgaactcaccctgggagccagtcctccactcgacccagaatggagcctgctctccgcgcctacccttcccgcctccctctcagaggcctgctgccagtgcagccactggcttggaacaccttggggtccctccaccccacagaaccttcaacccagtgggtctgggatatggctgcccaggagacagaccacttgccacgctgttgtaaaaacccaagtccctgtcatttgaacctggatccagcactggtgaactgagctgggcaggaagggagaacttgaaacagattcaggccagcccagccaggccaacagcacctccccgctgggaagagaagagggcccagcccagagccacctggatctatccctgcggcctccacacctgaacttgcctaactaactggcaggggagacaggagcctagcggagcccagcctgggagcccagagggtggcaagaacagtgggcgttgggagcctagctcctgccacatggagccccctctgccggtcgggcagccagcagagggggagtagccaagctgcttgtcctgggcctgcccctgtgtattcaccaccaataaatcagaccatgaaacc

SEQ ID NO: 1453 - DNA, 3048 bp, Homo sapiens
  source 1..3048: mol_type = genomic DNA
ggcaggcggcctggcccagccccttctctaaggaagcgcatttcctgcctccctgggccggccgggctggatgagccaggagctccctgctgccggtcataccacagccttcatctgcgccctggggccaggactgctgctgtcactgccatccattggagcccagcaccccctccccgcccatccttcggacagcaactccagcccagccccgcgtccctgtgtccacttctcctgacccctcggccgccaccccagaaggctggagcagggacgccgtcgctccggccgcctgctcccctcgggtccccgtgcgagcccacgccggccccggtgcccgcccgcagccctgccactggacacaggataaggcccagcgcacaggcccccacgtggacagcatggaccgcggcacgctccctctggctgttgccctgctgctggccagctgcagcctcagccccacaagtcttgcagaaacagtccattgtgaccttcagcctgtgggccccgagaggggcgaggtgacatataccactagccaggtctcgaagggctgcgtggctcaggcccccaatgccatccttgaagtccatgtcctcttcctggagttcccaacgggcccgtcacagctggagctgactctccaggcatccaagcaaaatggcacctggccccgagaggtgcttctggtcctcagtgtaaacagcagtgtcttcctgcatctccaggccctgggaatcccactgcacttggcctacaattccagcctggtcaccttccaagagcccccgggggtcaacaccacagagctgccatccttccccaagacccagatccttgagtgggcagctgagaggggccccatcacctctgctgctgagctgaatgacccccagagcatcctcctccgactgggccaagcccaggggtcactgtccttctgcatgctggaagccagccaggacatgggccgcacgctcgagtggcggccgcgtactccagccttggtccggggctgccacttggaaggcgtggccggccacaaggaggcgcacatcctgagggtcctgccgggccactcggccgggccccggacggtgacggtgaaggtggaactgagctgcgcacccggggatctcgatgccgtcctcatcctgcagggtcccccctacgtgtcctggctcatcgacgccaaccacaacatgcagatctggaccactggagaatactccttcaagatctttccagagaaaaacattcgtggcttcaagctcccagacacacctcaaggcctcctgggggaggcccggatgctcaatgccagcattgtggcatccttcgtggagctaccgctggccagcattgtctcacttcatgcctccagctgcggtggtaggctgcagacctcacccgcaccgatccagaccactcctcccaaggacacttgtagcccggagctgctcatgtccttgatccagacaaagtgtgccgacgacgccatgaccctggtactaaagaaagagcttgttgcgcatttgaagtgcaccatcacgggcctgaccttctgggaccccagctgtgaggcagaggacaggggtgacaagtttgtcttgcgcagtgcttactccagctgtggcatgcaggtgtcagcaagtatgatcagcaatgaggcggtggtcaatatcctgtcgagctcatcaccacagcggaaaaaggtgcactgcctcaacatggacagcctctctttccagctgggcctctacctcagcccacacttcctccaggcctccaacaccatcgagccggggcagcagagctttgtgcaggtcagagtgtccccatccgtctccgagttcctgctccagttagacagctgccacctggacttggggcctgagggaggcaccgtggaactcatccagggccgggcggccaagggcaactgtgtgagcctgctgtccccaagccccgagggtgacccgcgcttcagcttcctcctccacttctacacagtacccatacccaaaaccggcaccctcagctgcacggtagccctgcgtcccaagaccgggtctcaagaccaggaagtccataggactgtcttcatgcgcttgaacatcatcagccctgacctgtctggttgcacaagcaaaggcctcgtcctgcccgccgtgctgggcatcacctttggtgccttcctcatcggggccctgctcactgctgcactctggtacatctactcgcacacgcgttcccccagcaagcgggagcccgtggtggcggtggctgccccggcctcctcggagagcagcagcaccaaccacagcatcgggagcacccagagcaccccctgctccaccagcagcatggcatagccccggccccccgcgctcgcccagcaggagagactgagcagccgccagctgggagcactggtgtgaactcaccctgggagccagtcctccactcgacccagaatggagcctgctctccgcgcctacccttcccgcctccctctcagaggcctgctgccagtgcagccactggcttggaacaccttggggtccctccaccccacagaaccttcaacccagtgggtctgggatatggctgcccaggagacagaccacttgccacgctgttgtaaaaacccaagtccctgtcatttgaacctggatccagcactggtgaactgagctgggcaggaagggagaacttgaaacagattcaggccagcccagccaggccaacagcacctccccgctgggaagagaagagggcccagcccagagccacctggatctatccctgcggcctccacacctgaacttgcctaactaactggcaggggagacaggagcctagcggagcccagcctgggagcccagagggtggcaagaacagtgggcgttgggagcctagctcctgccacatggagccccctctgccggtcgggcagccagcagagggggagtagccaagctgcttgtcctgggcctgcccctgtgtattcaccaccaataaatcagaccatgaaaccagtga

SEQ ID NO: 1454 - DNA, 2654 bp, Homo sapiens
  source 1..2654: mol_type = genomic DNA
accacagccttcatctgcgccctggggccaggactgctgctgtcactgccatccattggagcccagcaccccctccccgcccatccttcggacagcaactccagcccagccccgcgtccctgtgtccacttctcctgacccctcggccgccaccccagaaggctggagcagggacgccgtcgctccggccgcctgctcccctcgggtccccgtgcgagcccacgccggccccggtgcccgcccgcagccctgccactggacacaggataaggcccagcgcacaggcccccacgtggacagcatggaccgcggcacgctccctctggctgttgccctgctgctggccagctgcagcctcagccccacaagtcttgcagaaacagtccattgtgaccttcagcctgtgggccccgagaggggcgaggtgacatataccactagccaggtctcgaagggctgcgtggctcaggcccccaatgccatccttgaagtccatgtcctcttcctggagttcccaacgggcccgtcacagctggagctgactctccaggcatccaagcaaaatggcacctggccccgagaggtgcttctggtcctcagtgtaaacagcagtgtcttcctgcatctccaggccctgggaatcccactgcacttggcctacaattccagcctggtcaccttccaagagcccccgggggtcaacaccacagagctgccatccttccccaagacccagatccttgagtgggcagctgagaggggccccatcacctctgctgctgagctgaatgacccccagagcatcctcctccgactgggccaagcccaggggtcactgtccttctgcatgctggaagccagccaggacatgggccgcacgctcgagtggcggccgcgtactccagccttggtccggggctgccacttggaaggcgtggccggccacaaggaggcgcacatcctgagggtcctgccgggccactcggccgggccccggacggtgacggtgaaggtggaactgagctgcgcacccggggatctcgatgccgtcctcatcctgcagggtcccccctacgtgtcctggctcatcgacgccaaccacaacatgcagatctggaccactggagaatactccttcaagatctttccagagaaaaacattcgtggcttcaagctcccagacacacctcaaggcctcctgggggaggcccggatgctcaatgccagcattgtggcatccttcgtggagctaccgctggccagcattgtctcacttcatgcctccagctgcggtggtaggctgcagacctcacccgcaccgatccagaccactcctcccaaggacacttgtagcccggagctgctcatgtccttgatccagacaaagtgtgccgacgacgccatgaccctggtactaaagaaagagcttgttgcgcatttgaagtgcaccatcacgggcctgaccttctgggaccccagctgtgaggcagaggacaggggtgacaagtttgtcttgcgcagtgcttactccagctgtggcatgcaggtgtcagcaagtatgatcagcaatgaggcggtggtcaatatcctgtcgagctcatcaccacagcggaaaaaggtgcactgcctcaacatggacagcctctctttccagctgggcctctacctcagcccacacttcctccaggcctccaacaccatcgagccggggcagcagagctttgtgcaggtcagagtgtccccatccgtctccgagttcctgctccagttagacagctgccacctggacttggggcctgagggaggcaccgtggaactcatccagggccgggcggccaagggcaactgtgtgagcctgctgtccccaagccccgagggtgacccgcgcttcagcttcctcctccacttctacacagtacccatacccaaaaccggcaccctcagctgcacggtagccctgcgtcccaagaccgggtctcaagaccaggaagtccataggactgtcttcatgcgcttgaacatcatcagccctgacctgtctggttgcacaagcaaaggcctcgtcctgcccgccgtgctgggcatcacctttggtgccttcctcatcggggccctgctcactgctgcactctggtacatctactcgcacacgcgttcccccagcaagcgggagcccgtggtggcggtggctgccccggcctcctcggagagcagcagcaccaaccacagcatcgggagcacccagagcaccccctgctccaccagcagcatggcatagccccggccccccgcgctcgcccagcaggagagactgagcagccgccagctgggagcactggtgtgaactcaccctgggagccagtcctccactctcagaggcctgctgccagtgcagccactggcttggaacaccttggggtccctccaccccacagaaccttcaacccagtgggtctgggatatggctgcccaggagacagaccacttgccacgctgttgtaaaaacccaagtccctgtcatttgaacctggatccagcactggtgaactgagctgggcaggaagggagaacttgaaacagattcaggccagcccagccaggccaacagcacctccccgctgggaagagaagagggcccagcccagagccacctg

SEQ ID NO: 1455 - DNA, 2149 bp, Homo sapiens
  source 1..2149: mol_type = genomic DNA
aaggctgctgtgaggatcaaatgagttcactcgtgtaaagctgcctaggctcccagtaagcatgatgggagcatctgcagtgattattggtggtctgcaaatggggaaactgaggctcagagaggttaggcttctgctcaaggtgaccagcattttaagaggcagagctgggatttgatccaggccatctggctccagagctgtttttcttgatcatcctccaaggtcttgcagaaacagtccattgtgaccttcagcctgtgggccccgagaggggcgaggtgacatataccactagccaggtctcgaagggctgcgtggctcaggcccccaatgccatccttgaagtccatgtcctcttcctggagttcccaacgggcccgtcacagctggagctgactctccaggcatccaagcaaaatggcacctggccccgagaggtgcttctggtcctcagtgtaaacagcagtgtcttcctgcatctccaggccctgggaatcccactgcacttggcctacaattccagcctggtcaccttccaagagcccccgggggtcaacaccacagagctgccatccttccccaagacccagatccttgagtgggcagctgagaggggccccatcacctctgctgctgagctgaatgacccccagagcatcctcctccgactgggccaagcccaggggtcactgtccttctgcatgctggaagccagccaggacatgggccgcacgctcgagtggcggccgcgtactccagccttggtccggggctgccacttggaaggcgtggccggccacaaggaggcgcacatcctgagggtcctgccgggccactcggccgggccccggacggtgacggtgaaggtggaactgagctgcgcacccggggatctcgatgccgtcctcatcctgcagggtcccccctacgtgtcctggctcatcgacgccaaccacaacatgcagatctggaccactggagaatactccttcaagatctttccagagaaaaacattcgtggcttcaagctcccagacacacctcaaggcctcctgggggaggcccggatgctcaatgccagcattgtggcatccttcgtggagctaccgctggccagcattgtctcacttcatgcctccagctgcggtggtaggctgcagacctcacccgcaccgatccagaccactcctcccaaggacacttgtagcccggagctgctcatgtccttgatccagacaaagtgtgccgacgacgccatgaccctggtactaaagaaagagcttgttgcgcatttgaagtgcaccatcacgggcctgaccttctgggaccccagctgtgaggcagaggacaggggtgacaagtttgtcttgcgcagtgcttactccagctgtggcatgcaggtgtcagcaagtatgatcagcaatgaggcggtggtcaatatcctgtcgagctcatcaccacagcggaaaaaggtgcactgcctcaacatggacagcctctctttccagctgggcctctacctcagcccacacttcctccaggcctccaacaccatcgagccggggcagcagagctttgtgcaggtcagagtgtccccatccgtctccgagttcctgctccagttagacagctgccacctggacttggggcctgagggaggcaccgtggaactcatccagggccgggcggccaagggcaactgtgtgagcctgctgtccccaagccccgagggtgacccgcgcttcagcttcctcctccacttctacacagtacccatacccaaaaccggcaccctcagctgcacggtagccctgcgtcccaagaccgggtctcaagaccaggaagtccataggactgtcttcatgcgcttgaacatcatcagccctgacctgtctggttgcacaagcaaaggcctcgtcctgcccgccgtgctgggcatcacctttggtgccttcctcatcggggccctgctcactgctgcactctggtacatctactcgcacacgcgttcccccagcaagcgggagcccgtggtggcggtggctgccccggcctcctcggagagcagcagcaccaaccacagcatcgggagcacccagagcaccccctgctccaccagcagcatggcatagccccggccccccgc

SEQ ID NO: 1456 - DNA, 2033 bp, Homo sapiens
  source 1..2033: mol_type = genomic DNA
acgcgcctctgcatctgcgccaggcgaacgggtcctgcgcctcctgcagtcccagctctccaccgccgcgtgcgcctgcagacgctccgctcgctgccttctctcctggcaggcgctgccttttctccccgttaaaagggcacttgggctgaaggatcgctttgagatctgaggaacccgcagcgctttgagggacctgaagctgtttttcttcgttttcctttgggttcagtttgaacgggaggtttttgatccctttttttcagaatggattatttgctcatgattttctctctgctgtttgtggcttgccaaggagctccagaaacagcagtcttaggcgctgagctcagcgcggtgggtgagaacggcggggagaaacccactcccagtccaccctggcggctccgccggtccaagcgctgctcctgctcgtccctgatggataaagagtgtgtctacttctgccacctggacatcatttgggtcaacactcccgagcacgttgttccgtatggacttggaagccctaggtccaagagagccttggagaatttacttcccacaaaggcaacagaccgtgaaaatagatgccaatgtgctagccaaaaagacaagaagtgctggaatttttgccaagcaggaaaagaactcagggctgaagacattatggagaaagactggaataatcataagaaaggaaaagactgttccaagcttgggaaaaagtgtatttatcagcagttagtgagaggaagaaaaatcagaagaagttcagaggaacacctaagacaaaccaggtcggagaccatgagaaacagcgtcaaatcatcttttcatgatcccaagctgaaaggcaagccctccagagagcgttatgtgacccacaaccgagcacattggtgacagaccttcggggcctgtctgaagccatagcctccacggagagccctgtggccgactctgcactctccaccctggctgggatcagagcaggagcatcctctgctggttcctgactggcaaaggaccagcgtcctcgttcaaaacattccaagaaaggttaaggagttcccccaaccatcttcactggcttccatcagtggtaactgctttggtctcttctttcatctggggatgacaatggacctctcagcagaaacacacagtcacattcgaattcgggtggcatcctccggagagagagagaggaaggagattccacacaggggtggagtttctgacgaaggtcctaagggagtgtttgtgtctgactcaggcgcctggcacatttcagggagaaactccaaagtccacacaaagattttctaaggaatgcacaaattgaaaacacactcaaaagacaaacatgcaagtaaagaaaaaaaaaagaaagacttttgtttaaatttgtaaaatgcaaaactgaatgaaactgttactaccataaatcaggatatgtttcatgaatatgagtctacctcacctatattgcactctggcagaagtatttcccacatttaattattgcctccccaaactcttcccacccctgctgccccttcctccatcccccatactaaatcctagcctcgtagaagtctggtctaatgtgtcagcagtagatataatattttcatggtaatctactagctctgatccataagaaaaaaaagatcattaaatcaggagattccctgtccttgatttttggagacacaatggtatagggttgtttatgaaatatattgaaaagtaagtgtttgttacgctttaaagcagtaaaattattttcctttatataaccggctaatgaaagaggttggattgaattttgatgtacttatttttttatagatatttatattcaaacaatttattccttatatttaccatgttaaatatctgtttgggcaggccatattggtctatgtatttttaaaatatgtatttctaaatgaaattgagaacatgctttgttttgcctgtcaaggtaatgactttagaaaataaatatttttttccttactgta

SEQ ID NO: 1457 - DNA, 4277 bp, Homo sapiens
  source 1..4277: mol_type = genomic DNA
atcaggaaggagtttcgacccgcgctggcgagtcatgagcgccaagtttcccactggcgcgcaaacttgagttacttttgagcgtggatactggcgaagaggctgcgggcggtattagcgtttgcagcgacttggctcgggcagctgacccaagtgtcctgtcttccttcctctgcttgtctctaggctctgaaactgcggagcggccaccggacgccttctggagcaggtagcagcatgcagccgcctccaagtctgtgcggacgcgccctggttgcgctggttcttgcctgcggcctgtcgcggatctggggagaggagagaggcttcccgcctgacagggccactccgcttttgcaaaccgcagagataatgacgccacccactaagaccttatggcccaagggttccaacgccagtctggcgcggtcgttggcacctgcggaggtgcctaaaggagacaggacggcaggatctccgccacgcaccatctcccctcccccgtgccaaggacccatcgagatcaaggagactttcaaatacatcaacacggttgtgtcctgccttgtgttcgtgctggggatcatcgggaactccacacttctgagaattatctacaagaacaagtgcatgcgaaacggtcccaatatcttgatcgccagcttggctctgggagacctgctgcacatcgtcattgacatccctatcaatgtctacaagctgctggcagaggactggccatttggagctgagatgtgtaagctggtgcctttcatacagaaagcctctgtgggaatcactgtgctgagtctatgtgctctgagtattgacagatatcgagctgttgcttcttggagtagaattaaaggaattggggttccaaaatggacagcagtagaaattgttttgatttgggtggtctctgtggttctggctgtccctgaagccataggttttgatataattacgatggactacaaaggaagttatctgcgaatctgcttgcttcatcccgttcagaagacagctttcatgcagttttacaagacagcaaaagattggtggctattcagtttctatttctgcttgccattggccatcactgcatttttttatacactaatgacctgtgaaatgttgagaaagaaaagtggcatgcagattgctttaaatgatcacctaaagcagagacgggaagtggccaaaaccgtcttttgcctggtccttgtctttgccctctgctggcttccccttcacctcagcaggattctgaagctcactctttataatcagaatgatcccaatagatgtgaacttttgagctttctgttggtattggactatattggtatcaacatggcttcactgaattcctgcattaacccaattgctctgtatttggtgagcaaaagattcaaaaactgctttaagtcatgcttatgctgctggtgccagtcatttgaagaaaaacagtccttggaggaaaagcagtcgtgcttaaagttcaaagctaatgatcacggatatgacaacttccgttccagtaataaatacagctcatcttgaaagaagaactattcactgtatttcattttctttatattggaccgaagtcattaaaacaaaatgaaacatttgccaaaacaaaacaaaaaactatgtatttgcacagcacactattaaaatattaagtgtaattattttaacactcacagctacatatgacattttatgagctgtttacggcatggaaagaaaatcagtgggaattaagaaagcctcgtcgtgaaagcacttaattttttacagttagcacttcaacatagctcttaacaacttccaggatattcacacaacacttaggcttaaaaatgagctcactcagaatttctattctttctaaaaagagatttatttttaaatcaatgggactctgatataaaggaagaataagtcactgtaaaacagaacttttaaatgaagcttaaattactcaatttaaaattttaaaatcctttaaaacaacttttcaattaatattatcacactattatcagattgtaattagatgcaaatgagagagcagtttagttgttgcatttttcggacactggaaacatttaaatgatcaggagggagtaacagaaagagcaaggctgtttttgaaaatcattacactttcactagaagcccaaacctcagcattctgcaatatgtaaccaacatgtcacaaacaagcagcatgtaacagactggcacatgtgccagctgaatttaaaatataatacttttaaaaagaaaattattacatcctttacattcagttaagatcaaacctcacaaagagaaatagaatgtttgaaaggctatcccaaaagacttttttgaatctgtcattcacataccctgtgaagacaatactatctacaattttttcaggattattaaaatcttcttctttcactatcgtagcttaaactctgtttggttttgtcatctgtaaatacttacctacatacactgcatgtagatgattaaatgagggcaggccctgtgctcatagctttacgatggagagatgccagtgacctcataataaagactgtgaactgcctggtgcagtgtccacatgacaaaggggcaggtagcaccctctctcacccatgctgtggttaaaatggtttctagcatatgtataatgctatagttaaaatactatttttcaaaatcatacagattagtacatttaacagctacctgtaaagcttattactaatttttgtattatttttgtaaatagccaatagaaaagtttgcttgacatggtgcttttctttcatctagaggcaaaactgctttttgagaccgtaagaacctcttagctttgtgcgttcctgcctaatttttatatcttctaagcaaagtgccttaggatagcttgggatgagatgtgtgtgaaagtatgtacaagagaaaacggaagagagaggaaatgaggtggggttggaggaaacccatggggacagattcccattcttagcctaacgttcgtcattgcctcgtcacatcaatgcaaaaggtcctgattttgttccagcaaaacacagtgcaatgttctcagagtgactttcgaaataaattgggcccaagagctttaactcggtcttaaaatatgcccaaatttttactttgtttttcttttaataggctgggccacatgttggaaataagctagtaatgttgttttctgtcaatattgaatgtgatggtacagtaaaccaaaacccaacaatgtggccagaaagaaagagcaataataattaattcacacaccatatggattctatttataaatcacccacaaacttgttctttaatttcatcccaatcactttttcagaggcctgttatcatagaagtcattttagactctcaattttaaattaattttgaatcactaatattttcacagtttattaatatatttaatttctatttaaattttagattatttttattaccatgtactgaatttttacatcctgataccttttccttctccatgtcagtatcatgttctctaattatcttgccaaattttgaaactacacacaaaaagcatacttgcattatttataataaaattgcattcagtggctttttaaaaaaatgtttgattcaaaactttaacatactgataagtaagaaacaattataatttctttacatactcaaaaccaagatagaaaaaggtgctatcgttcaacttcaaaacatgtttcctagtattaaggactttaatatagcaacagacaaaattattgttaacatggatgttacagctcaaaagatttataaaagattttaacctattttctcccttattatccactgctaatgtggatgtatgttcaaacaccttttagtattgatagcttacatatggccaaaggaatacagtttatagcaaaacatgggtatgctgtagctaactttataaaagtgtaatataacaatgtaaaaaattatatatctgggaggattttttggttgcctaaagtggctatagttactgattttttattatgtaagcaaaaccaataaaaatttaagtttttttaacaactaccttatttttcactgtacagacactaattcattaaatactaattgattgtttaaaagaaatataaatgtgacaagtggacattatttatgttaaatatacaattatcaagcaagtatgaagttattcaattaaaatgccacatttctgg

SEQ ID NO: 1458 - DNA, 4471 bp, Homo sapiens
  source 1..4471: mol_type = genomic DNA
aaacagccttttgggacctgtccccggacgaggactgcccccctccctcgggcaactactactgatgctgtccaggcatcgcccaaggggaaaggttgcagcggggtcggaaggcgcgggaggagtctggcggtgattgatgggaagggatgaatgaataaaagtacttgtctgatggcagcagagaccccgagcaaacggtggaggctacactgtctggcattctcgcagcgtttcgtcagagccggacccgcctgcagctcaagggaggcgtgctcctctcccagagcaggctggaacccagctgggttccgcctcccgggaaggtggtctccattcgtcgctctgcatctggtttgtcagatccgagaggctctgaaactgcggagcggccaccggacgccttctggagcaggtagcagcatgcagccgcctccaagtctgtgcggacgcgccctggttgcgctggttcttgcctgcggcctgtcgcggatctggggagaggagagaggcttcccgcctgacagggccactccgcttttgcaaaccgcagagataatgacgccacccactaagaccttatggcccaagggttccaacgccagtctggcgcggtcgttggcacctgcggaggtgcctaaaggagacaggacggcaggatctccgccacgcaccatctcccctcccccgtgccaaggacccatcgagatcaaggagactttcaaatacatcaacacggttgtgtcctgccttgtgttcgtgctggggatcatcgggaactccacacttctgagaattatctacaagaacaagtgcatgcgaaacggtcccaatatcttgatcgccagcttggctctgggagacctgctgcacatcgtcattgacatccctatcaatgtctacaagctgctggcagaggactggccatttggagctgagatgtgtaagctggtgcctttcatacagaaagcctctgtgggaatcactgtgctgagtctatgtgctctgagtattgacagatatcgagctgttgcttcttggagtagaattaaaggaattggggttccaaaatggacagcagtagaaattgttttgatttgggtggtctctgtggttctggctgtccctgaagccataggttttgatataattacgatggactacaaaggaagttatctgcgaatctgcttgcttcatcccgttcagaagacagctttcatgcagttttacaagacagcaaaagattggtggctattcagtttctatttctgcttgccattggccatcactgcatttttttatacactaatgacctgtgaaatgttgagaaagaaaagtggcatgcagattgctttaaatgatcacctaaagcagagacgggaagtggccaaaaccgtcttttgcctggtccttgtctttgccctctgctggcttccccttcacctcagcaggattctgaagctcactctttataatcagaatgatcccaatagatgtgaacttttgagctttctgttggtattggactatattggtatcaacatggcttcactgaattcctgcattaacccaattgctctgtatttggtgagcaaaagattcaaaaactgctttaagtcatgcttatgctgctggtgccagtcatttgaagaaaaacagtccttggaggaaaagcagtcgtgcttaaagttcaaagctaatgatcacggatatgacaacttccgttccagtaataaatacagctcatcttgaaagaagaactattcactgtatttcattttctttatattggaccgaagtcattaaaacaaaatgaaacatttgccaaaacaaaacaaaaaactatgtatttgcacagcacactattaaaatattaagtgtaattattttaacactcacagctacatatgacattttatgagctgtttacggcatggaaagaaaatcagtgggaattaagaaagcctcgtcgtgaaagcacttaattttttacagttagcacttcaacatagctcttaacaacttccaggatattcacacaacacttaggcttaaaaatgagctcactcagaatttctattctttctaaaaagagatttatttttaaatcaatgggactctgatataaaggaagaataagtcactgtaaaacagaacttttaaatgaagcttaaattactcaatttaaaattttaaaatcctttaaaacaacttttcaattaatattatcacactattatcagattgtaattagatgcaaatgagagagcagtttagttgttgcatttttcggacactggaaacatttaaatgatcaggagggagtaacagaaagagcaaggctgtttttgaaaatcattacactttcactagaagcccaaacctcagcattctgcaatatgtaaccaacatgtcacaaacaagcagcatgtaacagactggcacatgtgccagctgaatttaaaatataatacttttaaaaagaaaattattacatcctttacattcagttaagatcaaacctcacaaagagaaatagaatgtttgaaaggctatcccaaaagacttttttgaatctgtcattcacataccctgtgaagacaatactatctacaattttttcaggattattaaaatcttcttctttcactatcgtagcttaaactctgtttggttttgtcatctgtaaatacttacctacatacactgcatgtagatgattaaatgagggcaggccctgtgctcatagctttacgatggagagatgccagtgacctcataataaagactgtgaactgcctggtgcagtgtccacatgacaaaggggcaggtagcaccctctctcacccatgctgtggttaaaatggtttctagcatatgtataatgctatagttaaaatactatttttcaaaatcatacagattagtacatttaacagctacctgtaaagcttattactaatttttgtattatttttgtaaatagccaatagaaaagtttgcttgacatggtgcttttctttcatctagaggcaaaactgctttttgagaccgtaagaacctcttagctttgtgcgttcctgcctaatttttatatcttctaagcaaagtgccttaggatagcttgggatgagatgtgtgtgaaagtatgtacaagagaaaacggaagagagaggaaatgaggtggggttggaggaaacccatggggacagattcccattcttagcctaacgttcgtcattgcctcgtcacatcaatgcaaaaggtcctgattttgttccagcaaaacacagtgcaatgttctcagagtgactttcgaaataaattgggcccaagagctttaactcggtcttaaaatatgcccaaatttttactttgtttttcttttaataggctgggccacatgttggaaataagctagtaatgttgttttctgtcaatattgaatgtgatggtacagtaaaccaaaacccaacaatgtggccagaaagaaagagcaataataattaattcacacaccatatggattctatttataaatcacccacaaacttgttctttaatttcatcccaatcactttttcagaggcctgttatcatagaagtcattttagactctcaattttaaattaattttgaatcactaatattttcacagtttattaatatatttaatttctatttaaattttagattatttttattaccatgtactgaatttttacatcctgataccttttccttctccatgtcagtatcatgttctctaattatcttgccaaattttgaaactacacacaaaaagcatacttgcattatttataataaaattgcattcagtggctttttaaaaaaatgtttgattcaaaactttaacatactgataagtaagaaacaattataatttctttacatactcaaaaccaagatagaaaaaggtgctatcgttcaacttcaaaacatgtttcctagtattaaggactttaatatagcaacagacaaaattattgttaacatggatgttacagctcaaaagatttataaaagattttaacctattttctcccttattatccactgctaatgtggatgtatgttcaaacaccttttagtattgatagcttacatatggccaaaggaatacagtttatagcaaaacatgggtatgctgtagctaactttataaaagtgtaatataacaatgtaaaaaattatatatctgggaggattttttggttgcctaaagtggctatagttactgattttttattatgtaagcaaaaccaataaaaatttaagtttttttaacaactaccttatttttcactgtacagacactaattcattaaatactaattgattgtttaaaagaaatataaatgtgacaagtggacattatttatgttaaatatacaattatcaagcaagtatgaagttattcaattaaaatgccacatttctggtctctggg

SEQ ID NO: 1459 - DNA, 2530 bp, Homo sapiens
  source 1..2530: mol_type = genomic DNA
aagaaaaacagctgagagggcatcaggaaggagtttcgacccgcgctggcgagtcatgagcgccaagtttcccactggcgcgcaaacttgagttacttttgagcgtggatactggcgaagaggctgcgggcggtattagcgtttgcagcgacttggctcgggcagctgacccaagtgtcctgtcttccttcctctgcttgtctctaggctctgaaactgcggagcggccaccggacgccttctggagcaggtagcagcatgcagccgcctccaagtctgtgcggacgcgccctggttgcgctggttcttgcctgcggcctgtcgcggatctggggagaggagagaggcttcccgcctgacagggccactccgcttttgcaaaccgcagagataatgacgccacccactaagaccttatggcccaagggttccaacgccagtctggcgcggtcgttggcacctgcggaggtgcctaaaggagacaggacggcaggatctccgccacgcaccatctcccctcccccgtgccaaggacccatcgagatcaaggagactttcaaatacatcaacacggttgtgtcctgccttgtgttcgtgctggggatcatcgggaactccacacttctgagaattatctacaagaacaagtgcatgcgaaacggtcccaatatcttgatcgccagcttggctctgggagacctgctgcacatcgtcattgacatccctatcaatgtctacaagctgctggcagaggactggccatttggagctgagatgtgtaagctggtgcctttcatacagaaagcctctgtgggaatcactgtgctgagtctatgtgctctgagtattgacagatatcgagctgttgcttcttggagtagaattaaaggaattggggttccaaaatggacagcagtagaaattgttttgatttgggtggtctctgtggttctggctgtccctgaagccataggttttgatataattacgatggactacaaaggaagttatctgcgaatctgcttgcttcatcccgttcagaagacagctttcatgcagttttacaagacagcaaaagattggtggctattcagtttctatttctgcttgccattggccatcactgcatttttttatacactaatgacctgtgaaatgttgagaaagaaaagtggcatgcagattgctttaaatgatcacctaaagcagagacgggaagtggccaaaaccgtcttttgcctggtccttgtctttgccctctgctggcttccccttcacctcagcaggattctgaagctcactctttataatcagaatgatcccaatagatgtgaacttttgagctttctgttggtattggactatattggtatcaacatggcttcactgaattcctgcattaacccaattgctctgtatttggtgagcaaaagattcaaaaactgctttaaggctgggccacatgttggaaataagctagtaatgttgttttctgtcaatattgaatgtgatggtacagtaaaccaaaacccaacaatgtggccagaaagaaagagcaataataattaattcacacaccatatggattctatttataaatcacccacaaacttgttctttaatttcatcccaatcactttttcagaggcctgttatcatagaagtcattttagactctcaattttaaattaattttgaatcactaatattttcacagtttattaatatatttaatttctatttaaattttagattatttttattaccatgtactgaatttttacatcctgataccttttccttctccatgtcagtatcatgttctctaattatcttgccaaattttgaaactacacacaaaaagcatacttgcattatttataataaaattgcattcagtggctttttaaaaaaatgtttgattcaaaactttaacatactgataagtaagaaacaattataatttctttacatactcaaaaccaagatagaaaaaggtgctatcgttcaacttcaaaacatgtttcctagtattaaggactttaatatagcaacagacaaaattattgttaacatggatgttacagctcaaaagatttataaaagattttaacctattttctcccttattatccactgctaatgtggatgtatgttcaaacaccttttagtattgatagcttacatatggccaaaggaatacagtttatagcaaaacatgggtatgctgtagctaactttataaaagtgtaatataacaatgtaaaaaattatatatctgggaggattttttggttgcctaaagtggctatagttactgattttttattatgtaagcaaaaccaataaaaatttaagtttttttaacaactaccttatttttcactgtacagacactaattcattaaatactaattgattgtttaaaagaaatataaatgtgacaagtggacattatttatgttaaatatacaattatcaagcaagtatgaagttattcaattaaaatgccacatttctggtctctggg

SEQ ID NO: 1460 - DNA, 2993 bp, Homo sapiens
  source 1..2993: mol_type = genomic DNA
attctgctggctgcgcggtggcggcggctgtgtgtgcgccgcgccttgccgccccccctggccccccgagcccggggcgcagccatggctctgcggaggctgggggccgcgctgctgctgctgccgctgctcgccgccgtggaagaaacgctaatggactccactacagcgactgctgagctgggctggatggtgcatcctccatcagggtgggaagaggtgagtggctacgatgagaacatgaacacgatccgcacgtaccaggtgtgcaacgtgtttgagtcaagccagaacaactggctacggaccaagtttatccggcgccgtggcgcccaccgcatccacgtggagatgaagttttcggtgcgtgactgcagcagcatccccagcgtgcctggctcctgcaaggagaccttcaacctctattactatgaggctgactttgactcggccaccaagaccttccccaactggatggagaatccatgggtgaaggtggataccattgcagccgacgagagcttctcccaggtggacctgggtggccgcgtcatgaaaatcaacaccgaggtgcggagcttcggacctgtgtcccgcagcggcttctacctggccttccaggactatggcggctgcatgtccctcatcgccgtgcgtgtcttctaccgcaagtgcccccgcatcatccagaatggcgccatcttccaggaaaccctgtcgggggctgagagcacatcgctggtggctgcccggggcagctgcatcgccaatgcggaagaggtggatgtacccatcaagctctactgtaacggggacggcgagtggctggtgcccatcgggcgctgcatgtgcaaagcaggcttcgaggccgttgagaatggcaccgtctgccgaggttgtccatctgggactttcaaggccaaccaaggggatgaggcctgtacccactgtcccatcaacagccggaccacttctgaaggggccaccaactgtgtctgccgcaatggctactacagagcagacctggaccccctggacatgccctgcacaaccatcccctccgcgccccaggctgtgatttccagtgtcaatgagacctccctcatgctggagtggacccctccccgcgactccggaggccgagaggacctcgtctacaacatcatctgcaagagctgtggctcgggccggggtgcctgcacccgctgcggggacaatgtacagtacgcaccacgccagctaggcctgaccgagccacgcatttacatcagtgacctgctggcccacacccagtacaccttcgagatccaggctgtgaacggcgttactgaccagagccccttctcgcctcagttcgcctctgtgaacatcaccaccaaccaggcagctccatcggcagtgtccatcatgcatcaggtgagccgcaccgtggacagcattaccctgtcgtggtcccagccggaccagcccaatggcgtgatcctggactatgagctgcagtactatgagaaggagctcagtgagtacaacgccacagccataaaaagccccaccaacacggtcaccgtgcagggcctcaaagccggcgccatctatgtcttccaggtgcgggcacgcaccgtggcaggttacgggcgctacagcggcaagatgtacttccagaccatgacagaagtgaccccaggcatgaagatctacatcgatcctttcacctacgaggaccccaacgaggcagtgcgggagtttgccaaggaaattgacatctcctgtgtcaaaattgagcaggtgatcggagcaggggagtttggcgaggtctgcagtggccacctgaagctgccaggcaagagagagatctttgtggccatcaagacgctcaagtcgggctacacggagaagcagcgccgggacttcctgagcgaagcctccatcatgggccagttcgaccatcccaacgtcatccacctggagggtgtcgtgaccaagagcacacctgtgatgatcatcaccgagttcatggagaatggctccctggactcctttctccggcaaaacgatgggcagttcacagtcatccagctggtgggcatgcttcggggcatcgcagctggcatgaagtacctggcagacatgaactatgttcaccgtgacctggctgcccgcaacatcctcgtcaacagcaacctggtctgcaaggtgtcggactttgggctctcacgctttctagaggacgatacctcagaccccacctacaccagtgccctgggcggaaagatccccatccgctggacagccccggaagccatccagtaccggaagttcacctcggccagtgatgtgtggagctacggcattgtcatgtgggaggtgatgtcctatggggagcggccctactgggacatgaccaaccaggatgtaatcaatgccattgagcaggactatcggctgccaccgcccatggactgcccgagcgccctgcaccaactcatgctggactgttggcagaaggaccgcaaccaccggcccaagttcggccaaattgtcaacacgctagacaagatgatccgcaatcccaacagcctcaaagccatggcgcccctctcctctggcatcaacctgccgctgctggaccgcacgatccccgactacaccagctttaacacggtggacgagtggctggaggccatcaagatggggcagtacaaggagagcttcgccaatgccggcttcacctcctttgacgtcgtgtctcagatgatgatggaggacattctccgggttggggtcactttggctggccaccagaaaaaaatcctgaacagtatccaggtgatgcgggcgcagatgaaccagattcagtctgtggaggtttgacattcacctgcctcggctcacctcttcctccaagccccgccccctctgccccacgtgccggccctcctggtgctctatccactgcagggccagccactcgccaggaggccacgggccacggg

SEQ ID NO: 1461 - DNA, 4014 bp, Homo sapiens
  source 1..4014: mol_type = genomic DNA
taacacagttgtgaaaatagatggatgtgggttccagtcctagccctgcctgtgtgcacttatgcagaaacgctaatggactccactacagcgactgctgagctgggctggatggtgcatcctccatcagggtgggaagaggtgagtggctacgatgagaacatgaacacgatccgcacgtaccaggtgtgcaacgtgtttgagtcaagccagaacaactggctacggaccaagtttatccggcgccgtggcgcccaccgcatccacgtggagatgaagttttcggtgcgtgactgcagcagcatccccagcgtgcctggctcctgcaaggagaccttcaacctctattactatgaggctgactttgactcggccaccaagaccttccccaactggatggagaatccatgggtgaaggtggataccattgcagccgacgagagcttctcccaggtggacctgggtggccgcgtcatgaaaatcaacaccgaggtgcggagcttcggacctgtgtcccgcagcggcttctacctggccttccaggactatggcggctgcatgtccctcatcgccgtgcgtgtcttctaccgcaagtgcccccgcatcatccagaatggcgccatcttccaggaaaccctgtcgggggctgagagcacatcgctggtggctgcccggggcagctgcatcgccaatgcggaagaggtggatgtacccatcaagctctactgtaacggggacggcgagtggctggtgcccatcgggcgctgcatgtgcaaagcaggcttcgaggccgttgagaatggcaccgtctgccgaggttgtccatctgggactttcaaggccaaccaaggggatgaggcctgtacccactgtcccatcaacagccggaccacttctgaaggggccaccaactgtgtctgccgcaatggctactacagagcagacctggaccccctggacatgccctgcacaaccatcccctccgcgccccaggctgtgatttccagtgtcaatgagacctccctcatgctggagtggacccctccccgcgactccggaggccgagaggacctcgtctacaacatcatctgcaagagctgtggctcgggccggggtgcctgcacccgctgcggggacaatgtacagtacgcaccacgccagctaggcctgaccgagccacgcatttacatcagtgacctgctggcccacacccagtacaccttcgagatccaggctgtgaacggcgttactgaccagagccccttctcgcctcagttcgcctctgtgaacatcaccaccaaccaggcagctccatcggcagtgtccatcatgcatcaggtgagccgcaccgtggacagcattaccctgtcgtggtcccagccggaccagcccaatggcgtgatcctggactatgagctgcagtactatgagaagcaggagctcagtgagtacaacgccacagccataaaaagccccaccaacacggtcaccgtgcagggcctcaaagccggcgccatctatgtcttccaggtgcgggcacgcaccgtggcaggttacgggcgctacagcggcaagatgtacttccagaccatgacagaagccgagtaccagacaagcatccaggagaagttgccactcatcatcggctcctcggccgctggcctggtcttcctcattgctgtggttgtcatcgccatcgtgtgtaacagacgggggtttgagcgtgctgactcggagtacacggacaagctgcaacactacaccagtggccacatgaccccaggcatgaagatctacatcgatcctttcacctacgaggaccccaacgaggcagtgcgggagtttgccaaggaaattgacatctcctgtgtcaaaattgagcaggtgatcggagcaggggagtttggcgaggtctgcagtggccacctgaagctgccaggcaagagagagatctttgtggccatcaagacgctcaagtcgggctacacggagaagcagcgccgggacttcctgagcgaagcctccatcatgggccagttcgaccatcccaacgtcatccacctggagggtgtcgtgaccaagagcacacctgtgatgatcatcaccgagttcatggagaatggctccctggactcctttctccggcaaaacgatgggcagttcacagtcatccagctggtgggcatgcttcggggcatcgcagctggcatgaagtacctggcagacatgaactatgttcaccgtgacctggctgcccgcaacatcctcgtcaacagcaacctggtctgcaaggtgtcggactttgggctctcacgctttctagaggacgatacctcagaccccacctacaccagtgccctgggcggaaagatccccatccgctggacagccccggaagccatccagtaccggaagttcacctcggccagtgatgtgtggagctacggcattgtcatgtgggaggtgatgtcctatggggagcggccctactgggacatgaccaaccaggatgtaatcaatgccattgagcaggactatcggctgccaccgcccatggactgcccgagcgccctgcaccaactcatgctggactgttggcagaaggaccgcaaccaccggcccaagttcggccaaattgtcaacacgctagacaagatgatccgcaatcccaacagcctcaaagccatggcgcccctctcctctggcatcaacctgccgctgctggaccgcacgatccccgactacaccagctttaacacggtggacgagtggctggaggccatcaagatggggcagtacaaggagagcttcgccaatgccggcttcacctcctttgacgtcgtgtctcagatgatgatggagtaagtgcccagccacttctgcttgtcaccttagcaccccctctccaccggccccaccagccaagtggggtgatctggagggtgaggaatagatcatgtcccaatagggaagcagggaccaaggggcaagatggccaactttggagtcacctgtggactgatacccaggtctgcctgccacctacaagctctgtgaccttggtcaaatcatagcacctccctcagcctccgttttctcacctacaaactgggggttggtaggaaggttgagggagatataaaggaagcgggtgcttagaaaatgcaagctggcagccgggcacagtggctcatgcctgtaatcttagtacattgggaggccgaggcgggcagatcacaaggtcaggagttcaagaccagcctgaccaacatggtgaaaccccgtctctactaaaatgcaaaaaattagccacgcaaggtggcatgcacctgtaatgccagctactcgggaggctgaggcaggggaattgcttgaaccaaggaggtagaggttgcagtgagctgagatcacgccactgcacaccagcctgggtgacagagcgagactctgtctcgaaaaagaaagaaaatgtaagctggcttccccctcccaatagcaggggagagaaggccccctagggaccctgattccgactcaagtgctcttccacctcacaccatagtcgctccctccagctgtggctgcctgcccactccccactccccactccccagtactccttgctttgccatcttcctcccggggaagcccaggcagctctctaccaggcacaggaccccttcacccgcatatttccctaacacacgtgcttctctcccaaagggacattctccgggttggggtcactttggctggccaccagaaaaaaatcctgaacagtatccaggtgatgcgggcgcagatgaaccagattcagtctgtggaggtttgacattcacctgcctcggctcacctcttcctccaagccccgccccctctgccccacgtgccggccctcctggtgctctatccactgcagggccagccactcgccaggaggccacgggccacgggaagaaccaagcggtgccagccacgagacgtcaccaagaaaacatgcaactcaaacgacgg

SEQ ID NO: 1462 - DNA, 3152 bp, Homo sapiens
  source 1..3152: mol_type = genomic DNA
gccccgggaagcgcagccatggctctgcggaggctgggggccgcgctgctgctgctgccgctgctcgccgccgtggaagaaacgctaatggactccactacagcgactgctgagctgggctggatggtgcatcctccatcagggtgggaagaggtgagtggctacgatgagaacatgaacacgatccgcacgtaccaggtgtgcaacgtgtttgagtcaagccagaacaactggctacggaccaagtttatccggcgccgtggcgcccaccgcatccacgtggagatgaagttttcggtgcgtgactgcagcagcatccccagcgtgcctggctcctgcaaggagaccttcaacctctattactatgaggctgactttgactcggccaccaagaccttccccaactggatggagaatccatgggtgaaggtggataccattgcagccgacgagagcttctcccaggtggacctgggtggccgcgtcatgaaaatcaacaccgaggtgcggagcttcggacctgtgtcccgcagcggcttctacctggccttccaggactatggcggctgcatgtccctcatcgccgtgcgtgtcttctaccgcaagtgcccccgcatcatccagaatggcgccatcttccaggaaaccctgtcgggggctgagagcacatcgctggtggctgcccggggcagctgcatcgccaatgcggaagaggtggatgtacccatcaagctctactgtaacggggacggcgagtggctggtgcccatcgggcgctgcatgtgcaaagcaggcttcgaggccgttgagaatggcaccgtctgccgaggttgtccatctgggactttcaaggccaaccaaggggatgaggcctgtacccactgtcccatcaacagccggaccacttctgaaggggccaccaactgtgtctgccgcaatggctactacagagcagacctggaccccctggacatgccctgcacaaccatcccctccgcgccccaggctgtgatttccagtgtcaatgagacctccctcatgctggagtggacccctccccgcgactccggaggccgagaggacctcgtctacaacatcatctgcaagagctgtggctcgggccggggtgcctgcacccgctgcggggacaatgtacagtacgcaccacgccagctaggcctgaccgagccacgcatttacatcagtgacctgctggcccacacccagtacaccttcgagatccaggctgtgaacggcgttactgaccagagccccttctcgcctcagttcgcctctgtgaacatcaccaccaaccaggcagctccatcggcagtgtccatcatgcatcaggtgagccgcaccgtggacagcattaccctgtcgtggtcccagccggaccagcccaatggcgtgatcctggactatgagctgcagtactatgagaaggagctcagtgagtacaacgccacagccataaaaagccccaccaacacggtcaccgtgcagggcctcaaagccggcgccatctatgtcttccaggtgcgggcacgcaccgtggcaggttacgggcgctacagcggcaagatgtacttccagaccatgacagaagccgagtaccagacaagcatccaggagaagttgccactcatcatcggctcctcggccgctggcctggtcttcctcattgctgtggttgtcatcgccatcgtgtgtaacagacgggggtttgagcgtgctgactcggagtacacggacaagctgcaacactacaccagtggccacatgaccccaggcatgaagatctacatcgatcctttcacctacgaggaccccaacgaggcagtgcgggagtttgccaaggaaattgacatctcctgtgtcaaaattgagcaggtgatcggagcaggggagtttggcgaggtctgcagtggccacctgaagctgccaggcaagagagagatctttgtggccatcaagacgctcaagtcgggctacacggagaagcagcgccgggacttcctgagcgaagcctccatcatgggccagttcgaccatcccaacgtcatccacctggagggtgtcgtgaccaagagcacacctgtgatgatcatcaccgagttcatggagaatggctccctggactcctttctccggcaaaacgatgggcagttcacagtcatccagctggtgggcatgcttcggggcatcgcagctggcatgaagtacctggcagacatgaactatgttcaccgtgacctggctgcccgcaacatcctcgtcaacagcaacctggtctgcaaggtgtcggactttgggctctcacgctttctagaggacgatacctcagaccccacctacaccagtgccctgggcggaaagatccccatccgctggacagccccggaagccatccagtaccggaagttcacctcggccagtgatgtgtggagctacggcattgtcatgtgggaggtgatgtcctatggggagcggccctactgggacatgaccaaccaggatgtaatcaatgccattgagcaggactatcggctgccaccgcccatggactgcccgagcgccctgcaccaactcatgctggactgttggcagaaggaccgcaaccaccggcccaagttcggccaaattgtcaacacgctagacaagatgatccgcaatcccaacagcctcaaagccatggcgcccctctcctctggcatcaacctgccgctgctggaccgcacgatccccgactacaccagctttaacacggtggacgagtggctggaggccatcaagatggggcagtacaaggagagcttcgccaatgccggcttcacctcctttgacgtcgtgtctcagatgatgatggaggacattctccgggttggggtcactttggctggccaccagaaaaaaatcctgaacagtatccaggtgatgcgggcgcagatgaaccagattcagtctgtggaggtttgacattcacctgcctcggctcacctcttcctccaagccccgccccctctgccccacgtgccggccctcctggtgctctatccactgcagggccagccactcgccaggaggccacgggccacgggaagaaccaagcggtgccagccacgagacgtcaccaagaaaacatgcaactc

SEQ ID NO: 1463 - DNA, 3677 bp, Homo sapiens
  source 1..3677: mol_type = genomic DNA
gggaagcgcagccatggctctgcggaggctgggggccgcgctgctgctgctgccgctgctcgccgccgtggaagaaacgctaatggactccactacagcgactgctgagctgggctggatggtgcatcctccatcagggtgggaagaggtgagtggctacgatgagaacatgaacacgatccgcacgtaccaggtgtgcaacgtgtttgagtcaagccagaacaactggctacggaccaagtttatccggcgccgtggcgcccaccgcatccacgtggagatgaagttttcggtgcgtgactgcagcagcatccccagcgtgcctggctcctgcaaggagaccttcaacctctattactatgaggctgactttgactcggccaccaagaccttccccaactggatggagaatccatgggtgaaggtggataccattgcagccgacgagagcttctcccaggtggacctgggtggccgcgtcatgaaaatcaacaccgaggtgcggagcttcggacctgtgtcccgcagcggcttctacctggccttccaggactatggcggctgcatgtccctcatcgccgtgcgtgtcttctaccgcaagtgcccccgcatcatccagaatggcgccatcttccaggaaaccctgtcgggggctgagagcacatcgctggtggctgcccggggcagctgcatcgccaatgcggaagaggtggatgtacccatcaagctctactgtaacggggacggcgagtggctggtgcccatcgggcgctgcatgtgcaaagcaggcttcgaggccgttgagaatggcaccgtctgccgaggttgtccatctgggactttcaaggccaaccaaggggatgaggcctgtacccactgtcccatcaacagccggaccacttctgaaggggccaccaactgtgtctgccgcaatggctactacagagcagacctggaccccctggacatgccctgcacaaccatcccctccgcgccccaggctgtgatttccagtgtcaatgagacctccctcatgctggagtggacccctccccgcgactccggaggccgagaggacctcgtctacaacatcatctgcaagagctgtggctcgggccggggtgcctgcacccgctgcggggacaatgtacagtacgcaccacgccagctaggcctgaccgagccacgcatttacatcagtgacctgctggcccacacccagtacaccttcgagatccaggctgtgaacggcgttactgaccagagccccttctcgcctcagttcgcctctgtgaacatcaccaccaaccaggcagctccatcggcagtgtccatcatgcatcaggtgagccgcaccgtggacagcattaccctgtcgtggtcccagccggaccagcccaatggcgtgatcctggactatgagctgcagtactatgagaaggagctcagtgagtacaacgccacagccataaaaagccccaccaacacggtcaccgtgcagggcctcaaagccggcgccatctatgtcttccaggtgcgggcacgcaccgtggcaggttacgggcgctacagcggcaagatgtacttccagaccatgacagaagccgagtaccagacaagcatccaggagaagttgccactcatcatcggctcctcggccgctggcctggtcttcctcattgctgtggttgtcatcgccatcgtgtgtaacagaagacgggggtttgagcgtgctgactcggagtacacggacaagctgcaacactacaccagtggccacatgaccccaggcatgaagatctacatcgatcctttcacctacgaggaccccaacgaggcagtgcgggagtttgccaaggaaattgacatctcctgtgtcaaaattgagcaggtgatcggagcaggggagtttggcgaggtctgcagtggccacctgaagctgccaggcaagagagagatctttgtggccatcaagacgctcaagtcgggctacacggagaagcagcgccgggacttcctgagcgaagcctccatcatgggccagttcgaccatcccaacgtcatccacctggagggtgtcgtgaccaagagcacacctgtgatgatcatcaccgagttcatggagaatggctccctggactcctttctccggcaaaacgatgggcagttcacagtcatccagctggtgggcatgcttcggggcatcgcagctggcatgaagtacctggcagacatgaactatgttcaccgtgacctggctgcccgcaacatcctcgtcaacagcaacctggtctgcaaggtgtcggactttgggctctcacgctttctagaggacgatacctcagaccccacctacaccagtgccctgggcggaaagatccccatccgctggacagccccggaagccatccagtaccggaagttcacctcggccagtgatgtgtggagctacggcattgtcatgtgggaggtgatgtcctatggggagcggccctactgggacatgaccaaccaggatgtaatcaatgccattgagcaggactatcggctgccaccgcccatggactgcccgagcgccctgcaccaactcatgctggactgttggcagaaggaccgcaaccaccggcccaagttcggccaaattgtcaacacgctagacaagatgatccgcaatcccaacagcctcaaagccatggcgcccctctcctctggcatcaacctgccgctgctggaccgcacgatccccgactacaccagctttaacacggtggacgagtggctggaggccatcaagatggggcagtacaaggagagcttcgccaatgccggcttcacctcctttgacgtcgtgtctcagatgatgatggaggacattctccgggttggggtcactttggctggccaccagaaaaaaatcctgaacagtatccaggtgatgcgggcgcagatgaaccagattcagtctgtggaggtttgacattcacctgcctcggctcacctcttcctccaagccccgccccctctgccccacgtgccggccctcctggtgctctatccactgcagggccagccactcgccaggaggccacgggccacgggaagaaccaagcggtgccagccacgagacgtcaccaagaaaacatgcaactcaaacgacggaaaaaaaaagggaatgggaaaaaagaaaacagatcctgggagggggcgggaaatacaaggaatattttttaaagaggattctcataaggaaagcaatgactgttcttgcgggggataaaaaagggcttgggagattcatgcgatgtgtccaatcggagacaaaagcagtttctctccaactccctctgggaaggtgacctggccagagccaagaaacactttcagaaaaacaaatgtgaaggggagagacaggggccgcccttggctcctgtccctgctgctcctctaggcctcactcaacaaccaagcgcctggaggacgggacagatggacagacagccaccctgagaacccctctgggaaaatctattcctgccaccactgggcaaacagaagaatttttctgtctttggagagtattttagaaactccaatgaaagacactgtttctcctgttggctcacagggctgaaaggggcttttgtcctcctgggtcagggagaacgcggggaccccag

SEQ ID NO: 1464 - DNA, 4641 bp, Homo sapiens
  source 1..4641: mol_type = genomic DNA
gccccgggaagcgcagccatggctctgcggaggctgggggccgcgctgctgctgctgccgctgctcgccgccgtggaagaaacgctaatggactccactacagcgactgctgagctgggctggatggtgcatcctccatcagggtgggaagaggtgagtggctacgatgagaacatgaacacgatccgcacgtaccaggtgtgcaacgtgtttgagtcaagccagaacaactggctacggaccaagtttatccggcgccgtggcgcccaccgcatccacgtggagatgaagttttcggtgcgtgactgcagcagcatccccagcgtgcctggctcctgcaaggagaccttcaacctctattactatgaggctgactttgactcggccaccaagaccttccccaactggatggagaatccatgggtgaaggtggataccattgcagccgacgagagcttctcccaggtggacctgggtggccgcgtcatgaaaatcaacaccgaggtgcggagcttcggacctgtgtcccgcagcggcttctacctggccttccaggactatggcggctgcatgtccctcatcgccgtgcgtgtcttctaccgcaagtgcccccgcatcatccagaatggcgccatcttccaggaaaccctgtcgggggctgagagcacatcgctggtggctgcccggggcagctgcatcgccaatgcggaagaggtggatgtacccatcaagctctactgtaacggggacggcgagtggctggtgcccatcgggcgctgcatgtgcaaagcaggcttcgaggccgttgagaatggcaccgtctgccgaggttgtccatctgggactttcaaggccaaccaaggggatgaggcctgtacccactgtcccatcaacagccggaccacttctgaaggggccaccaactgtgtctgccgcaatggctactacagagcagacctggaccccctggacatgccctgcacaaccatcccctccgcgccccaggctgtgatttccagtgtcaatgagacctccctcatgctggagtggacccctccccgcgactccggaggccgagaggacctcgtctacaacatcatctgcaagagctgtggctcgggccggggtgcctgcacccgctgcggggacaatgtacagtacgcaccacgccagctaggcctgaccgagccacgcatttacatcagtgacctgctggcccacacccagtacaccttcgagatccaggctgtgaacggcgttactgaccagagccccttctcgcctcagttcgcctctgtgaacatcaccaccaaccaggcagctccatcggcagtgtccatcatgcatcaggtgagccgcaccgtggacagcattaccctgtcgtggtcccagccggaccagcccaatggcgtgatcctggactatgagctgcagtactatgagaaggagctcagtgagtacaacgccacagccataaaaagccccaccaacacggtcaccgtgcagggcctcaaagccggcgccatctatgtcttccaggtgcgggcacgcaccgtggcaggttacgggcgctacagcggcaagatgtacttccagaccatgacagaagccgagtaccagacaagcatccaggagaagttgccactcatcatcggctcctcggccgctggcctggtcttcctcattgctgtggttgtcatcgccatcgtgtgtaacagacgggggtttgagcgtgctgactcggagtacacggacaagctgcaacactacaccagtggccacatgaccccaggcatgaagatctacatcgatcctttcacctacgaggaccccaacgaggcagtgcgggagtttgccaaggaaattgacatctcctgtgtcaaaattgagcaggtgatcggagcaggggagtttggcgaggtctgcagtggccacctgaagctgccaggcaagagagagatctttgtggccatcaagacgctcaagtcgggctacacggagaagcagcgccgggacttcctgagcgaagcctccatcatgggccagttcgaccatcccaacgtcatccacctggagggtgtcgtgaccaagagcacacctgtgatgatcatcaccgagttcatggagaatggctccctggactcctttctccggcaaaacgatgggcagttcacagtcatccagctggtgggcatgcttcggggcatcgcagctggcatgaagtacctggcagacatgaactatgttcaccgtgacctggctgcccgcaacatcctcgtcaacagcaacctggtctgcaaggtgtcggactttgggctctcacgctttctagaggacgatacctcagaccccacctacaccagtgccctgggcggaaagatccccatccgctggacagccccggaagccatccagtaccggaagttcacctcggccagtgatgtgtggagctacggcattgtcatgtgggaggtgatgtcctatggggagcggccctactgggacatgaccaaccaggatgtaatcaatgccattgagcaggactatcggctgccaccgcccatggactgcccgagcgccctgcaccaactcatgctggactgttggcagaaggaccgcaaccaccggcccaagttcggccaaattgtcaacacgctagacaagatgatccgcaatcccaacagcctcaaagccatggcgcccctctcctctggcatcaacctgccgctgctggaccgcacgatccccgactacaccagctttaacacggtggacgagtggctggaggccatcaagatggggcagtacaaggagagcttcgccaatgccggcttcacctcctttgacgtcgtgtctcagatgatgatggaggacattctccgggttggggtcactttggctggccaccagaaaaaaatcctgaacagtatccaggtgatgcgggcgcagatgaaccagattcagtctgtggagggccagccactcgccaggaggccacgggccacgggaagaaccaagcggtgccagccacgagacgtcaccaagaaaacatgcaactcaaacgacggaaaaaaaaagggaatgggaaaaaagaaaacagatcctgggagggggcgggaaatacaaggaatattttttaaagaggattctcataaggaaagcaatgactgttcttgcgggggataaaaaagggcttgggagattcatgcgatgtgtccaatcggagacaaaagcagtttctctccaactccctctgggaaggtgacctggccagagccaagaaacactttcagaaaaacaaatgtgaaggggagagacaggggccgcccttggctcctgtccctgctgctcctctaggcctcactcaacaaccaagcgcctggaggacgggacagatggacagacagccaccctgagaacccctctgggaaaatctattcctgccaccactgggcaaacagaagaatttttctgtctttggagagtattttagaaactccaatgaaagacactgtttctcctgttggctcacagggctgaaaggggcttttgtcctcctgggtcagggagaacgcggggaccccagaaaggtcagccttcctgaggatgggcaacccccaggtctgcagctccaggtacatatcacgcgcacagcctggcagcctggccctcctggtgcccactcccgccagcccctgcctcgaggactgatactgcagtgactgccgtcagctccgactgccgctgagaagggttgatcctgcatctgggtttgtttacagcaattcctggactcgggggtattttggtcacagggtggttttggtttagggggtttgtttgttgggttgttttttgttttttggttttttttaatgacaatgaagtgacactttgacatttcctaccttttgaggacttgatccttctccaggaagaaggtgctttctgcttactgacttaggcaatacaccaagggcgagattttatatgcacatttctggatttttttatacggttttcattgacactcttccctcctcccacctgccaccaggcctcaccaaagcccactgccatggggccatctgggccattcagagactggagtgagatttgggtgtggagggggaggcgccaaggtggaggagcttcccactccaggactgttgatgaaagggacagattgaggaggaagtgggctctgaggctgcagggctggaagtccttgcccacttcccactctcctgccccaatctatctagtacttcccaggcaaataggcccctttgaggctcctgagtgccctcagatggtcaaaacccagttttccctctgggagcctaaaccaggctgcatcggaggccaggacccggatcattcactgtgataccctgccctccagagggtgcgctcagagacacgggcaagcatgcctcttcccttccctggagagaaagtgtgtgatttctctcccacctccttccccccaccagacctttgctgggcctaaaggtcttggccatggggacgccctcagtctagggatctggccacagactccctcctgtgaaccaacacagacacccaagcagagcaatcagttagtgaattgaatggaaataaacgctttagttataa

SEQ ID NO: 1465 - DNA, 1709 bp, Homo sapiens
  source 1..1709: mol_type = genomic DNA
attctgctggctgcgcggtggcggcggctgtgtgtgcgccgcgccttgccgccccccctggccccccgagcccggggcgcgcgctcccgcccgggccgtccgggccccgcggcgccgcggcccgaggccccgggaagcgcagccatggctctgcggaggctgggggccgcgctgctgctgctgccgctgctcgccgccgtggaagaaacgctaatggactccactacagcgactgctgagctgggctggatggtgcatcctccatcagggtgggaagaggtgagtggctacgatgagaacatgaacacgatccgcacgtaccaggtgtgcaacgtgtttgagtcaagccagaacaactggctacggaccaagtttatccggcgccgtggcgcccaccgcatccacgtggagatgaagttttcggtgcgtgactgcagcagcatccccagcgtgcctggctcctgcaaggagaccttcaacctctattactatgaggctgactttgactcggccaccaagaccttccccaactggatggagaatccatgggtgaaggtggataccattgcagccgacgagagcttctcccaggtggacctgggtggccgcgtcatgaaaatcaacaccgaggtgcggagcttcggacctgtgtcccgcagcggcttctacctggccttccaggactatggcggctgcatgtccctcatcgccgtgcgtgtcttctaccgcaagtgcccccgcatcatccagaatggcgccatcttccaggaaaccctgtcgggggctgagagcacatcgctggtggctgcccggggcagctgcatcgccaatgcggaagaggtggatgtacccatcaagctctactgtaacggggacggcgagtggctggtgcccatcgggcgctgcatgtgcaaagcaggcttcgaggccgttgagaatggcaccgtctgccgaggttgtccatctgggactttcaaggccaaccaaggggatgaggcctgtacccactgtcccatcaacagccggaccacttctgaaggggccaccaactgtgtctgccgcaatggctactacagagcagacctggaccccctggacatgccctgcacaaccatcccctccgcgccccaggctgtgatttccagtgtcaatgagacctccctcatgctggagtggacccctccccgcgactccggaggccgagaggacctcgtctacaacatcatctgcaagagctgtggctcgggccggggtgcctgcacccgctgcggggacaatgtacagtacgcaccacgccagctaggcctgaccgagccacgcatttacatcagtgacctgctggcccacacccagtacaccttcgagatccaggctgtgaacggcgttactgaccagagccccttctcgcctcagttcgcctctgtgaacatcaccaccaaccaggcagctccatcggcagtgtccatcatgcatcaggtgagccgcaccgtggacagcattaccctgtcgtggtcccagccggaccagcccaatggcgtgatcctggactatgagctgcagtactatgagaagatgaagacacagagaagttaaggaacttgcccaaggtcacagaggtcatatatactagagccaggatttgaacccaagaagtctggctccagcttgtgatcttaacctccatgctataaagcctgtaataacattgc

SEQ ID NO: 1466 - DNA, 4329 bp, Homo sapiens
  source 1..4329: mol_type = genomic DNA
cccggcccggcccgcccggctccgcgccgcagtctccctccctcccgctccgtccccgctcgggctcccaccatccccgcccgcgaggagagcactcggcccggcggcgcgagcagagccactccagggagggggggagaccgcgagcggccggctcagcccccgccacccggggcgggaccccgaggccccggagggaccccaactccagccacgtcttgctgcgcgcccgcccggcgcggccactgccagcacgctccgggcccgccgcccgcgcgcgcggcacagacgcggggccacacttggcgccgccgcccggtgccccgcacgctcgcatgggcccgcgctgagggccccgacgaggagtcccgcgcggagtatcggcgtccacccgcccagggagagtcagacctgggggggcgagggccccccaaactcagttcggatcctacccgagtgaggcggcgccatggagctccgggtgctgctctgctgggcttcgttggccgcagctttggaagagaccctgctgaacacaaaattggaaactgctgatctgaagtgggtgacattccctcaggtggacgggcagtgggaggaactgagcggcctggatgaggaacagcacagcgtgcgcacctacgaagtgtgtgacgtgcagcgtgccccgggccaggcccactggcttcgcacaggttgggtcccacggcggggcgccgtccacgtgtacgccacgctgcgcttcaccatgctcgagtgcctgtccctgcctcgggctgggcgctcctgcaaggagaccttcaccgtcttctactatgagagcgatgcggacacggccacggccctcacgccagcctggatggagaacccctacatcaaggtggacacggtggccgcggagcatctcacccggaagcgccctggggccgaggccaccgggaaggtgaatgtcaagacgctgcgtctgggaccgctcagcaaggctggcttctacctggccttccaggaccagggtgcctgcatggccctgctatccctgcacctcttctacaaaaagtgcgcccagctgactgtgaacctgactcgattcccggagactgtgcctcgggagctggttgtgcccgtggccggtagctgcgtggtggatgccgtccccgcccctggccccagccccagcctctactgccgtgaggatggccagtgggccgaacagccggtcacgggctgcagctgtgctccggggttcgaggcagctgaggggaacaccaagtgccgagcctgtgcccagggcaccttcaagcccctgtcaggagaagggtcctgccagccatgcccagccaatagccactctaacaccattggatcagccgtctgccagtgccgcgtcgggtacttccgggcacgcacagacccccggggtgcaccctgcaccacccctccttcggctccgcggagcgtggtttcccgcctgaacggctcctccctgcacctggaatggagtgcccccctggagtctggtggccgagaggacctcacctacgccctccgctgccgggagtgccgacccggaggctcctgtgcgccctgcgggggagacctgacttttgaccccggcccccgggacctggtggagccctgggtggtggttcgagggctacgtcctgacttcacctatacctttgaggtcactgcattgaacggggtatcctccttagccacggggcccgtcccatttgagcctgtcaatgtcaccactgaccgagaggtacctcctgcagtgtctgacatccgggtgacgcggtcctcacccagcagcttgagcctggcctgggctgttccccgggcacccagtggggctgtgctggactacgaggtcaaataccatgagaagggcgccgagggtcccagcagcgtgcggttcctgaagacgtcagaaaaccgggcagagctgcgggggctgaagcggggagccagctacctggtgcaggtacgggcgcgctctgaggccggctacgggcccttcggccaggaacatcacagccagacccaactggatgagagcgagggctggcgggagcagctggccctgattgcgggcacggcagtcgtgggtgtggtcctggtcctggtggtcattgtggtcgcagttctctgcctcaggaagcagagcaatgggagagaagcagaatattcggacaaacacggacagtatctcatcggacatggtactaaggtctacatcgaccccttcacttatgaagaccctaatgaggctgtgagggaatttgcaaaagagatcgatgtctcctacgtcaagattgaagaggtgattggtgcaggtgagtttggcgaggtgtgccgggggcggctcaaggccccagggaagaaggagagctgtgtggcaatcaagaccctgaagggtggctacacggagcggcagcggcgtgagtttctgagcgaggcctccatcatgggccagttcgagcaccccaatatcatccgcctggagggcgtggtcaccaacagcatgcccgtcatgattctcacagagttcatggagaacggcgccctggactccttcctgcggctaaacgacggacagttcacagtcatccagctcgtgggcatgctgcggggcatcgcctcgggcatgcggtaccttgccgagatgagctacgtccaccgagacctggctgctcgcaacatcctagtcaacagcaacctcgtctgcaaagtgtctgactttggcctttcccgattcctggaggagaactcttccgatcccacctacacgagctccctgggaggaaagattcccatccgatggactgccccggaggccattgccttccggaagttcacttccgccagtgatgcctggagttacgggattgtgatgtgggaggtgatgtcatttggggagaggccgtactgggacatgagcaatcaggacgtgatcaatgccattgaacaggactaccggctgcccccgcccccagactgtcccacctccctccaccagctcatgctggactgttggcagaaagaccggaatgcccggccccgcttcccccaggtggtcagcgccctggacaagatgatccggaaccccgccagcctcaaaatcgtggcccgggagaatggcggggcctcacaccctctcctggaccagcggcagcctcactactcagcttttggctctgtgggcgagtggcttcgggccatcaaaatgggaagatacgaagaaagtttcgcagccgctggctttggctccttcgagctggtcagccagatctctgctgaggacctgctccgaatcggagtcactctggcgggacaccagaagaaaatcttggccagtgtccagcacatgaagtcccaggccaagccgggaaccccgggtgggacaggaggaccggccccgcagtactgacctgcaggaactccccaccccagggacaccgcctccccattttccggggcagagtggggactcacagaggcccccagccctgtgccccgctggattgcactttgagcccgtggggtgaggagttggcaatttggagagacaggatttgggggttctgccataataggaggggaaaatcaccccccagccacctcggggaactccagaccaagggtgagggcgcctttccctcaggactgggtgtgaccagaggaaaaggaagtgcccaacatctcccagcctccccaggtgcccccctcaccttgatgggtgcgttcccgcagaccaaagagagtgtgactcccttgccagctccagagtgggggggctgtcccagggggcaagaaggggtgtcagggcccagtgacaaaatcattggggtttgtagtcccaacttgctgctgtcaccaccaaactcaatcatttttttcccttgtaaatgcccctcccccagctgctgccttcatattgaaggtttttgagttttgtttttggtcttaatttttctccccgttccctttttgtttcttcgttttgtttttctaccgtccttgtcataactttgtgttggagggaacctgtttcactatggcctcctttgcccaagttgaaacaggggcccatcatcatgtctgtttccagaacagtgccttggtcatcccacatccccggaccccgcctgggacccccaagctgtgtcctatgaaggggtgtggggtgaggtagtgaaaagggcggtagttggtggtggaacccagaaacggacgccggtgcttggaggggttcttaaattatatttaaaaaagtaactttttgtataaataaaagaaaatgggacgtgtcccagctccaggggt

SEQ ID NO: 1467 - DNA, 3789 bp, Homo sapiens
  source 1..3789: mol_type = genomic DNA
cgtccacccgcccagggagagtcagacctgggggggcgagggccccccaaactcagttcggatcctacccgagtgaggcggcgccatggagctccgggtgctgctctgctgggcttcgttggccgcagctttggaagagaccctgctgaacacaaaattggaaactgctgatctgaagtgggtgacattccctcaggtggacgggcagtgggaggaactgagcggcctggatgaggaacagcacagcgtgcgcacctacgaagtgtgtgacgtgcagcgtgccccgggccaggcccactggcttcgcacaggttgggtcccacggcggggcgccgtccacgtgtacgccacgctgcgcttcaccatgctcgagtgcctgtccctgcctcgggctgggcgctcctgcaaggagaccttcaccgtcttctactatgagagcgatgcggacacggccacggccctcacgccagcctggatggagaacccctacatcaaggtggacacggtggccgcggagcatctcacccggaagcgccctggggccgaggccaccgggaaggtgaatgtcaagacgctgcgtctgggaccgctcagcaaggctggcttctacctggccttccaggaccagggtgcctgcatggccctgctatccctgcacctcttctacaaaaagtgcgcccagctgactgtgaacctgactcgattcccggagactgtgcctcgggagctggttgtgcccgtggccggtagctgcgtggtggatgccgtccccgcccctggccccagccccagcctctactgccgtgaggatggccagtgggccgaacagccggtcacgggctgcagctgtgctccggggttcgaggcagctgaggggaacaccaagtgccgagcctgtgcccagggcaccttcaagcccctgtcaggagaagggtcctgccagccatgcccagccaatagccactctaacaccattggatcagccgtctgccagtgccgcgtcgggtacttccgggcacgcacagacccccggggtgcaccctgcaccacccctccttcggctccgcggagcgtggtttcccgcctgaacggctcctccctgcacctggaatggagtgcccccctggagtctggtggccgagaggacctcacctacgccctccgctgccgggagtgccgacccggaggctcctgtgcgccctgcgggggagacctgacttttgaccccggcccccgggacctggtggagccctgggtggtggttcgagggctacgtcctgacttcacctatacctttgaggtcactgcattgaacggggtatcctccttagccacggggcccgtcccatttgagcctgtcaatgtcaccactgaccgagaggtacctcctgcagtgtctgacatccgggtgacgcggtcctcacccagcagcttgagcctggcctgggctgttccccgggcacccagtggggctgtgctggactacgaggtcaaataccatgagaagggcgccgagggtcccagcagcgtgcggttcctgaagacgtcagaaaaccgggcagagctgcgggggctgaagcggggagccagctacctggtgcaggtacgggcgcgctctgaggccggctacgggcccttcggccaggaacatcacagccagacccaactggatgagagcgagggctggcgggagcagctggccctgattgcgggcacggcagtcgtgggtgtggtcctggtcctggtggtcattgtggtcgcagttctctgcctcaggaagcagagcaatgggagagaagcagaatattcggacaaacacggacagtatctcatcggacatggtactaaggtctacatcgaccccttcacttatgaagaccctaatgaggctgtgagggaatttgcaaaagagatcgatgtctcctacgtcaagattgaagaggtgattggtgcaggtgagtttggcgaggtgtgccgggggcggctcaaggccccagggaagaaggagagctgtgtggcaatcaagaccctgaagggtggctacacggagcggcagcggcgtgagtttctgagcgaggcctccatcatgggccagttcgagcaccccaatatcatccgcctggagggcgtggtcaccaacagcatgcccgtcatgattctcacagagttcatggagaacggcgccctggactccttcctgcggctaaacgacggacagttcacagtcatccagctcgtgggcatgctgcggggcatcgcctcgggcatgcggtaccttgccgagatgagctacgtccaccgagacctggctgctcgcaacatcctagtcaacagcaacctcgtctgcaaagtgtctgactttggcctttcccgattcctggaggagaactcttccgatcccacctacacgagctccctgggaggaaagattcccatccgatggactgccccggaggccattgccttccggaagttcacttccgccagtgatgcctggagttacgggattgtgatgtgggaggtgatgtcatttggggagaggccgtactgggacatgagcaatcaggacgtgatcaatgccattgaacaggactaccggctgcccccgcccccagactgtcccacctccctccaccagctcatgctggactgttggcagaaagaccggaatgcccggccccgcttcccccaggtggtcagcgccctggacaagatgatccggaaccccgccagcctcaaaatcgtggcccgggagaatggcggggacctgctccgaatcggagtcactctggcgggacaccagaagaaaatcttggccagtgtccagcacatgaagtcccaggccaagccgggaaccccgggtgggacaggaggaccggccccgcagtactgacctgcaggaactccccaccccagggacaccgcctccccattttccggggcagagtggggactcacagaggcccccagccctgtgccccgctggattgcactttgagcccgtggggtgaggagttggcaatttggagagacaggatttgggggttctgccataataggaggggaaaatcaccccccagccacctcggggaactccagaccaagggtgagggcgcctttccctcaggactgggtgtgaccagaggaaaaggaagtgcccaacatctcccagcctccccaggtgcccccctcaccttgatgggtgcgttcccgcagaccaaagagagtgtgactcccttgccagctccagagtgggggggctgtcccagggggcaagaaggggtgtcagggcccagtgacaaaatcattggggtttgtagtcccaacttgctgctgtcaccaccaaactcaatcatttttttcccttgtaaatgcccctcccccagctgctgccttcatattgaaggtttttgagttttgtttttggtcttaatttttctccccgttccctttttgtttcttcgttttgtttttctaccgtccttgtcataactttgtgttggagggaacctgtttcactatggcctcctttgcccaagttgaaacaggggcccatcatcatgtctgtttccagaacagtgccttggtcatcccacatccccggaccccgcctgggacccccaagctgtgtcctatgaaggggtgtggggtgaggtagtgaaaagggcggtagttggtggtggaacccagaaacggacgccggtgcttggaggggttcttaaattatatttaaaaaagtaactttttgtataaataaaagaaaatgggacgtgtcccagctccaggggt

SEQ ID NO: 1468 - DNA, 1444 bp, Homo sapiens
  source 1..1444: mol_type = genomic DNA
agatctgtgagcccagcgctgactgcgccgcggagaaagccagtgggaacccagacccataggagacccgcgtccccgctcggcctggccaggccccgcgctatggagttcctctgggcccctctcttgggtctgtgctgcagtctggccgctgctgatcgccacaccgtcttctggaacagttcaaatcccaagttccggaatgaggactacaccatacatgtgcagctgaatgactacgtggacatcatctgtccgcactatgaagatcactctgtggcagacgctgccatggagcagtacatactgtacctggtggagcatgaggagtaccagctgtgccagccccagtccaaggaccaagtccgctggcagtgcaaccggcccagtgccaagcatggcccggagaagctgtctgagaagttccagcgcttcacacctttcaccctgggcaaggagttcaaagaaggacacagctactactacatctctcacagtcctcaggcccatgacaatccacaggagaagagacttgcagcagatgacccagaggtgcgggttctacatagcatcggtcacagtgctgccccacgcctcttcccacttgcctggactgtgctgctccttccacttctgctgctgcaaaccccgtgaaggtgtatgccacacctggccttaaagagggacaggctgaagagagggacaggcactccaaacctgtcttggggccactttcagagcccccagccctgggaaccactcccaccacaggcataagctatcacctagcagcctcaaaacgggtcagtattaaggttttcaaccggaaggaggccaaccagcccgacagtgccatccccaccttcacctcggagggatggagaaagaagtggagacagtcctttcccaccattcctgcctttaagccaaagaaacaagctgtgcaggcatggtcccttaaggcacagtgggagctgagctggaaggggccacgtggatgggcaaagcttgtcaaagatgccccctccaggagagagccaggatgcccagatgaactgactgaaggaaaagcaagaaacagtttcttgcttggaagccaggtacaggagaggcagcatgcttgggctgacccagcatctcccagcaagacctcatctgtggagctgccacagagaagtttgtagccaggtactgcattctctcccatcctggggcagcactccccagagctgtgccagcaggggggctgtgccaacctgttcttagagtgtagctgtaagggcagtgcccatgtgtacattctgcctagagtgtagcctaaagggcagggcccacgtgtatagtatctgtatataagttgctgtgtgtctgtcctgatttctacaactggagtttttttatacaatgttctttgtctcaaaataaagcaatgtgttttttcgga

SEQ ID NO: 1469 - DNA, 1926 bp, Homo sapiens
  source 1..1926: mol_type = genomic DNA
atgcgaggctcagaaaggtgcggggcatgtcaacaacctcgcaccctgcaaggtccgcgcgcggagcagcaaagccgtgtcccgcacccccgcgttcgcagactcgcacttgcgagttcttcccttctcccgcacgcgactgcgcccagggacgcaagcccaccaccgggacaggctcacaaagctccacgcagacccacaagtgagcgaacacacatctctgagcagatctgcgggggcagaggagcgcgcttcgctctttcctgcacccccagcctcctcgcctccccaccccgcccctcctccacctccccagcccccaagcccccaggcagccgcgcgccgggcggggcgagggcggggcggggtgtcgggcggcgccggcccaaaaggcggagtcgctaggcgaaggggccagatctgtgagcccagcgctgactgcgccgcggagaaagccagtgggaacccagacccataggagacccgcgtccccgctcggcctggccaggccccgcgctatggagttcctctgggcccctctcttgggtctgtgctgcagtctggccgctgctgatcgccacaccgtcttctggaacagttcaaatcccaagttccggaatgaggactacaccatacatgtgcagctgaatgactacgtggacatcatctgtccgcactatgaagatcactctgtggcagacgctgccatggagcagtacatactgtacctggtggagcatgaggagtaccagctgtgccagccccagtccaaggaccaagtccgctggcagtgcaaccggcccagtgccaagcatggcccggagaagctgtctgagaagttccagcgcttcacacctttcaccctgggcaaggagttcaaagaaggacacagctactactacatctccaaacccatccaccagcatgaagaccgctgcttgaggttgaaggtgactgtcagtggcaaaatcactcacagtcctcaggcccatgacaatccacaggagaagagacttgcagcagatgacccagaggtgcgggttctacatagcatcggtcacagtgctgccccacgcctcttcccacttgcctggactgtgctgctccttccacttctgctgctgcaaaccccgtgaaggtgtatgccacacctggccttaaagagggacaggctgaagagagggacaggcactccaaacctgtcttggggccactttcagagcccccagccctgggaaccactcccaccacaggcataagctatcacctagcagcctcaaaacgggtcagtattaaggttttcaaccggaaggaggccaaccagcccgacagtgccatccccaccttcacctcggagggatggagaaagaagtggagacagtcctttcccaccattcctgcctttaagccaaagaaacaagctgtgcaggcatggtcccttaaggcacagtgggagctgagctggaaggggccacgtggatgggcaaagcttgtcaaagatgccccctccaggagagagccaggatgcccagatgaactgactgaaggaaaagcaagaaacagtttcttgcttggaagccaggtacaggagaggcagcatgcttgggctgacccagcatctcccagcaagacctcatctgtggagctgccacagagaagtttgtagccaggtactgcattctctcccatcctggggcagcactccccagagctgtgccagcaggggggctgtgccaacctgttcttagagtgtagctgtaagggcagtgcccatgtgtacattctgcctagagtgtagcctaaagggcagggcccacgtgtatagtatctgtatataagttgctgtgtgtctgtcctgatttctacaactggagtttttttatacaatgttctttgtctcaaaataaagcaatgtgttttttcgga

SEQ ID NO: 1470 - DNA, 4447 bp, Homo sapiens
  source 1..4447: mol_type = genomic DNA
gaccgctggagctgcgcagcgcgcctcggagctgcctgcgggcgcacgccgtcttccccgccagtctgccccggaggattgggggtcccagcctgcgtcccgtcagtcccttcttggcccggagtgcgcggagctgggagtggcttcgccatggctgtgagaagggactccgtgtggaagtactgctggggtgttttgatggttttatgcagaactgcgatttccaaatcgatagttttagagcctatctattggaattcctcgaactccaaatttctacctggacaaggactggtactatacccacagataggagacaaattggatattatttgccccaaagtggactctaaaactgttggccagtatgaatattataaagtttatatggttgataaagaccaagcagacagatgcactattaagaaggaaaatacccctctcctcaactgtgccaaaccagaccaagatatcaaattcaccatcaagtttcaagaattcagccctaacctctggggtctagaatttcagaagaacaaagattattacattatatctacatcaaatgggtctttggagggcctggataaccaggagggaggggtgtgccagacaagagccatgaagatcctcatgaaagttggacaagatgcaagttctgctggatcaaccaggaataaagatccaacaagacgtccagaactagaagctggtacaaatggaagaagttcgacaacaagtccctttgtaaaaccaaatccaggttctagcacagacggcaacagcgccggacattcggggaacaacatcctcggttccgaagtggccttatttgcagggattgcttcaggatgcatcatcttcatcgtcatcatcatcacgctggtggtcctcttgctgaagtaccggaggagacacaggaagcactcgccgcagcacacgaccacgctgtcgctcagcacactggccacacccaagcgcagcggcaacaacaacggctcagagcccagtgacattatcatcccgctaaggactgcggacagcgtcttctgccctcactacgagaaggtcagcggcgactacgggcacccggtgtacatcgtccaggagatgcccccgcagagcccggcgaacatttactacaaggtctgagagggaccctggtggtacctgtgctttcccagaggacacctaatgtcccgatgcctcccttgagggtttgagagcccgcgtgctggagaattgactgaagcacagcaccgggggagagggacactcctcctcggaagagcccgtcgcgctggacagcttacctagtcttgtagcattcggccttggtgaacacacacgctccctggaagctggaagactgtgcagaagacgcccattcggactgctgtgccgcgtcccacgtctcctcctcgaagccatgtgctgcggtcactcaggcctctgcagaagccaagggaagacagtggtttgtggacgagagggctgtgagcatcctggcaggtgccccaggatgccacgcctggaagggccggcttctgcctggggtgcatttcccccgcagtgcataccggacttgtcacacggacctcgggctagttaaggtgtgcaaagatctctagagtttagtccttactgtctcactcgttctgttacccagggctctgcagcacctcacctgagacctccactccacatctgcatcactcatggaacactcatgtctggagtcccctcctccagccgctggcaacaacagcttcagtccatgggtaatccgttcatagaaattgtgtttgctaacaaggtgccctttagccagatgctaggctgtctgcgaagaaggctaggagttcatagaagggagtggggctggggaaagggctggctgcaattgcagctcactgctgctgcctctgaaacagaaagttggaaaggaaaaaagaaaaaagcaattaggtagcacagcactttggttttgctgagatcgaagaggccagtaggagacacgacagcacacacagtggattccagtgcatggggaggcactcgctgttatcaaatagcgatgtgcaggaagaaaagcccctcttcattccggggaacaaagacgggtattgttgggaaaggaacaggcttggagggaagggagaaagtaggccgctgatgatatattcgggcaggactgttgtggtactggcaataagatacacagctccgagctgtaggagagtcggtctgctttggatgattttttaagcagactcagctgctatacttatcacattttattaaacacagggaaagcatttaggagaatagcagagagccaaatctgacctaaaagttgaaaagccaaaggtcaaacaggctgtaattccatcatcatcgttgttattaaagaatccttatctataaaaggtaggtcagatccccctccccccaggttcctccttcccctcccgattgagccttacgacactttggtttatgcggtgctgtccgggtgccagggctgcagggtcggtactgatggaggctgcagcgcccggtgctctgtgtcaaggtgaagcacatacggcagacctcttagagtccttaagacggaagtaaattatgatgtccagggggagaaggaagataggacgtatttataataggtatatagaacacaagggatataaaatgaaagatttttactaatatatattttaaggttgcacacagtacacaccagaagatgtgaaattcatttgtggcaattaagtggtcccaatgctcagcgcttaaaaaaacaaattggacagctacttctgggaaaaacaacatcattccaaaaagaacaataatgagagcaaatgcaaaaataaccaagtcctccgaaggcatctcacggaaccgtagactaggaagtacgagccccacagagcaggaagccgatgtgactgcatcatatatttaacaatgacaagatgttccggcgtttatttctgcgttgggttttcccttgccttatgggctgaagtgttctctagaatccagcaggtcacactgggggcttcaggtgacgatttagctgtggctccctcctcctgtcctcccccgcaccccctcccttctgggaaacaagaagagtaaacaggaaacctactttttatgtgctatgcaaaatagacatctttaacatagtcctgttactatggtaacactttgctttctgaattggaagggaaaaaaaatgtagcgacagcattttaaggttctcagacctccagtgagtacctgcaaaaatgagttgtcacagaaattatgatcctctatttcctgaacctggaaatgatgttggtccaaagtgcgtgtgtgtatgtgtgagtgggtgcgtggtatacatgtgtacatatatgtataatatatatctacaatatatattatatatatctatatcatatttctgtggagggttgccatggtaaccagccacagtacatatgtaattctttccatcaccccaacctctcctttctgtgcattcatgcaagagtttcttgtaagccatcagaagttacttttaggatgggggagaggggcgagaaggggaaaaatgggaaatagtctgattttaatgaaatcaaatgtatgtatcatcagttggctacgttttggttctatgctaaactgtgaaaaatcagatgaattgataaaagagttccctgcaaccaattgaaaagtgttctgtgcgtctgttttgtgtctggtgcagaatatgacaatctaccaactgtccctttgtttgaagttggtttagctttggaaagttactgtaaatgccttgcttgtatgatcgtccctggtcacccgactttggaatttgcaccatcatgtttcagtgaagatgctgtaaataggttcagattttactgtctatggatttggggtgttacagtagccttattcacctttttaataaaaatacacatgaaaacaagaaagaaatggcttttcttacccagattgtgtacatagagcaatgttggttttttataaagtctaagcaagatgttttgtataaaatctgaattttgcaatgtatttagctacagcttgtttaacggcagtgtcattcccctttgcactgtaatgaggaaaaaatggtataaaaggttgccaaattgctgcatatttgtgccgtaattatgtaccatgaatatttatttaaaatttcgttgtccaatttgtaagtaacacagtattatgcctgagttataaatatttttttctttctttgttttattttaatagcctgtcataggttttaaatctgctttagtttcacattgcagttagccccagaaaatgaaatccgtgaagtcacattccacatctgtttcaaactgaatttgttcttaaaaaaataaaatatttttttcctatggaaaaa

SEQ ID NO: 1471 - DNA, 4880 bp, Homo sapiens
  source 1..4880: mol_type = genomic DNA
gaaactgttgggagaggaatcgtatctccatatttcttctttcagccccaatccaagggttgtagctggaactttccatcagttcttcctttctttttcctctctaagcctttgccttgctctgtcacagtgaagtcagccagagcagggctgttaaactctgtgaaatttgtcataagggtgtcaggtatttcttactggcttccaaagaaacatagataaagaaatctttcctgtggcttcccttggcaggctgcattcagaaggtctctcagttgaagaaagagcttggaggacaacagcacaacaggagagtaaaagatgccccagggctgaggcctccgctcaggcagccgcatctggggtcaatcatactcaccttgcccgggccatgctccagcaaaatcaagctgttttcttttgaaagttcaaactcatcaagattatgctgctcactcttatcattctgttgccagtagtttcaaaatttagttttgttagtctctcagcaccgcagcactggagctgtcctgaaggtactctcgcaggaaatgggaattctacttgtgtgggtcctgcacccttcttaattttctcccatggaaatagtatctttaggattgacacagaaggaaccaattatgagcaattggtggtggatgctggtgtctcagtgatcatggattttcattataatgagaaaagaatctattgggtggatttagaaagacaacttttgcaaagagtttttctgaatgggtcaaggcaagagagagtatgtaatatagagaaaaatgtttctggaatggcaataaattggataaatgaagaagttatttggtcaaatcaacaggaaggaatcattacagtaacagatatgaaaggaaataattcccacattcttttaagtgctttaaaatatcctgcaaatgtagcagttgatccagtagaaaggtttatattttggtcttcagaggtggctggaagcctttatagagcagatctcgatggtgtgggagtgaaggctctgttggagacatcagagaaaataacagctgtgtcattggatgtgcttgataagcggctgttttggattcagtacaacagagaaggaagcaattctcttatttgctcctgtgattatgatggaggttctgtccacattagtaaacatccaacacagcataatttgtttgcaatgtccctttttggtgaccgtatcttctattcaacatggaaaatgaagacaatttggatagccaacaaacacactggaaaggacatggttagaattaacctccattcatcatttgtaccacttggtgaactgaaagtagtgcatccacttgcacaacccaaggcagaagatgacacttgggagcctgagcagaaactttgcaaattgaggaaaggaaactgcagcagcactgtgtgtgggcaagacctccagtcacacttgtgcatgtgtgcagagggatacgccctaagtcgagaccggaagtactgtgaagatgttaatgaatgtgctttttggaatcatggctgtactcttgggtgtaaaaacacccctggatcctattactgcacgtgccctgtaggatttgttctgcttcctgatgggaaacgatgtcatcaacttgtttcctgtccacgcaatgtgtctgaatgcagccatgactgtgttctgacatcagaaggtcccttatgtttctgtcctgaaggctcagtgcttgagagagatgggaaaacatgtagcggttgttcctcacccgataatggtggatgtagccagctctgcgttcctcttagcccagtatcctgggaatgtgattgctttcctgggtatgacctacaactggatgaaaaaagctgtgcagcttcaggaccacaaccatttttgctgtttgccaattctcaagatattcgacacatgcattttgatggaacagactatggaactctgctcagccagcagatgggaatggtttatgccctagatcatgaccctgtggaaaataagatatactttgcccatacagccctgaagtggatagagagagctaatatggatggttcccagcgagaaaggcttattgaggaaggagtagatgtgccagaaggtcttgctgtggactggattggccgtagattctattggacagacagagggaaatctctgattggaaggagtgatttaaatgggaaacgttccaaaataatcactaaggagaacatctctcaaccacgaggaattgctgttcatccaatggccaagagattattctggactgatacagggattaatccacgaattgaaagttcttccctccaaggccttggccgtctggttatagccagctctgatctaatctggcccagtggaataacgattgacttcttaactgacaagttgtactggtgcgatgccaagcagtctgtgattgaaatggccaatctggatggttcaaaacgccgaagacttacccagaatgatgtaggtcacccatttgctgtagcagtgtttgaggattatgtgtggttctcagattgggctatgccatcagtaatgagagtaaacaagaggactggcaaagatagagtacgtctccaaggcagcatgctgaagccctcatcactggttgtggttcatccattggcaaaaccaggagcagatccctgcttatatcaaaacggaggctgtgaacatatttgcaaaaagaggcttggaactgcttggtgttcgtgtcgtgaaggttttatgaaagcctcagatgggaaaacgtgtctggctctggatggtcatcagctgttggcaggtggtgaagttgatctaaagaaccaagtaacaccattggacatcttgtccaagactagagtgtcagaagataacattacagaatctcaacacatgctagtggctgaaatcatggtgtcagatcaagatgactgtgctcctgtgggatgcagcatgtatgctcggtgtatttcagagggagaggatgccacatgtcagtgtttgaaaggatttgctggggatggaaaactatgttctgatatagatgaatgtgagatgggtgtcccagtgtgcccccctgcctcctccaagtgcatcaacaccgaaggtggttatgtctgccggtgctcagaaggctaccaaggagatgggattcactgtcttgatattgatgagtgccaactgggggagcacagctgtggagagaatgccagctgcacaaatacagagggaggctatacctgcatgtgtgctggacgcctgtctgaaccaggactgatttgccctgactctactccaccccctcacctcagggaagatgaccaccactattccgtaagaaatagtgactctgaatgtcccctgtcccacgatgggtactgcctccatgatggtgtgtgcatgtatattgaagcattggacaagtatgcatgcaactgtgttgttggctacatcggggagcgatgtcagtaccgagacctgaagtggtgggaactgcgccacgctggccacgggcagcagcagaaggtcatcgtggtggctgtctgcgtggtggtgcttgtcatgctgctcctcctgagcctgtggggggcccactactacaggactcagaagctgctatcgaaaaacccaaagaatccttatgaggagtcgagcagagatgtgaggagtcgcaggcctgctgacactgaggatgggatgtcctcttgccctcaaccttggtttgtggttataaaagaacaccaagacctcaagaatgggggtcaaccagtggctggtgaggatggccaggcagcagatgggtcaatgcaaccaacttcatggaggcaggagccccagttatgtggaatgggcacagagcaaggctgctggattccagtatccagtgataagggctcctgtccccaggtaatggagcgaagctttcatatgccctcctatgggacacagacccttgaagggggtgtcgagaagccccattctctcctatcagctaacccattatggcaacaaagggccctggacccaccacaccaaatggagctgactcagtgaaaactggaattaaaaggaaagtcaagaagaatgaactatgtcgatgcacagtatcttttctttcaaaagtagagcaaaactataggttttggttccacaatctctacgactaatcacctactcaatgcctggagacagatacgtagttgtgcttttgtttgctcttttaagcagtctcactgcagtcttatttccaagtaagagtactgggagaatcactaggtaacttattagaaacccaaattgggacaacagtgctttgtaaattgtgttgtcttcagcagtcaatacaaatagatttttgtttttgttgttcctgcagccccagaagaaattaggggttaaagcagacagtcacactggtttggtcagttacaaagtaatttctttgatctggacagaacatttatatcagtttcatgaaatgattggaatattacaataccgttaagatacagtgtaggcatttaactcctcattggcgtggtccatgctgatgattttgcaaaatgagttgtgatgaatcaatgaaaaatgtaatttagaaactgatttcttcagaattagatggcttattttttaaaatatttgaatgaaaacattttatttttaaaatattacacaggaggcttcggagtttcttagtcattactgtccttttcccctacagaattttccctcttggtgtgattgcacagaatttgtatgtattttcagttacaagattgtaagtaaattgcctgatttgttttcattatagacaacgatgaatttcttctaattatttaaataaaatcaccaaaaacataaa

SEQ ID NO: 1472 - DNA, 3642 bp, Homo sapiens
  source 1..3642: mol_type = genomic DNA
cagccgcatctggggtcaatcatactcaccttgcccgggccatgctccagcaaaatcaagctgttttcttttgaaagttcaaactcatcaagattatgctgctcactcttatcattctgttgccagtagtttcaaaatttagttttgttagtctctcagcaccgcagcactggagctgtcctgaaggtactctcgcaggaaatgggaattctacttgtgtgggtcctgcacccttcttaattttctcccatggaaatagtatctttaggattgacacagaaggaaccaattatgagcaattggtggtggatgctggtgtctcagtgatcatggattttcattataatgagaaaagaatctattgggtggatttagaaagacaacttttgcaaagagtttttctgaatgggtcaaggcaagagagagtatgtaatatagagaaaaatgtttctggaatggcaataaattggataaatgaagaagttatttggtcaaatcaacaggaaggaatcattacagtaacagatatgaaaggaaataattcccacattcttttaagtgctttaaaatatcctgcaaatgtagcagttgatccagtagaaaggtttatattttggtcttcagaggtggctggaagcctttatagagcagatctcgatggtgtgggagtgaaggctctgttggagacatcagagaaaataacagctgtgtcattggatgtgcttgataagcggctgttttggattcagtacaacagagaaggaagcaattctcttatttgctcctgtgattatgatggaggttctgtccacattagtaaacatccaacacagcataatttgtttgcaatgtccctttttggtgaccgtatcttctattcaacatggaaaatgaagacaatttggatagccaacaaacacactggaaaggacatggttagaattaacctccattcatcatttgtaccacttggtgaactgaaagtagtgcatccacttgcacaacccaaggcagaagatgacacttgggagcctgagcagaaactttgcaaattgaggaaaggaaactgcagcagcactgtgtgtgggcaagacctccagtcacacttgtgcatgtgtgcagagggatacgccctaagtcgagaccggaagtactgtgaagatgttaatgaatgtgctttttggaatcatggctgtactcttgggtgtaaaaacacccctggatcctattactgcacgtgccctgtaggatttgttctgcttcctgatgggaaacgatgtcatcaacttgtttcctgtccacgcaatgtgtctgaatgcagccatgactgtgttctgacatcagaaggtcccttatgtttctgtcctgaaggctcagtgcttgagagagatgggaaaacatgtagcggttgttcctcacccgataatggtggatgtagccagctctgcgttcctcttagcccagtatcctgggaatgtgattgctttcctgggtatgacctacaactggatgaaaaaagctgtgcagcttcaggaccacaaccatttttgctgtttgccaattctcaagatattcgacacatgcattttgatggaacagactatggaactctgctcagccagcagatgggaatggtttatgccctagatcatgaccctgtggaaaataagatatactttgcccatacagccctgaagtggatagagagagctaatatggatggttcccagcgagaaaggcttattgaggaaggagtagatgtgccagaaggtcttgctgtggactggattggccgtagattctattggacagacagagggaaatctctgattggaaggagtgatttaaatgggaaacgttccaaaataatcactaaggagaacatctctcaaccacgaggaattgctgttcatccaatggccaagagattattctggactgatacagggattaatccacgaattgaaagttcttccctccaaggccttggccgtctggttatagccagctctgatctaatctggcccagtggaataacgattgacttcttaactgacaagttgtactggtgcgatgccaagcagtctgtgattgaaatggccaatctggatggttcaaaacgccgaagacttacccagaatgatgtaggtcacccatttgctgtagcagtgtttgaggattatgtgtggttctcagattgggctatgccatcagtaatgagagtaaacaagaggactggcaaagatagagtacgtctccaaggcagcatgctgaagccctcatcactggttgtggttcatccattggcaaaaccaggagcagatccctgcttatatcaaaacggaggctgtgaacatatttgcaaaaagaggcttggaactgcttggtgttcgtgtcgtgaaggttttatgaaagcctcagatgggaaaacgtgtctggctctggatggtcatcagctgttggcaggtggtgaagttgatctaaagaaccaagtaacaccattggacatcttgtccaagactagagtgtcagaagataacattacagaatctcaacacatgctagtggctgaaatcatggtgtcagatcaagatgactgtgctcctgtgggatgcagcatgtatgctcggtgtatttcagagggagaggatgccacatgtcagtgtttgaaaggatttgctggggatggaaaactatgttctgatatagatgaatgtgagatgggtgtcccagtgtgcccccctgcctcctccaagtgcatcaacaccgaaggtggttatgtctgccggtgctcagaaggctaccaaggagatgggattcactgtcttgactctactccaccccctcacctcagggaagatgaccaccactattccgtaagaaatagtgactctgaatgtcccctgtcccacgatgggtactgcctccatgatggtgtgtgcatgtatattgaagcattggacaagtatgcatgcaactgtgttgttggctacatcggggagcgatgtcagtaccgagacctgaagtggtgggaactgcgccacgctggccacgggcagcagcagaaggtcatcgtggtggctgtctgcgtggtggtgcttgtcatgctgctcctcctgagcctgtggggggcccactactacaggactcagaagctgctatcgaaaaacccaaagaatccttatgaggagtcgagcagagatgtgaggagtcgcaggcctgctgacactgaggatgggatgtcctcttgccctcaaccttggtttgtggttataaaagaacaccaagacctcaagaatgggggtcaaccagtggctggtgaggatggccaggcagcagatgggtcaatgcaaccaacttcatggaggcaggagccccagttatgtggaatgggcacagagcaaggctgctggattccagtatccagtgataagggctcctgtccccaggtaatggagcgaagctttcatatgccctcctatgggacacagacccttgaagggggtgtcgagaagccccattctctcctatcagctaacccattatggcaacaaagggccctggacccaccacaccaaatggagctgactcagtgaaaactggaattaaaaggaaagtcaagaagaatgaactatgtcgatg

SEQ ID NO: 1473 - DNA, 4489 bp, Homo sapiens
  source 1..4489: mol_type = genomic DNA
aaaaagagaaactgttgggagaggaatcgtatctccatatttcttctttcagccccaatccaagggttgtagctggaactttccatcagttcttcctttctttttcctctctaagcctttgccttgctctgtcacagtgaagtcagccagagcagggctgttaaactctgtgaaatttgtcataagggtgtcaggtatttcttactggcttccaaagaaacatagataaagaaatctttcctgtggcttcccttggcaggctgcattcagaaggtctctcagttgaagaaagagcttggaggacaacagcacaacaggagagtaaaagatgccccagggctgaggcctccgctcaggcagccgcatctggggtcaatcatactcaccttgcccgggccatgctccagcaaaatcaagctgttttcttttgaaagttcaaactcatcaagattatgctgctcactcttatcattctgttgccagtagtttcaaaatttagttttgttagtctctcagcaccgcagcactggagctgtcctgaaggtactctcgcaggaaatgggaattctacttgtgtgggtcctgcacccttcttaattttctcccatggaaatagtatctttaggattgacacagaaggaaccaattatgagcaattggtggtggatgctggtgtctcagtgatcatggattttcattataatgagaaaagaatctattgggtggatttagaaagacaacttttgcaaagagtttttctgaatgggtcaaggcaagagagagtatgtaatatagagaaaaatgtttctggaatggcaataaattggataaatgaagaagttatttggtcaaatcaacaggaaggaatcattacagtaacagatatgaaaggaaataattcccacattcttttaagtgctttaaaatatcctgcaaatgtagcagttgatccagtagaaaggtttatattttggtcttcagaggtggctggaagcctttatagagcagatctcgatggtgtgggagtgaaggctctgttggagacatcagagaaaataacagctgtgtcattggatgtgcttgataagcggctgttttggattcagtacaacagagaaggaagcaattctcttatttgctcctgtgattatgatggaggttctgtccacattagtaaacatccaacacagcataatttgtttgcaatgtccctttttggtgaccgtatcttctattcaacatggaaaatgaagacaatttggatagccaacaaacacactggaaaggacatggttagaattaacctccattcatcatttgtaccacttggtgaactgaaagtagtgcatccacttgcacaacccaaggcagaagatgacacttgggagcctgatgttaatgaatgtgctttttggaatcatggctgtactcttgggtgtaaaaacacccctggatcctattactgcacgtgccctgtaggatttgttctgcttcctgatgggaaacgatgtcatcaacttgtttcctgtccacgcaatgtgtctgaatgcagccatgactgtgttctgacatcagaaggtcccttatgtttctgtcctgaaggctcagtgcttgagagagatgggaaaacatgtagcggttgttcctcacccgataatggtggatgtagccagctctgcgttcctcttagcccagtatcctgggaatgtgattgctttcctgggtatgacctacaactggatgaaaaaagctgtgcagcttcaggaccacaaccatttttgctgtttgccaattctcaagatattcgacacatgcattttgatggaacagactatggaactctgctcagccagcagatgggaatggtttatgccctagatcatgaccctgtggaaaataagatatactttgcccatacagccctgaagtggatagagagagctaatatggatggttcccagcgagaaaggcttattgaggaaggagtagatgtgccagaaggtcttgctgtggactggattggccgtagattctattggacagacagagggaaatctctgattggaaggagtgatttaaatgggaaacgttccaaaataatcactaaggagaacatctctcaaccacgaggaattgctgttcatccaatggccaagagattattctggactgatacagggattaatccacgaattgaaagttcttccctccaaggccttggccgtctggttatagccagctctgatctaatctggcccagtggaataacgattgacttcttaactgacaagttgtactggtgcgatgccaagcagtctgtgattgaaatggccaatctggatggttcaaaacgccgaagacttacccagaatgatgtaggtcacccatttgctgtagcagtgtttgaggattatgtgtggttctcagattgggctatgccatcagtaatgagagtaaacaagaggactggcaaagatagagtacgtctccaaggcagcatgctgaagccctcatcactggttgtggttcatccattggcaaaaccaggagcagatccctgcttatatcaaaacggaggctgtgaacatatttgcaaaaagaggcttggaactgcttggtgttcgtgtcgtgaaggttttatgaaagcctcagatgggaaaacgtgtctggctctggatggtcatcagctgttggcaggtggtgaagttgatctaaagaaccaagtaacaccattggacatcttgtccaagactagagtgtcagaagataacattacagaatctcaacacatgctagtggctgaaatcatggtgtcagatcaagatgactgtgctcctgtgggatgcagcatgtatgctcggtgtatttcagagggagaggatgccacatgtcagtgtttgaaaggatttgctggggatggaaaactatgttctgatatagatgaatgtgagatgggtgtcccagtgtgcccccctgcctcctccaagtgcatcaacaccgaaggtggttatgtctgccggtgctcagaaggctaccaaggagatgggattcactgtcttgatattgatgagtgccaactgggggagcacagctgtggagagaatgccagctgcacaaatacagagggaggctatacctgcatgtgtgctggacgcctgtctgaaccaggactgatttgccctgactctactccaccccctcacctcagggaagatgaccaccactattccgtaagaaatagtgactctgaatgtcccctgtcccacgatgggtactgcctccatgatggtgtgtgcatgtatattgaagcattggacaagtatgcatgcaactgtgttgttggctacatcggggagcgatgtcagtaccgagacctgaagtggtgggaactgcgccacgctggccacgggcagcagcagaaggtcatcgtggtggctgtctgcgtggtggtgcttgtcatgctgctcctcctgagcctgtggggggcccactactacaggactcagaagctgctatcgaaaaacccaaagaatccttatgaggagtcgagcagagatgtgaggagtcgcaggcctgctgacactgaggatgggatgtcctcttgccctcaaccttggtttgtggttataaaagaacaccaagacctcaagaatgggggtcaaccagtggctggtgaggatggccaggcagcagatgggtcaatgcaaccaacttcatggaggcaggagccccagttatgtggaatgggcacagagcaaggctgctggattccagtatccagtgataagggctcctgtccccaggtaatggagcgaagctttcatatgccctcctatgggacacagacccttgaagggggtgtcgagaagccccattctctcctatcagctaacccattatggcaacaaagggccctggacccaccacaccaaatggagctgactcagtgaaaactggaattaaaaggaaagtcaagaagaatgaactatgtcgatgcacagtatcttttctttcaaaagtagagcaaaactataggttttggttccacaatctctacgactaatcacctactcaatgcctggagacagatacgtagttgtgcttttgtttgctcttttaagcagtctcactgcagtcttatttccaagtaagagtactgggagaatcactaggtaacttattagaaacccaaattgggacaacagtgctttgtaaattgtgttgtcttcagcagtcaatacaaatagatttttgtttttgttgttcctgcagccccagaagaaattaggggttaaagcagacagtcacactggtttggtcagttacaaagtaatttctttgatctggacagaacatttatatcagtttcatgaaatgattggaatattacaataccgttaagatacagtgtaggcatttaactcctcattggcgtggtccatgctgatgattttgcaaaatgagttgtgatgaatcaatgaaaaatgta

SEQ ID NO: 1474 - DNA, 9821 bp, Homo sapiens
  source 1..9821: mol_type = genomic DNA
gccggagtcccgagctagccccggcggccgccgccgcccagaccggacgacaggccacctcgtcggcgtccgcccgagtccccgcctcgccgccaacgccacaaccaccgcgcacggccccctgactccgtccagtattgatcgggagagccggagcgagctcttcggggagcagcgatgcgaccctccgggacggccggggcagcgctcctggcgctgctggctgcgctctgcccggcgagtcgggctctggaggaaaagaaagtttgccaaggcacgagtaacaagctcacgcagttgggcacttttgaagatcattttctcagcctccagaggatgttcaataactgtgaggtggtccttgggaatttggaaattacctatgtgcagaggaattatgatctttccttcttaaagaccatccaggaggtggctggttatgtcctcattgccctcaacacagtggagcgaattcctttggaaaacctgcagatcatcagaggaaatatgtactacgaaaattcctatgccttagcagtcttatctaactatgatgcaaataaaaccggactgaaggagctgcccatgagaaatttacaggaaatcctgcatggcgccgtgcggttcagcaacaaccctgccctgtgcaacgtggagagcatccagtggcgggacatagtcagcagtgactttctcagcaacatgtcgatggacttccagaaccacctgggcagctgccaaaagtgtgatccaagctgtcccaatgggagctgctggggtgcaggagaggagaactgccagaaactgaccaaaatcatctgtgcccagcagtgctccgggcgctgccgtggcaagtcccccagtgactgctgccacaaccagtgtgctgcaggctgcacaggcccccgggagagcgactgcctggtctgccgcaaattccgagacgaagccacgtgcaaggacacctgccccccactcatgctctacaaccccaccacgtaccagatggatgtgaaccccgagggcaaatacagctttggtgccacctgcgtgaagaagtgtccccgtaattatgtggtgacagatcacggctcgtgcgtccgagcctgtggggccgacagctatgagatggaggaagacggcgtccgcaagtgtaagaagtgcgaagggccttgccgcaaagtgtgtaacggaataggtattggtgaatttaaagactcactctccataaatgctacgaatattaaacacttcaaaaactgcacctccatcagtggcgatctccacatcctgccggtggcatttaggggtgactccttcacacatactcctcctctggatccacaggaactggatattctgaaaaccgtaaaggaaatcacagggtttttgctgattcaggcttggcctgaaaacaggacggacctccatgcctttgagaacctagaaatcatacgcggcaggaccaagcaacatggtcagttttctcttgcagtcgtcagcctgaacataacatccttgggattacgctccctcaaggagataagtgatggagatgtgataatttcaggaaacaaaaatttgtgctatgcaaatacaataaactggaaaaaactgtttgggacctccggtcagaaaaccaaaattataagcaacagaggtgaaaacagctgcaaggccacaggccaggtctgccatgccttgtgctcccccgagggctgctggggcccggagcccagggactgcgtctcttgccggaatgtcagccgaggcagggaatgcgtggacaagtgcaaccttctggagggtgagccaagggagtttgtggagaactctgagtgcatacagtgccacccagagtgcctgcctcaggccatgaacatcacctgcacaggacggggaccagacaactgtatccagtgtgcccactacattgacggcccccactgcgtcaagacctgcccggcaggagtcatgggagaaaacaacaccctggtctggaagtacgcagacgccggccatgtgtgccacctgtgccatccaaactgcacctacggatgcactgggccaggtcttgaaggctgtccaacgaatgggcctaagatcccgtccatcgccactgggatggtgggggccctcctcttgctgctggtggtggccctggggatcggcctcttcatgcgaaggcgccacatcgttcggaagcgcacgctgcggaggctgctgcaggagagggagcttgtggagcctcttacacccagtggagaagctcccaaccaagctctcttgaggatcttgaaggaaactgaattcaaaaagatcaaagtgctgggctccggtgcgttcggcacggtgtataagggactctggatcccagaaggtgagaaagttaaaattcccgtcgctatcaaggaattaagagaagcaacatctccgaaagccaacaaggaaatcctcgatgaagcctacgtgatggccagcgtggacaacccccacgtgtgccgcctgctgggcatctgcctcacctccaccgtgcagctcatcacgcagctcatgcccttcggctgcctcctggactatgtccgggaacacaaagacaatattggctcccagtacctgctcaactggtgtgtgcagatcgcaaagggcatgaactacttggaggaccgtcgcttggtgcaccgcgacctggcagccaggaacgtactggtgaaaacaccgcagcatgtcaagatcacagattttgggctggccaaactgctgggtgcggaagagaaagaataccatgcagaaggaggcaaagtgcctatcaagtggatggcattggaatcaattttacacagaatctatacccaccagagtgatgtctggagctacggggtgactgtttgggagttgatgacctttggatccaagccatatgacggaatccctgccagcgagatctcctccatcctggagaaaggagaacgcctccctcagccacccatatgtaccatcgatgtctacatgatcatggtcaagtgctggatgatagacgcagatagtcgcccaaagttccgtgagttgatcatcgaattctccaaaatggcccgagacccccagcgctaccttgtcattcagggggatgaaagaatgcatttgccaagtcctacagactccaacttctaccgtgccctgatggatgaagaagacatggacgacgtggtggatgccgacgagtacctcatcccacagcagggcttcttcagcagcccctccacgtcacggactcccctcctgagctctctgagtgcaaccagcaacaattccaccgtggcttgcattgatagaaatgggctgcaaagctgtcccatcaaggaagacagcttcttgcagcgatacagctcagaccccacaggcgccttgactgaggacagcatagacgacaccttcctcccagtgcctgaatacataaaccagtccgttcccaaaaggcccgctggctctgtgcagaatcctgtctatcacaatcagcctctgaaccccgcgcccagcagagacccacactaccaggacccccacagcactgcagtgggcaaccccgagtatctcaacactgtccagcccacctgtgtcaacagcacattcgacagccctgcccactgggcccagaaaggcagccaccaaattagcctggacaaccctgactaccagcaggacttctttcccaaggaagccaagccaaatggcatctttaagggctccacagctgaaaatgcagaatacctaagggtcgcgccacaaagcagtgaatttattggagcatgaccacggaggatagtatgagccctaaaaatccagactctttcgatacccaggaccaagccacagcaggtcctccatcccaacagccatgcccgcattagctcttagacccacagactggttttgcaacgtttacaccgactagccaggaagtacttccacctcgggcacattttgggaagttgcattcctttgtcttcaaactgtgaagcatttacagaaacgcatccagcaagaatattgtccctttgagcagaaatttatctttcaaagaggtatatttgaaaaaaaaaaaaagtatatgtgaggatttttattgattggggatcttggagtttttcattgtcgctattgatttttacttcaatgggctcttccaacaaggaagaagcttgctggtagcacttgctaccctgagttcatccaggcccaactgtgagcaaggagcacaagccacaagtcttccagaggatgcttgattccagtggttctgcttcaaggcttccactgcaaaacactaaagatccaagaaggccttcatggccccagcaggccggatcggtactgtatcaagtcatggcaggtacagtaggataagccactctgtcccttcctgggcaaagaagaaacggaggggatggaattcttccttagacttacttttgtaaaaatgtccccacggtacttactccccactgatggaccagtggtttccagtcatgagcgttagactgacttgtttgtcttccattccattgttttgaaactcagtatgctgcccctgtcttgctgtcatgaaatcagcaagagaggatgacacatcaaataataactcggattccagcccacattggattcatcagcatttggaccaatagcccacagctgagaatgtggaatacctaaggatagcaccgcttttgttctcgcaaaaacgtatctcctaatttgaggctcagatgaaatgcatcaggtcctttggggcatagatcagaagactacaaaaatgaagctgctctgaaatctcctttagccatcaccccaaccccccaaaattagtttgtgttacttatggaagatagttttctccttttacttcacttcaaaagctttttactcaaagagtatatgttccctccaggtcagctgcccccaaaccccctccttacgctttgtcacacaaaaagtgtctctgccttgagtcatctattcaagcacttacagctctggccacaacagggcattttacaggtgcgaatgacagtagcattatgagtagtgtggaattcaggtagtaaatatgaaactagggtttgaaattgataatgctttcacaacatttgcagatgttttagaaggaaaaaagttccttcctaaaataatttctctacaattggaagattggaagattcagctagttaggagcccaccttttttcctaatctgtgtgtgccctgtaacctgactggttaacagcagtcctttgtaaacagtgttttaaactctcctagtcaatatccaccccatccaatttatcaaggaagaaatggttcagaaaatattttcagcctacagttatgttcagtcacacacacatacaaaatgttccttttgcttttaaagtaatttttgactcccagatcagtcagagcccctacagcattgttaagaaagtatttgatttttgtctcaatgaaaataaaactatattcatttccactctattatgctctcaaatacccctaagcatctatactagcctggtatgggtatgaaagatacaaagataaataaaacatagtccctgattctaagaaattcacaatttagcaaaggaaatggactcatagatgctaaccttaaaacaacgtgacaaatgccagacaggacccatcagccaggcactgtgagagcacagagcagggaggttgggtcctgcctgaggagacctggaagggaggcctcacaggaggatgaccaggtctcagtcagcggggaggtggaaagtgcaggtgcatcaggggcaccctgaccgaggaaacagctgccagaggcctccactgctaaagtccacataaggctgaggtcagtcaccctaaacaacctgctccctctaagccaggggatgagcttggagcatcccacaagttccctaaaagttgcagcccccagggggattttgagctatcatctctgcacatgcttagtgagaagactacacaacatttctaagaatctgagattttatattgtcagttaaccactttcattattcattcacctcaggacatgcagaaatatttcagtcagaactgggaaacagaaggacctacattctgctgtcacttatgtgtcaagaagcagatgatcgatgaggcaggtcagttgtaagtgagtcacattgtagcattaaattctagtatttttgtagtttgaaacagtaacttaataaaagagcaaaagctattctagctttcttcttcatattttaattttccaccataaagtttagttgctaaattctattaattttaagattgtgcttcccaaaatagttctcacttcatctgtccagggaggcacagttctgtctggtagaagccgcaaagcccttagcctcttcacggatctggcgactgtgatgggcaggtcaggagaggagctgcccaaagtcccatgattttcacctaacagccctgatcagtcagtactcaaagcttggactccatccctgaaggtcttcctgattgatagcctggccttaataccctacagaaagcctgtccattggctgtttcttcctcagtcagttcctggaagaccttaccccatgaccccagcttcagatgtggtctttggaaacagaggtcgaaggaaagtaaggagctgagagctcacattcataggtgccgccagccttcgtgcatcttcttgcatcatctctaaggagctcctctaattacaccatgcccgtcaccccatgagggatcagagaagggatgagtcttctaaactctatattcgctgtgagtccaggttgtaagggggagcactgtggatgcatcctattgcactccagctgatgacaccaaagcttaggtgtttgctgaaagttcttgatgttgtgacttaccacccctgcctcacaactgcagacataaggggactatggattgcttagcaggaaaggcactggttctcaagggcggctgcccttgggaatcttctggtcccaaccagaaagactgtggcttgattttctcaggtgcagcccagccgtagggccttttcagagcaccccctggttattgcaacattcatcaaagtttctagaacctctggcctaaaggaagggcctggtgggatctacttggcactcgctggggggccaccccccagtgccactctcactaggcctctgattgcacttgtgtaggatgaagctggtgggtgatgggaactcagcacctcccctcaggcagaaaagaatcatctgtggagcttcaaaagaaggggcctggagtctctgcagaccaattcaacccaaatctcgggggctctttcatgattctaatgggcaaccagggttgaaacccttatttctagggtcttcagttgtacaagactgtgggtctgtaccagagcccccgtcagagtagaataaaaggctgggtagggtagagattcccatgtgcagtggagagaacaatctgcagtcactgataagcctgagacttggctcatttcaaaagcgttcaattcatcctcaccagcagttcagctggaaaggggcaaatacccccacctgagctttgaaaacgccctgggaccctctgcattctctaagtaagttatagaaaccagtctcttccctcctttgtgagtgagctgctattccacgtaggcaacacctgttgaaattgccctcaatgtctactctgcatttctttcttgtgataagcacacacttttattgcaacataatgatctgctcacatttccttgcctgggggctgtaaaaccttacagaacagaaatccttgcctctttcaccagccacacctgccataccaggggtacagctttgtactattgaagacacagacaggatttttaaatgtaaatctatttttgtaactttgttgcgggatatagttctctttatgtagcactgaactttgtacaatatatttttagaaactcatttttctactaaaacaaacacagtttactttagagagactgcaatagaatcaaaatttgaaactgaaatctttgtttaaaagggttaagttgaggcaagaggaaagccctttctctctcttataaaaaggcacaacctcattggggagctaagctaggtcattgtcatggtgaagaagagaagcatcgtttttatatttaggaaattttaaaagatgatggaaagcacatttagcttggtctgaggcaggttctgttggggcagtgttaatggaaagggctcactgttgttactactagaaaaatccagttgcatgccatactctcatcatctgccagtgtaaccctgtacatgtaagaaaagcaataacatagcactttgttggtttatatatataatgtgacttcaatgcaaattttatttttatatttacaattgatatgcatttaccagtataaactagacatgtctggagagcctaataatgttcagcacactttggttagttcaccaacagtcttaccaagcctgggcccagccaccctagagaagttattcagccctggctgcagtgacatcacctgaggagcttttaaaagcttgaagcccagctacacctcagaccgattaaacgcaaatctctggggctgaaacccaagcattcgtagtttttaaagctcctgaggtcattccaatgtgcggccaaagttgagaactactggcctagggattagccacaaggacatggacttggaggcaaattctgcaggtgtatgtgattctcaggcctagagagctaagacacaaagacctccacatctgtcgctgagagtcaagaacctgaacagagtttccatgaaggttctccaagcactagaagggagagtgtctaaacaatggttgaaaagcaaaggaaatataaaacagacacctctttccatttcctaaggtttctctctttattaagggtggactagtaataaaatataatattcttgctgcttatgcagctgacattgttgccctccctaaagcaaccaagtagcctttatttcccacagtgaaagaaaacgctggcctatcagttacattacaaaaggcagatttcaagaggattgagtaagtagttggatggctttcataaaaacaagaattcaagaagaggattcatgctttaagaaacatttgttatacattcctcacaaattatacctgggataaaaactatgtagcaggcagtgtgttttccttccatgtctctctgcactacctgcagtgtgtcctctgaggctgcaagtctgtcctatctgaattcccagcagaagcactaagaagctccaccctatcacctagcagataaaactatggggaaaacttaaatctgtgcatacatttctggatgcatttacttatctttaaaaaaaaaggaatcctatgacctgatttggccacaaaaataatcttgctgtacaatacaatctcttggaaattaagagatcctatggatttgatgactggtattagaggtgacaatgtaaccgattaacaacagacagcaataacttcgttttagaaacattcaagcaatagctttatagcttcaacatatggtacgttttaaccttgaaagttttgcaatgatgaaagcagtatttgtacaaatgaaaagcagaattctcttttatatggtttatactgttgatcagaaatgttgattgtgcattgagtattaaaaaattagatgtatattattcattgttctttactcctgagtaccttataataataataatgtattctttgttaacaa

SEQ ID NO: 1475 - DNA, 2239 bp, Homo sapiens
  source 1..2239: mol_type = genomic DNA
ccccggcgcagcgcggccgcagcagcctccgccccccgcacggtgtgagcgcccgacgcggccgaggcggccggagtcccgagctagccccggcggccgccgccgcccagaccggacgacaggccacctcgtcggcgtccgcccgagtccccgcctcgccgccaacgccacaaccaccgcgcacggccccctgactccgtccagtattgatcgggagagccggagcgagctcttcggggagcagcgatgcgaccctccgggacggccggggcagcgctcctggcgctgctggctgcgctctgcccggcgagtcgggctctggaggaaaagaaagtttgccaaggcacgagtaacaagctcacgcagttgggcacttttgaagatcattttctcagcctccagaggatgttcaataactgtgaggtggtccttgggaatttggaaattacctatgtgcagaggaattatgatctttccttcttaaagaccatccaggaggtggctggttatgtcctcattgccctcaacacagtggagcgaattcctttggaaaacctgcagatcatcagaggaaatatgtactacgaaaattcctatgccttagcagtcttatctaactatgatgcaaataaaaccggactgaaggagctgcccatgagaaatttacaggaaatcctgcatggcgccgtgcggttcagcaacaaccctgccctgtgcaacgtggagagcatccagtggcgggacatagtcagcagtgactttctcagcaacatgtcgatggacttccagaaccacctgggcagctgccaaaagtgtgatccaagctgtcccaatgggagctgctggggtgcaggagaggagaactgccagaaactgaccaaaatcatctgtgcccagcagtgctccgggcgctgccgtggcaagtcccccagtgactgctgccacaaccagtgtgctgcaggctgcacaggcccccgggagagcgactgcctggtctgccgcaaattccgagacgaagccacgtgcaaggacacctgccccccactcatgctctacaaccccaccacgtaccagatggatgtgaaccccgagggcaaatacagctttggtgccacctgcgtgaagaagtgtccccgtaattatgtggtgacagatcacggctcgtgcgtccgagcctgtggggccgacagctatgagatggaggaagacggcgtccgcaagtgtaagaagtgcgaagggccttgccgcaaagtgtgtaacggaataggtattggtgaatttaaagactcactctccataaatgctacgaatattaaacacttcaaaaactgcacctccatcagtggcgatctccacatcctgccggtggcatttaggggtgactccttcacacatactcctcctctggatccacaggaactggatattctgaaaaccgtaaaggaaatcacagggtttttgctgattcaggcttggcctgaaaacaggacggacctccatgcctttgagaacctagaaatcatacgcggcaggaccaagcaacatggtcagttttctcttgcagtcgtcagcctgaacataacatccttgggattacgctccctcaaggagataagtgatggagatgtgataatttcaggaaacaaaaatttgtgctatgcaaatacaataaactggaaaaaactgtttgggacctccggtcagaaaaccaaaattataagcaacagaggtgaaaacagctgcaaggccacaggccaggtctgccatgccttgtgctcccccgagggctgctggggcccggagcccagggactgcgtctcttgccggaatgtcagccgaggcagggaatgcgtggacaagtgcaaccttctggagggtgagccaagggagtttgtggagaactctgagtgcatacagtgccacccagagtgcctgcctcaggccatgaacatcacctgcacaggacggggaccagacaactgtatccagtgtgcccactacattgacggcccccactgcgtcaagacctgcccggcaggagtcatgggagaaaacaacaccctggtctggaagtacgcagacgccggccatgtgtgccacctgtgccatccaaactgcacctacgggtcctaataaatcttcactgtctgactttagtctcccactaaaactgcatttcctttctacaatttcaatttctccctttgcttcaaataaagtcctgacactattcatttga

SEQ ID NO: 1476 - DNA, 2864 bp, Homo sapiens
  source 1..2864: mol_type = genomic DNA
cccggcgcagcgcggccgcagcagcctccgccccccgcacggtgtgagcgcccgacgcggccgaggcggccggagtcccgagctagccccggcggccgccgccgcccagaccggacgacaggccacctcgtcggcgtccgcccgagtccccgcctcgccgccaacgccacaaccaccgcgcacggccccctgactccgtccagtattgatcgggagagccggagcgagctcttcggggagcagcgatgcgaccctccgggacggccggggcagcgctcctggcgctgctggctgcgctctgcccggcgagtcgggctctggaggaaaagaaagtttgccaaggcacgagtaacaagctcacgcagttgggcacttttgaagatcattttctcagcctccagaggatgttcaataactgtgaggtggtccttgggaatttggaaattacctatgtgcagaggaattatgatctttccttcttaaagaccatccaggaggtggctggttatgtcctcattgccctcaacacagtggagcgaattcctttggaaaacctgcagatcatcagaggaaatatgtactacgaaaattcctatgccttagcagtcttatctaactatgatgcaaataaaaccggactgaaggagctgcccatgagaaatttacaggaaatcctgcatggcgccgtgcggttcagcaacaaccctgccctgtgcaacgtggagagcatccagtggcgggacatagtcagcagtgactttctcagcaacatgtcgatggacttccagaaccacctgggcagctgccaaaagtgtgatccaagctgtcccaatgggagctgctggggtgcaggagaggagaactgccagaaactgaccaaaatcatctgtgcccagcagtgctccgggcgctgccgtggcaagtcccccagtgactgctgccacaaccagtgtgctgcaggctgcacaggcccccgggagagcgactgcctggtctgccgcaaattccgagacgaagccacgtgcaaggacacctgccccccactcatgctctacaaccccaccacgtaccagatggatgtgaaccccgagggcaaatacagctttggtgccacctgcgtgaagaagtgtccccgtaattatgtggtgacagatcacggctcgtgcgtccgagcctgtggggccgacagctatgagatggaggaagacggcgtccgcaagtgtaagaagtgcgaagggccttgccgcaaagtgtgtaacggaataggtattggtgaatttaaagactcactctccataaatgctacgaatattaaacacttcaaaaactgcacctccatcagtggcgatctccacatcctgccggtggcatttaggggtgactccttcacacatactcctcctctggatccacaggaactggatattctgaaaaccgtaaaggaaatcacagggtttttgctgattcaggcttggcctgaaaacaggacggacctccatgcctttgagaacctagaaatcatacgcggcaggaccaagcaacatggtcagttttctcttgcagtcgtcagcctgaacataacatccttgggattacgctccctcaaggagataagtgatggagatgtgataatttcaggaaacaaaaatttgtgctatgcaaatacaataaactggaaaaaactgtttgggacctccggtcagaaaaccaaaattataagcaacagaggtgaaaacagctgcaaggccacaggccaggtctgccatgccttgtgctcccccgagggctgctggggcccggagcccagggactgcgtctcttgccggaatgtcagccgaggcagggaatgcgtggacaagtgcaaccttctggagggtgagccaagggagtttgtggagaactctgagtgcatacagtgccacccagagtgcctgcctcaggccatgaacatcacctgcacaggacggggaccagacaactgtatccagtgtgcccactacattgacggcccccactgcgtcaagacctgcccggcaggagtcatgggagaaaacaacaccctggtctggaagtacgcagacgccggccatgtgtgccacctgtgccatccaaactgcacctacgggccaggaaatgagagtctcaaagccatgttattctgcctttttaaactatcatcctgtaatcaaagtaatgatggcagcgtgtcccaccagagcgggagcccagctgctcaggagtcatgcttaggatggatcccttctcttctgccgtcagagtttcagctgggttggggtggatgcagccacctccatgcctggccttctgcatctgtgatcatcacggcctcctcctgccactgagcctcatgccttcacgtgtctgttccccccgcttttcctttctgccacccctgcacgtgggccgccaggttcccaagagtatcctacccatttccttccttccactccctttgccagtgcctctcaccccaactagtagctaaccatcacccccaggactgacctcttcctcctcgctgccagatgattgttcaaagcacagaatttgtcagaaacctgcagggactccatgctgccagccttctccgtaattagcatggccccagtccatgcttctagccttggttccttctgcccctctgtttgaaattctagagccagctgtgggacaattatctgtgtcaaaagccagatgtgaaaacatctcaataacaaactggctgctttgttcaatgctagaacaacgcctgtcacagagtagaaactcaaaaatatttgctgagtgaatgaacaaatgaataaatgcataataaataattaaccaccaatccaacatccaga

SEQ ID NO: 1477 - DNA, 5595 bp, Homo sapiens
  source 1..5595: mol_type = genomic DNA
ccccggcgcagcgcggccgcagcagcctccgccccccgcacggtgtgagcgcccgacgcggccgaggcggccggagtcccgagctagccccggcggccgccgccgcccagaccggacgacaggccacctcgtcggcgtccgcccgagtccccgcctcgccgccaacgccacaaccaccgcgcacggccccctgactccgtccagtattgatcgggagagccggagcgagctcttcggggagcagcgatgcgaccctccgggacggccggggcagcgctcctggcgctgctggctgcgctctgcccggcgagtcgggctctggaggaaaagaaagtttgccaaggcacgagtaacaagctcacgcagttgggcacttttgaagatcattttctcagcctccagaggatgttcaataactgtgaggtggtccttgggaatttggaaattacctatgtgcagaggaattatgatctttccttcttaaagaccatccaggaggtggctggttatgtcctcattgccctcaacacagtggagcgaattcctttggaaaacctgcagatcatcagaggaaatatgtactacgaaaattcctatgccttagcagtcttatctaactatgatgcaaataaaaccggactgaaggagctgcccatgagaaatttacaggaaatcctgcatggcgccgtgcggttcagcaacaaccctgccctgtggtggagagcatccagtggcgggacatagtcagcagtgactttctcagcaacatgtcgatggacttccagaaccacctgggcagctgccaaaagtgtgatccaagctgtcccaatgggagctgctggggtgcaggagaggagaactgccagaaactgaccaaaatcatctgtgcccagcagtgctccgggcgctgccgtggcaagtcccccagtgactgctgccacaaccagtgtgctgcaggctgcacaggcccccgggagagcgactgcctggtctgccgcaaattccgagacgaagccacgtgcaaggacacctgccccccactcatgctctacaaccccaccacgtaccagatggatgtgaaccccgagggcaaatacagctttggtgccacctgcgtgaagaagtgtccccgtaattatgtggtgacagatcacggctcgtgcgtccgagcctgtggggccgacagctatgagatggaggaagacggcgtccgcaagtgtaagaagtgcgaagggccttgccgcaaagtgtgtaacggaataggtattggtgaatttaaagactcactctccataaatgctacgaatattaaacacttcaaaaactgcacctccatcagtggcgatctccacatcctgccggtggcatttaggggtgactccttcacacatactcctcctctggatccacaggaactggatattctgaaaaccgtaaaggaaatcacagggtttttgctgattcaggcttggcctgaaaacaggacggacctccatgcctttgagaacctagaaatcatacgcggcaggaccaagcaacatggtcagttttctcttgcagtcgtcagcctgaacataacatccttgggattacgctccctcaaggagataagtgatggagatgtgataatttcaggaaacaaaaatttgtgctatgcaaatacaataaactggaaaaaactgtttgggacctccggtcagaaaaccaaaattataagcaacagaggtgaaaacagctgcaaggccacaggccaggtctgccatgccttgtgctcccccgagggctgctggggcccggagcccagggactgcgtctcttgccggaatgtcagccgaggcagggaatgcgtggacaagtgcaaccttctggagggtgagccaagggagtttgtggagaactctgagtgcatacagtgccacccagagtgcctgcctcaggccatgaacatcacctgcacaggacggggaccagacaactgtatccagtgtgcccactacattgacggcccccactgcgtcaagacctgcccggcaggagtcatgggagaaaacaacaccctggtctggaagtacgcagacgccggccatgtgtgccacctgtgccatccaaactgcacctacggatgcactgggccaggtcttgaaggctgtccaacgaatgggcctaagatcccgtccatcgccactgggatggtgggggccctcctcttgctgctggtggtggccctggggatcggcctcttcatgcgaaggcgccacatcgttcggaagcgcacgctgcggaggctgctgcaggagagggagcttgtggagcctcttacacccagtggagaagctcccaaccaagctctcttgaggatcttgaaggaaactgaattcaaaaagatcaaagtgctgggctccggtgcgttcggcacggtgtataagggactctggatcccagaaggtgagaaagttaaaattcccgtcgctatcaaggaattaagagaagcaacatctccgaaagccaacaaggaaatcctcgatgaagcctacgtgatggccagcgtggacaacccccacgtgtgccgcctgctgggcatctgcctcacctccaccgtgcagctcatcacgcagctcatgcccttcggctgcctcctggactatgtccgggaacacaaagacaatattggctcccagtacctgctcaactggtgtgtgcagatcgcaaagggcatgaactacttggaggaccgtcgcttggtgcaccgcgacctggcagccaggaacgtactggtgaaaacaccgcagcatgtcaagatcacagattttgggctggccaaactgctgggtgcggaagagaaagaataccatgcagaaggaggcaaagtgcctatcaagtggatggcattggaatcaattttacacagaatctatacccaccagagtgatgtctggagctacggggtgactgtttgggagttgatgacctttggatccaagccatatgacggaatccctgccagcgagatctcctccatcctggagaaaggagaacgcctccctcagccacccatatgtaccatcgatgtctacatgatcatggtcaagtgctggatgatagacgcagatagtcgcccaaagttccgtgagttgatcatcgaattctccaaaatggcccgagacccccagcgctaccttgtcattcagggggatgaaagaatgcatttgccaagtcctacagactccaacttctaccgtgccctgatggatgaagaagacatggacgacgtggtggatgccgacgagtacctcatcccacagcagggcttcttcagcagcccctccacgtcacggactcccctcctgagctctctgagtgcaaccagcaacaattccaccgtggcttgcattgatagaaatgggctgcaaagctgtcccatcaaggaagacagcttcttgcagcgatacagctcagaccccacaggcgccttgactgaggacagcatagacgacaccttcctcccagtgcctgaatacataaaccagtccgttcccaaaaggcccgctggctctgtgcagaatcctgtctatcacaatcagcctctgaaccccgcgcccagcagagacccacactaccaggacccccacagcactgcagtgggcaaccccgagtatctcaacactgtccagcccacctgtgtcaacagcacattcgacagccctgcccactgggcccagaaaggcagccaccaaattagcctggacaaccctgactaccagcaggacttctttcccaaggaagccaagccaaatggcatctttaagggctccacagctgaaaatgcagaatacctaagggtcgcgccacaaagcagtgaatttattggagcatgaccacggaggatagtatgagccctaaaaatccagactctttcgatacccaggaccaagccacagcaggtcctccatcccaacagccatgcccgcattagctcttagacccacagactggttttgcaacgtttacaccgactagccaggaagtacttccacctcgggcacattttgggaagttgcattcctttgtcttcaaactgtgaagcatttacagaaacgcatccagcaagaatattgtccctttgagcagaaatttatctttcaaagaggtatatttgaaaaaaaaaaaaagtatatgtgaggatttttattgattggggatcttggagtttttcattgtcgctattgatttttacttcaatgggctcttccaacaaggaagaagcttgctggtagcacttgctaccctgagttcatccaggcccaactgtgagcaaggagcacaagccacaagtcttccagaggatgcttgattccagtggttctgcttcaaggcttccactgcaaaacactaaagatccaagaaggccttcatggccccagcaggccggatcggtactgtatcaagtcatggcaggtacagtaggataagccactctgtcccttcctgggcaaagaagaaacggaggggatggaattcttccttagacttacttttgtaaaaatgtccccacggtacttactccccactgatggaccagtggtttccagtcatgagcgttagactgacttgtttgtcttccattccattgttttgaaactcagtatgctgcccctgtcttgctgtcatgaaatcagcaagagaggatgacacatcaaataataactcggattccagcccacattggattcatcagcatttggaccaatagcccacagctgagaatgtggaatacctaaggatagcaccgcttttgttctcgcaaaaacgtatctcctaatttgaggctcagatgaaatgcatcaggtcctttggggcatagatcagaagactacaaaaatgaagctgctctgaaatctcctttagccatcaccccaaccccccaaaattagtttgtgttacttatggaagatagttttctccttttacttcacttcaaaagctttttactcaaagagtatatgttccctccaggtcagctgcccccaaaccccctccttacgctttgtcacacaaaaagtgtctctgccttgagtcatctattcaagcacttacagctctggccacaacagggcattttacaggtgcgaatgacagtagcattatgagtagtgtggaattcaggtagtaaatatgaaactagggtttgaaattgataatgctttcacaacatttgcagatgttttagaaggaaaaaagttccttcctaaaataatttctctacaattggaagattggaagattcagctagttaggagcccaccttttttcctaatctgtgtgtgccctgtaacctgactggttaacagcagtcctttgtaaacagtgttttaaactctcctagtcaatatccaccccatccaatttatcaaggaagaaatggttcagaaaatattttcagcctacagttatgttcagtcacacacacatacaaaatgttccttttgcttttaaagtaatttttgactcccagatcagtcagagcccctacagcattgttaagaaagtatttgatttttgtctcaatgaaaataaaactatattcatttccactct

SEQ ID NO: 1478 - DNA, 1570 bp, Homo sapiens
  source 1..1570: mol_type = genomic DNA
ccggcgcagcgcggccgcagcagcctccgccccccgcacggtgtgagcgcccgacgcggccgaggcggccggagtcccgagctagccccggcggccgccgccgcccagaccggacgacaggccacctcgtcggcgtccgcccgagtccccgcctcgccgccaacgccacaaccaccgcgcacggccccctgactccgtccagtattgatcgggagagccggagcgagctcttcggggagcagcgatgcgaccctccgggacggccggggcagcgctcctggcgctgctggctgcgctctgcccggcgagtcgggctctggaggaaaagaaagtttgccaaggcacgagtaacaagctcacgcagttgggcacttttgaagatcattttctcagcctccagaggatgttcaataactgtgaggtggtccttgggaatttggaaattacctatgtgcagaggaattatgatctttccttcttaaagaccatccaggaggtggctggttatgtcctcattgccctcaacacagtggagcgaattcctttggaaaacctgcagatcatcagaggaaatatgtactacgaaaattcctatgccttagcagtcttatctaactatgatgcaaataaaaccggactgaaggagctgcccatgagaaatttacaggaaatcctgcatggcgccgtgcggttcagcaacaaccctgccctgtgcaacgtggagagcatccagtggcgggacatagtcagcagtgactttctcagcaacatgtcgatggacttccagaaccacctgggcagctgccaaaagtgtgatccaagctgtcccaatgggagctgctggggtgcaggagaggagaactgccagaaactgaccaaaatcatctgtgcccagcagtgctccgggcgctgccgtggcaagtcccccagtgactgctgccacaaccagtgtgctgcaggctgcacaggcccccgggagagcgactgcctggtctgccgcaaattccgagacgaagccacgtgcaaggacacctgccccccactcatgctctacaaccccaccacgtaccagatggatgtgaaccccgagggcaaatacagctttggtgccacctgcgtgaagaagtgtccccgtaattatgtggtgacagatcacggctcgtgcgtccgagcctgtggggccgacagctatgagatggaggaagacggcgtccgcaagtgtaagaagtgcgaagggccttgccgcaaagtgtgtaacggaataggtattggtgaatttaaagactcactctccataaatgctacgaatattaaacacttcaaaaactgcacctccatcagtggcgatctccacatcctgccggtggcatttaggggtgactccttcacacatactcctcctctggatccacaggaactggatattctgaaaaccgtaaaggaaatcacaggtttgagctgaattatcacatgaatataaatgggaaatcagtgttttagagagagaacttttcgacatatttcctgttcccttggaataaaaacatttcttctgaaattttaccgttaa

SEQ ID NO: 1479 - DNA, 2529 bp, Homo sapiens
  source 1..2529: mol_type = genomic DNA
gccccggcggccgccgccgcccagaccggacgacaggccacctcgtcggcgtccgcccgagtccccgcctcgccgccaacgccacaaccaccgcgcacggccccctgactccgtccagtattgatcgggagagccggagcgagctcttcggggagcagcgatgcgaccctccgggacggccggggcagcgctcctggcgctgctggctgcgctctgcccggcgagtcgggctctggaggaaaagaaagtttgccaaggcacgagtaacaagctcacgcagttgggcacttttgaagatcattttctcagcctccagaggatgttcaataactgtgaggtggtccttgggaatttggaaattacctatgtgcagaggaattatgatctttccttcttaaagaccatccaggaggtggctggttatgtcctcattgccctcaacacagtggagcgaattcctttggaaaacctgcagatcatcagaggaaatatgtactacgaaaattcctatgccttagcagtcttatctaactatgatgcaaataaaaccggactgaaggagctgcccatgagaaatttacaggaaatcctgcatggcgccgtgcggttcagcaacaaccctgccctgtgcaacgtggagagcatccagtggcgggacatagtcagcagtgactttctcagcaacatgtcgatggacttccagaaccacctgggcagctgccaaaagtgtgatccaagctgtcccaatgggagctgctggggtgcaggagaggagaactgccagaaactgaccaaaatcatctgtgcccagcagtgctccgggcgctgccgtggcaagtcccccagtgactgctgccacaaccagtgtgctgcaggctgcacaggcccccgggagagcgactgcctggtctgccgcaaattccgagacgaagccacgtgcaaggacacctgccccccactcatgctctacaaccccaccacgtaccagatggatgtgaaccccgagggcaaatacagctttggtgccacctgcgtgaagaagtgtccccgtaattatgtggtgacagatcacggctcgtgcgtccgagcctgtggggccgacagctatgagatggaggaagacggcgtccgcaagtgtaagaagtgcgaagggccttgccgcaaagtgtgtaacggaataggtattggtgaatttaaagactcactctccataaatgctacgaatattaaacacttcaaaaactgcacctccatcagtggcgatctccacatcctgccggtggcatttaggggtgactccttcacacatactcctcctctggatccacaggaactggatattctgaaaaccgtaaaggaaatcacagggtttttgctgattcaggcttggcctgaaaacaggacggacctccatgcctttgagaacctagaaatcatacgcggcaggaccaagcaacatggtcagttttctcttgcagtcgtcagcctgaacataacatccttgggattacgctccctcaaggagataagtgatggagatgtgataatttcaggaaacaaaaatttgtgctatgcaaatacaataaactggaaaaaactgtttgggacctccggtcagaaaaccaaaattataagcaacagaggtgaaaacagctgcaaggccacaggccaggtctgccatgccttgtgctcccccgagggctgctggggcccggagcccagggactgcgtctcttgccggaatgtcagccgaggcagggaatgcgtggacaagtgcaaccttctggagggtgagccaagggagtttgtggagaactctgagtgcatacagtgccacccagagtgcctgcctcaggccatgaacatcacctgcacaggacggggaccagacaactgtatccagtgtgcccactacattgacggcccccactgcgtcaagacctgcccggcaggagtcatgggagaaaacaacaccctggtctggaagtacgcagacgccggccatgtgtgccacctgtgccatccaaactgcacctacggatgcactgggccaggtcttgaaggctgtccaacgaatggaagctacatagtgtctcactttccaagatcattctacaagatgtcagtgcactgaaacatgcaggggcgtgttgagtgccaaggatcttgacaagttgttttgaagatggcattttgctaagtccctgagggtcactggtcctcaaagcggcatggcggcatggcgtggctggttctgccacatgccagctgtgtgacctctgagactccacttcttcagtgctgaaaataaagaaggagttttactaaggaccaaacaagataatgaatgtgaaactgctccacgaaccccaaagaattatgcacatagatgcgatcattaagatgcgaagccatcgagttaccacctggcatgcttaaactgtaaagagtgggtcaaagtaaactgaattggaaaatccaaagttatgcagaaaaacaataaagaggtcttacgtagcaataccgaac

SEQ ID NO: 1480 - DNA, 3938 bp, Homo sapiens
  source 1..3938: mol_type = genomic DNA
actggacttcagaacaagagggagctctgggctgctggctggttgtgcatttgctgtgggttccctccggcaggcgacctctccgcgctgagaaggttatccggataaccaatttgccaaggcacgagtaacaagctcacgcagttgggcacttttgaagatcattttctcagcctccagaggatgttcaataactgtgaggtggtccttgggaatttggaaattacctatgtgcagaggaattatgatctttccttcttaaagaccatccaggaggtggctggttatgtcctcattgccctcaacacagtggagcgaattcctttggaaaacctgcagatcatcagaggaaatatgtactacgaaaattcctatgccttagcagtcttatctaactatgatgcaaataaaaccggactgaaggagctgcccatgagaaatttacaggaaatcctgcatggcgccgtgcggttcagcaacaaccctgccctgtgcaacgtggagagcatccagtggcgggacatagtcagcagtgactttctcagcaacatgtcgatggacttccagaaccacctgggcagctgccaaaagtgtgatccaagctgtcccaatgggagctgctggggtgcaggagaggagaactgccagaaactgaccaaaatcatctgtgcccagcagtgctccgggcgctgccgtggcaagtcccccagtgactgctgccacaaccagtgtgctgcaggctgcacaggcccccgggagagcgactgcctggtctgccgcaaattccgagacgaagccacgtgcaaggacacctgccccccactcatgctctacaaccccaccacgtaccagatggatgtgaaccccgagggcaaatacagctttggtgccacctgcgtgaagaagtgtccccgtaattatgtggtgacagatcacggctcgtgcgtccgagcctgtggggccgacagctatgagatggaggaagacggcgtccgcaagtgtaagaagtgcgaagggccttgccgcaaagtgtgtaacggaataggtattggtgaatttaaagactcactctccataaatgctacgaatattaaacacttcaaaaactgcacctccatcagtggcgatctccacatcctgccggtggcatttaggggtgactccttcacacatactcctcctctggatccacaggaactggatattctgaaaaccgtaaaggaaatcacagggtttttgctgattcaggcttggcctgaaaacaggacggacctccatgcctttgagaacctagaaatcatacgcggcaggaccaagcaacatggtcagttttctcttgcagtcgtcagcctgaacataacatccttgggattacgctccctcaaggagataagtgatggagatgtgataatttcaggaaacaaaaatttgtgctatgcaaatacaataaactggaaaaaactgtttgggacctccggtcagaaaaccaaaattataagcaacagaggtgaaaacagctgcaaggccacaggccaggtctgccatgccttgtgctcccccgagggctgctggggcccggagcccagggactgcgtctcttgccggaatgtcagccgaggcagggaatgcgtggacaagtgcaaccttctggagggtgagccaagggagtttgtggagaactctgagtgcatacagtgccacccagagtgcctgcctcaggccatgaacatcacctgcacaggacggggaccagacaactgtatccagtgtgcccactacattgacggcccccactgcgtcaagacctgcccggcaggagtcatgggagaaaacaacaccctggtctggaagtacgcagacgccggccatgtgtgccacctgtgccatccaaactgcacctacggatgcactgggccaggtcttgaaggctgtccaacgaatgggcctaagatcccgtccatcgccactgggatggtgggggccctcctcttgctgctggtggtggccctggggatcggcctcttcatgcgaaggcgccacatcgttcggaagcgcacgctgcggaggctgctgcaggagagggagcttgtggagcctcttacacccagtggagaagctcccaaccaagctctcttgaggatcttgaaggaaactgaattcaaaaagatcaaagtgctgggctccggtgcgttcggcacggtgtataagggactctggatcccagaaggtgagaaagttaaaattcccgtcgctatcaaggaattaagagaagcaacatctccgaaagccaacaaggaaatcctcgatgaagcctacgtgatggccagcgtggacaacccccacgtgtgccgcctgctgggcatctgcctcacctccaccgtgcagctcatcacgcagctcatgcccttcggctgcctcctggactatgtccgggaacacaaagacaatattggctcccagtacctgctcaactggtgtgtgcagatcgcaaagggcatgaactacttggaggaccgtcgcttggtgcaccgcgacctggcagccaggaacgtactggtgaaaacaccgcagcatgtcaagatcacagattttgggctggccaaactgctgggtgcggaagagaaagaataccatgcagaaggaggcaaagtgcctatcaagtggatggcattggaatcaattttacacagaatctatacccaccagagtgatgtctggagctacggggtgactgtttgggagttgatgacctttggatccaagccatatgacggaatccctgccagcgagatctcctccatcctggagaaaggagaacgcctccctcagccacccatatgtaccatcgatgtctacatgatcatggtcaagtgctggatgatagacgcagatagtcgcccaaagttccgtgagttgatcatcgaattctccaaaatggcccgagacccccagcgctaccttgtcattcagggggatgaaagaatgcatttgccaagtcctacagactccaacttctaccgtgccctgatggatgaagaagacatggacgacgtggtggatgccgacgagtacctcatcccacagcagggcttcttcagcagcccctccacgtcacggactcccctcctgagctctctgagtgcaaccagcaacaattccaccgtggcttgcattgatagaaatgggctgcaaagctgtcccatcaaggaagacagcttcttgcagcgatacagctcagaccccacaggcgccttgactgaggacagcatagacgacaccttcctcccagtgcctgaatacataaaccagtccgttcccaaaaggcccgctggctctgtgcagaatcctgtctatcacaatcagcctctgaaccccgcgcccagcagagacccacactaccaggacccccacagcactgcagtgggcaaccccgagtatctcaacactgtccagcccacctgtgtcaacagcacattcgacagccctgcccactgggcccagaaaggcagccaccaaattagcctggacaaccctgactaccagcaggacttctttcccaaggaagccaagccaaatggcatctttaagggctccacagctgaaaatgcagaatacctaagggtcgcgccacaaagcagtgaatttattggagcatgaccacggaggatagtatgagccctaaaaatccagactctttcgatacccaggaccaagccacagcaggtcctccatcccaacagccatgcccgcattagctcttagacccacagactggttttgcaacgtttacaccgactagccaggaagtacttccacctcgggcacattttgggaagttgcattcctttgtcttcaaactgtgaagcatttacagaaacgcatccagcaagaatattgtccctttgagcagaaatttatctttcaaagaggtatatttg

SEQ ID NO: 1481 - DNA, 3844 bp, Homo sapiens
  source 1..3844: mol_type = genomic DNA
gtccgggcagcccccggcgcagcgcggccgcagcagcctccgccccccgcacggtgtgagcgcccgacgcggccgaggcggccggagtcccgagctagccccggcggccgccgccgcccagaccggacgacaggccacctcgtcggcgtccgcccgagtccccgcctcgccgccaacgccacaaccaccgcgcacggccccctgactccgtccagtattgatcgggagagccggagcgagctcttcggggagcagcgatgcgaccctccgggacggccggggcagcgctcctggcgctgctggctgcgctctgcccggcgagtcgggctctggaggaaaagaaagtttgccaaggcacgagtaacaagctcacgcagttgggcacttttgaagatcattttctcagcctccagaggatgttcaataactgtgaggtggtccttgggaatttggaaattacctatgtgcagaggaattatgatctttccttcttaaagaccatccaggaggtggctggttatgtcctcattgccctcaacacagtggagcgaattcctttggaaaacctgcagatcatcagaggaaatatgtactacgaaaattcctatgccttagcagtcttatctaactatgatgcaaataaaaccggactgaaggagctgcccatgagaaatttacagggccaaaagtgtgatccaagctgtcccaatgggagctgctggggtgcaggagaggagaactgccagaaactgaccaaaatcatctgtgcccagcagtgctccgggcgctgccgtggcaagtcccccagtgactgctgccacaaccagtgtgctgcaggctgcacaggcccccgggagagcgactgcctggtctgccgcaaattccgagacgaagccacgtgcaaggacacctgccccccactcatgctctacaaccccaccacgtaccagatggatgtgaaccccgagggcaaatacagctttggtgccacctgcgtgaagaagtgtccccgtaattatgtggtgacagatcacggctcgtgcgtccgagcctgtggggccgacagctatgagatggaggaagacggcgtccgcaagtgtaagaagtgcgaagggccttgccgcaaagtgtgtaacggaataggtattggtgaatttaaagactcactctccataaatgctacgaatattaaacacttcaaaaactgcacctccatcagtggcgatctccacatcctgccggtggcatttaggggtgactccttcacacatactcctcctctggatccacaggaactggatattctgaaaaccgtaaaggaaatcacagggtttttgctgattcaggcttggcctgaaaacaggacggacctccatgcctttgagaacctagaaatcatacgcggcaggaccaagcaacatggtcagttttctcttgcagtcgtcagcctgaacataacatccttgggattacgctccctcaaggagataagtgatggagatgtgataatttcaggaaacaaaaatttgtgctatgcaaatacaataaactggaaaaaactgtttgggacctccggtcagaaaaccaaaattataagcaacagaggtgaaaacagctgcaaggccacaggccaggtctgccatgccttgtgctcccccgagggctgctggggcccggagcccagggactgcgtctcttgccggaatgtcagccgaggcagggaatgcgtggacaagtgcaaccttctggagggtgagccaagggagtttgtggagaactctgagtgcatacagtgccacccagagtgcctgcctcaggccatgaacatcacctgcacaggacggggaccagacaactgtatccagtgtgcccactacattgacggcccccactgcgtcaagacctgcccggcaggagtcatgggagaaaacaacaccctggtctggaagtacgcagacgccggccatgtgtgccacctgtgccatccaaactgcacctacggatgcactgggccaggtcttgaaggctgtccaacgaatgggcctaagatcccgtccatcgccactgggatggtgggggccctcctcttgctgctggtggtggccctggggatcggcctcttcatgcgaaggcgccacatcgttcggaagcgcacgctgcggaggctgctgcaggagagggagcttgtggagcctcttacacccagtggagaagctcccaaccaagctctcttgaggatcttgaaggaaactgaattcaaaaagatcaaagtgctgggctccggtgcgttcggcacggtgtataagggactctggatcccagaaggtgagaaagttaaaattcccgtcgctatcaaggaattaagagaagcaacatctccgaaagccaacaaggaaatcctcgatgaagcctacgtgatggccagcgtggacaacccccacgtgtgccgcctgctgggcatctgcctcacctccaccgtgcagctcatcacgcagctcatgcccttcggctgcctcctggactatgtccgggaacacaaagacaatattggctcccagtacctgctcaactggtgtgtgcagatcgcaaagggcatgaactacttggaggaccgtcgcttggtgcaccgcgacctggcagccaggaacgtactggtgaaaacaccgcagcatgtcaagatcacagattttgggctggccaaactgctgggtgcggaagagaaagaataccatgcagaaggaggcaaagtgcctatcaagtggatggcattggaatcaattttacacagaatctatacccaccagagtgatgtctggagctacggggtgactgtttgggagttgatgacctttggatccaagccatatgacggaatccctgccagcgagatctcctccatcctggagaaaggagaacgcctccctcagccacccatatgtaccatcgatgtctacatgatcatggtcaagtgctggatgatagacgcagatagtcgcccaaagttccgtgagttgatcatcgaattctccaaaatggcccgagacccccagcgctaccttgtcattcagggggatgaaagaatgcatttgccaagtcctacagactccaacttctaccgtgccctgatggatgaagaagacatggacgacgtggtggatgccgacgagtacctcatcccacagcagggcttcttcagcagcccctccacgtcacggactcccctcctgagctctctgagtgcaaccagcaacaattccaccgtggcttgcattgatagaaatgggctgcaaagctgtcccatcaaggaagacagcttcttgcagcgatacagctcagaccccacaggcgccttgactgaggacagcatagacgacaccttcctcccagtgcctggtgagtggcttgtctggaaacagtcctgctcctcaacctcctcgacccactcagcagcagccagtctccagtgtccaagccaggtgctccctccagcatctccagagggggaaacagtggcagatttgcagacacagtgaagggcgtaaggagcagataaacacatgaccgagcctgcacaagctctttgttgtgtctggttgtttgctgtacctctgttgtaagaatgaatctgcaaaatttctagcttatgaagcaaatcacggacatacacatctgtgtgtgtgagtgttcatgatgtgtgtacatctgtgtatgtgtgtgtgtgtatgtgtgtgtttgtgacagatttgatccctgttctctctgctggctctatcttgacctgtgaaacgtatatttaactaattaaatattagttaatattaataaattttaagctttatccaga

SEQ ID NO: 1482 - DNA, 4735 bp, Homo sapiens
  source 1..4735: mol_type = genomic DNA
atgagttctctgaccaaaatcatctgtgcccagcagtgctccgggcgctgccgtggcaagtcccccagtgactgctgccacaaccagtgtgctgcaggctgcacaggcccccgggagagcgactgcctggtctgccgcaaattccgagacgaagccacgtgcaaggacacctgccccccactcatgctctacaaccccaccacgtaccagatggatgtgaaccccgagggcaaatacagctttggtgccacctgcgtgaagaagtgtccccgtaattatgtggtgacagatcacggctcgtgcgtccgagcctgtggggccgacagctatgagatggaggaagacggcgtccgcaagtgtaagaagtgcgaagggccttgccgcaaagtgtgtaacggaataggtattggtgaatttaaagactcactctccataaatgctacgaatattaaacacttcaaaaactgcacctccatcagtggcgatctccacatcctgccggtggcatttaggggtgactccttcacacatactcctcctctggatccacaggaactggatattctgaaaaccgtaaaggaaatcacagggtttttgctgattcaggcttggcctgaaaacaggacggacctccatgcctttgagaacctagaaatcatacgcggcaggaccaagcaacatggtcagttttctcttgcagtcgtcagcctgaacataacatccttgggattacgctccctcaaggagataagtgatggagatgtgataatttcaggaaacaaaaatttgtgctatgcaaatacaataaactggaaaaaactgtttgggacctccggtcagaaaaccaaaattataagcaacagaggtgaaaacagctgcaaggccacaggccaggtctgccatgccttgtgctcccccgagggctgctggggcccggagcccagggactgcgtctcttgccggaatgtcagccgaggcagggaatgcgtggacaagtgcaaccttctggagggtgagccaagggagtttgtggagaactctgagtgcatacagtgccacccagagtgcctgcctcaggccatgaacatcacctgcacaggacggggaccagacaactgtatccagtgtgcccactacattgacggcccccactgcgtcaagacctgcccggcaggagtcatgggagaaaacaacaccctggtctggaagtacgcagacgccggccatgtgtgccacctgtgccatccaaactgcacctacggatgcactgggccaggtcttgaaggctgtccaacgaatgggcctaagatcccgtccatcgccactgggatggtgggggccctcctcttgctgctggtggtggccctggggatcggcctcttcatgcgaaggcgccacatcgttcggaagcgcacgctgcggaggctgctgcaggagagggagcttgtggagcctcttacacccagtggagaagctcccaaccaagctctcttgaggatcttgaaggaaactgaattcaaaaagatcaaagtgctgggctccggtgcgttcggcacggtgtataagggactctggatcccagaaggtgagaaagttaaaattcccgtcgctatcaaggaattaagagaagcaacatctccgaaagccaacaaggaaatcctcgatgaagcctacgtgatggccagcgtggacaacccccacgtgtgccgcctgctgggcatctgcctcacctccaccgtgcagctcatcacgcagctcatgcccttcggctgcctcctggactatgtccgggaacacaaagacaatattggctcccagtacctgctcaactggtgtgtgcagatcgcaaagggcatgaactacttggaggaccgtcgcttggtgcaccgcgacctggcagccaggaacgtactggtgaaaacaccgcagcatgtcaagatcacagattttgggctggccaaactgctgggtgcggaagagaaagaataccatgcagaaggaggcaaagtgcctatcaagtggatggcattggaatcaattttacacagaatctatacccaccagagtgatgtctggagctacggggtgactgtttgggagttgatgacctttggatccaagccatatgacggaatccctgccagcgagatctcctccatcctggagaaaggagaacgcctccctcagccacccatatgtaccatcgatgtctacatgatcatggtcaagtgctggatgatagacgcagatagtcgcccaaagttccgtgagttgatcatcgaattctccaaaatggcccgagacccccagcgctaccttgtcattcagggggatgaaagaatgcatttgccaagtcctacagactccaacttctaccgtgccctgatggatgaagaagacatggacgacgtggtggatgccgacgagtacctcatcccacagcagggcttcttcagcagcccctccacgtcacggactcccctcctgagctctctgagtgcaaccagcaacaattccaccgtggcttgcattgatagaaatgggctgcaaagctgtcccatcaaggaagacagcttcttgcagcgatacagctcagaccccacaggcgccttgactgaggacagcatagacgacaccttcctcccagtgcctgaatacataaaccagtccgttcccaaaaggcccgctggctctgtgcagaatcctgtctatcacaatcagcctctgaaccccgcgcccagcagagacccacactaccaggacccccacagcactgcagtgggcaaccccgagtatctcaacactgtccagcccacctgtgtcaacagcacattcgacagccctgcccactgggcccagaaaggcagccaccaaattagcctggacaaccctgactaccagcaggacttctttcccaaggaagccaagccaaatggcatctttaagggctccacagctgaaaatgcagaatacctaagggtcgcgccacaaagcagtgaatttattggagcatgaccacggaggatagtatgagccctaaaaatccagactctttcgatacccaggaccaagccacagcaggtcctccatcccaacagccatgcccgcattagctcttagacccacagactggttttgcaacgtttacaccgactagccaggaagtacttccacctcgggcacattttgggaagttgcattcctttgtcttcaaactgtgaagcatttacagaaacgcatccagcaagaatattgtccctttgagcagaaatttatctttcaaagaggtatatttgaaaaaaaaaaaaagtatatgtgaggatttttattgattggggatcttggagtttttcattgtcgctattgatttttacttcaatgggctcttccaacaaggaagaagcttgctggtagcacttgctaccctgagttcatccaggcccaactgtgagcaaggagcacaagccacaagtcttccagaggatgcttgattccagtggttctgcttcaaggcttccactgcaaaacactaaagatccaagaaggccttcatggccccagcaggccggatcggtactgtatcaagtcatggcaggtacagtaggataagccactctgtcccttcctgggcaaagaagaaacggaggggatggaattcttccttagacttacttttgtaaaaatgtccccacggtacttactccccactgatggaccagtggtttccagtcatgagcgttagactgacttgtttgtcttccattccattgttttgaaactcagtatgctgcccctgtcttgctgtcatgaaatcagcaagagaggatgacacatcaaataataactcggattccagcccacattggattcatcagcatttggaccaatagcccacagctgagaatgtggaatacctaaggatagcaccgcttttgttctcgcaaaaacgtatctcctaatttgaggctcagatgaaatgcatcaggtcctttggggcatagatcagaagactacaaaaatgaagctgctctgaaatctcctttagccatcaccccaaccccccaaaattagtttgtgttacttatggaagatagttttctccttttacttcacttcaaaagctttttactcaaagagtatatgttccctccaggtcagctgcccccaaaccccctccttacgctttgtcacacaaaaagtgtctctgccttgagtcatctattcaagcacttacagctctggccacaacagggcattttacaggtgcgaatgacagtagcattatgagtagtgtggaattcaggtagtaaatatgaaactagggtttgaaattgataatgctttcacaacatttgcagatgttttagaaggaaaaaagttccttcctaaaataatttctctacaattggaagattggaagattcagctagttaggagcccaccttttttcctaatctgtgtgtgccctgtaacctgactggttaacagcagtcctttgtaaacagtgttttaaactctcctagtcaatatccaccccatccaatttatcaaggaagaaatggttcagaaaatattttcagcctacagttatgttcagtcacacacacatacaaaatgttccttttgcttttaaagtaatttttgactcccagatcagtcagagcccctacagcattgttaagaaagtatttgatttttgtctcaatgaaaataaaactatattcatttccactct

SEQ ID NO: 1483 - DNA, 4087 bp, Homo sapiens
  source 1..4087: mol_type = genomic DNA
tctggagactcctgcctatgggaaagaggttgacatcacgcgccaatcggcatggctcttagagagagcagcttagtttttgaatcggttgtggcggccgccggcgaggaatggcggtatttgtgagaggagtcggcgtttgaagaggtggaactcctagggcttttttgagagtgctgatttagaagaatacaaatcatggctgaaaatagtgtattaacatccactactgggaggactagcttggcagactcttccatttttgattctaaagttactgagatttccaaggaaaacttacttattggatctacttcatatgtagaagaagagatgcctcagattgaaacaagagtgatattggttcaagaagctggaaaacaagaagaacttataaaagccttaaaggacattaaagtgggctttgtaaagatggagtcagtggaagaatttgaaggtttggattctccggaatttgaaaatgtatttgtagtcacggactttcaggattctgtctttaatgacctctacaaggctgattgtagagttattggaccaccagttgtattaaattgttcacaaaaaggagagcctttgccattttcatgtcgcccgttgtattgtacaagtatgatgaatctagtactatgctttactggatttaggaaaaaagaagaactagtcaggttggtgacattggtccatcacatgggtggagttattcgaaaagactttaattcaaaagttacacatttggtggcaaattgtacacaaggagaaaaattcagggttgctgtgagtctaggtactccaattatgaagccagaatggatttataaagcttgggaaaggcggaatgaacaggatttctatgcagcagttgatgactttagaaatgaatttaaagttcctccatttcaagattgtattttaagtttcctgggattttcagatgaagagaaaaccaatatggaagaaatgactgaaatgcaaggaggtaaatatttaccgcttggagatgaaagatgcactcaccttgtagttgaagagaatatagtaaaagatcttccctttgaaccttcaaagaaactttatgttgtcaagcaagagtggttctggggaagcattcaaatggatgcccgagctggagaaactatgtatttatatgaaaaggcaaatactcctgagctcaagaaatcagtgtcaatgctttctctaaatacccctaacagcaatcgcaaacgacgtcgtttaaaagaaacacttgctcagctttcaagagagacagacgtgtcaccatttccaccccgtaagcgcccatcagctgagcattccctttccatagggtcactcctagatatctccaacacaccagagtctagcattaactatggagacaccccaaagtcttgtactaagtcttctaaaagctccactccagttccttcaaagcagtcagcaaggtggcaagttgcaaaagagctttatcaaactgaaagtaattatgttaatatattggcaacaattattcagttatttcaagtaccattggaagaggaaggacaacgtggtggacctatccttgcaccagaggagattaagactatttttggtagcatcccagatatctttgatgtacacactaagataaaggatgatcttgaagaccttatagttaattgggatgagagcaaaagcattggtgacatttttctgaaatattcaaaagatttggtaaaaacctaccctccctttgtaaacttctttgaaatgagcaaggaaacaattattaaatgtgaaaaacagaaaccaagatttcatgcttttctcaagataaaccaagcaaaaccagaatgtggacggcagagccttgttgaacttcttatccgaccagtacagaggttacccagtgttgcattacttttaaatgatcttaagaagcatacagctgatgaaaatccagacaaaagcactttagaaaaagctattggatcactgaaggaagtaatgacgcatattaatgaggataagagaaaaacagaagctcaaaagcaaatttttgatgttgtttatgaagtagatggatgcccagctaatcttttatcttctcaccgaagcttagtacagcgggttgaaacaatttctctaggtgagcacccctgtgacagaggagaacaagtaactctcttcctcttcaatgattgcctagagatagcaagaaaacggcacaaggttattggcacttttaggagtcctcatggccaaacccgacccccagcttctcttaagcatattcacctaatgcctctttctcagattaagaaggtattggacataagagagacagaagattgccataatgcttttgccttgcttgtgaggccaccaacagagcaggcaaatgtgctactcagtttccagatgacatcagatgaacttccaaaagaaaactggctaaagatgctgtgtcgacatgtagctaacaccatttgtaaagcagatgctgagaatcttatttatactgctgatccagaatcctttgaagtaaatacaaaagatatggacagtacattgagtagagcatcaagagcaataaaaaagacttcaaaaaaggttacaagagcattctctttctccaaaactccaaaaagagctcttcgaagggctcttatgacatcccacggctcagtggagggaagaagtccttccagcaatgataagcatgtaatgagtcgtctttctagcacatcatcattagcaggtatcccttctccctcccttgtcagccttccttccttctttgaaaggagaagtcatacgttaagtagatctacaactcatttgatatgaagcgttaccaaaatcttaaattatagaaatgtatagacacctcatactcaaataagaaactgacttaaatggtacttgtaattagcacttggtgaaagctggaaggaagataaataacactaaactatgctatttgatttttcttcttgaaagagtaaggtttacctgttacattttcaagttaattcatgtaaaaaatgatagtgattttgatgtaatttatctcttgtttgaatctgtcattcaaaggccaataatttaagttgctatcagctgatattagtagctttgcaaccctgatagagtaaataaattttatgggcgggtgccaaatactgctgtgaatctatttgtatagtatccatgaatgaatttatggaaatagatatttgtgcagctcaatttatgcagagattaaatgacatcataatactggatgaaaacttgcatagaattctgattaaatagtgggtctgtttcacatgtgcagtttgaagtatttaaataaccactcctttcacagtttattttcttctcaagcgttttcaagatctagcatgtggattttaaaagatttgccctcattaacaagaataacatttaaaggagattgtttcaaaatatttttgcaaattgagataaggacagaaagattgagaaacattgtatattttgcaaaaacaagatgtttgtagctgtttcagagagagtacggtatatttatggtaattttatccactagcaaatcttgatttagtttgatagtgtgtggaattttattttgaaggataagaccatgggaaaattgtggtaaagactgtttgtacccttcatgaaataattctgaagttgccatcagttttactaatcttctgtgaaatgcatagatatgcgcatgttcaactttttattgtggtcttataattaaatgtaaaattgaaaattcatttgctgtttcaaagtgtgatatctttcacaatagcctttttatagtcagtaattcagaataatcaagttcatatggataaatgcatttttatttcctatttctttagggagtgctacaaatgtttgtcacttaaatttcaagtttctgttttaatagttaactgactatagattgttttctatgccatgtatgtgccacttctgagagtagtaaatgactctttgctacattttaaaagcaattgtattagtaagaactttgtaaataaatacctaaaacccaagtgta

SEQ ID NO: 1484 - DNA, 558 bp, Homo sapiens
  source 1..558: mol_type = genomic DNA
aattccggagcgccccagctcaggcttcccggatccgggaactccctcgccgcaccccacccccagcagccgggccctgacgcggagtgggagaccgaagcccccagtattgctgggcatcttcgccctcacctgttggctcttttggacagaagagtacggagtctacctcttgttacctagactggagtgcagtggcacgatctcggctcactgcaacctctgcctcccgggttcaagcgattctcctgcctcagcctcctgagtagctgggattacaggtgcctgccaccaagcccagctaatttttgtatttttagtagagacggggtttcattgtgttggccaggctggtctcgaactcctgacctcgtgatccgcccgccttggcctcccaaagtgctaggattacaagtgtgagccaccgcgtccggcctttcaaatggtatttttgattttcctcttccagtccttaaagcagctgatttagaagaatacaaatcatggctgaaaatagtgtattaacatccactactgggaggactagcttggcagact

SEQ ID NO: 1485 - DNA, 4158 bp, Homo sapiens
  source 1..4158: mol_type = genomic DNA
aaagaggttgacatcacgcgccaatcggcatggctcttagagagagcagcttagtttttgaatcggttgtggcggccgccggcgaggaatggcggtatttgtgagaggagtcggcgtttgaagaggtggaactcctagggcttttttgagagtgctgatttagaagaatacaaatcatggctgaaaatagtgtattaacatccactactgggaggactagcttggcagactcttccatttttgattctaaagttactgagatttccaaggaaaacttacttattggatctacttcatatgtagaagaagagatgcctcagattgaaacaagagtgatattggttcaagaagctggaaaacaagaagaacttataaaagccttaaagactattaaaataatggaagtccctgttataaagataaaagaaagttgtcctggaaaatcggatgaaaaattaataaaaagtgttattaatatggacattaaagtgggctttgtaaagatggagtcagtggaagaatttgaaggtttggattctccggaatttgaaaatgtatttgtagtcacggactttcaggattctgtctttaatgacctctacaaggctgattgtagagttattggaccaccagttgtattaaattgttcacaaaaaggagagcctttgccattttcatgtcgcccgttgtattgtacaagtatgatgaatctagtactatgctttactggatttaggaaaaaagaagaactagtcaggttggtgacattggtccatcacatgggtggagttattcgaaaagactttaattcaaaagttacacatttggtggcaaattgtacacaaggagaaaaattcagggttgctgtgagtctaggtactccaattatgaagccagaatggatttataaagcttgggaaaggcggaatgaacaggatttctatgcagcagttgatgactttagaaatgaatttaaagttcctccatttcaagattgtattttaagtttcctgggattttcagatgaagagaaaaccaatatggaagaaatgactgaaatgcaaggaggtaaatatttaccgcttggagatgaaagatgcactcaccttgtagttgaagagaatatagtaaaagatcttccctttgaaccttcaaagaaactttatgttgtcaagcaagagtggttctggggaagcattcaaatggatgcccgagctggagaaactatgtatttatatgaaaaggcaaatactcctgagctcaagaaatcagtgtcaatgctttctctaaatacccctaacagcaatcgcaaacgacgtcgtttaaaagaaacacttgctcagctttcaagagagacagacgtgtcaccatttccaccccgtaagcgcccatcagctgagcattccctttccatagggtcactcctagatatctccaacacaccagagtctagcattaactatggagacaccccaaagtcttgtactaagtcttctaaaagctccactccagttccttcaaagcagtcagcaaggtggcaagttgcaaaagagctttatcaaactgaaagtaattatgttaatatattggcaacaattattcagttatttcaagtaccattggaagaggaaggacaacgtggtggacctatccttgcaccagaggagattaagactatttttggtagcatcccagatatctttgatgtacacactaagataaaggatgatcttgaagaccttatagttaattgggatgagagcaaaagcattggtgacatttttctgaaatattcaaaagatttggtaaaaacctaccctccctttgtaaacttctttgaaatgagcaaggaaacaattattaaatgtgaaaaacagaaaccaagatttcatgcttttctcaagataaaccaagcaaaaccagaatgtggacggcagagccttgttgaacttcttatccgaccagtacagaggttacccagtgttgcattacttttaaatgatcttaagaagcatacagctgatgaaaatccagacaaaagcactttagaaaaagctattggatcactgaaggaagtaatgacgcatattaatgaggataagagaaaaacagaagctcaaaagcaaatttttgatgttgtttatgaagtagatggatgcccagctaatcttttatcttctcaccgaagcttagtacagcgggttgaaacaatttctctaggtgagcacccctgtgacagaggagaacaagtaactctcttcctcttcaatgattgcctagagatagcaagaaaacggcacaaggttattggcacttttaggagtcctcatggccaaacccgacccccagcttctcttaagcatattcacctaatgcctctttctcagattaagaaggtattggacataagagagacagaagattgccataatgcttttgccttgcttgtgaggccaccaacagagcaggcaaatgtgctactcagtttccagatgacatcagatgaacttccaaaagaaaactggctaaagatgctgtgtcgacatgtagctaacaccatttgtaaagcagatgctgagaatcttatttatactgctgatccagaatcctttgaagtaaatacaaaagatatggacagtacattgagtagagcatcaagagcaataaaaaagacttcaaaaaaggttacaagagcattctctttctccaaaactccaaaaagagctcttcgaagggctcttatgacatcccacggctcagtggagggaagaagtccttccagcaatgataagcatgtaatgagtcgtctttctagcacatcatcattagcaggtatcccttctccctcccttgtcagccttccttccttctttgaaaggagaagtcatacgttaagtagatctacaactcatttgatatgaagcgttaccaaaatcttaaattatagaaatgtatagacacctcatactcaaataagaaactgacttaaatggtacttgtaattagcacttggtgaaagctggaaggaagataaataacactaaactatgctatttgatttttcttcttgaaagagtaaggtttacctgttacattttcaagttaattcatgtaaaaaatgatagtgattttgatgtaatttatctcttgtttgaatctgtcattcaaaggccaataatttaagttgctatcagctgatattagtagctttgcaaccctgatagagtaaataaattttatgggcgggtgccaaatactgctgtgaatctatttgtatagtatccatgaatgaatttatggaaatagatatttgtgcagctcaatttatgcagagattaaatgacatcataatactggatgaaaacttgcatagaattctgattaaatagtgggtctgtttcacatgtgcagtttgaagtatttaaataaccactcctttcacagtttattttcttctcaagcgttttcaagatctagcatgtggattttaaaagatttgccctcattaacaagaataacatttaaaggagattgtttcaaaatatttttgcaaattgagataaggacagaaagattgagaaacattgtatattttgcaaaaacaagatgtttgtagctgtttcagagagagtacggtatatttatggtaattttatccactagcaaatcttgatttagtttgatagtgtgtggaattttattttgaaggataagaccatgggaaaattgtggtaaagactgtttgtacccttcatgaaataattctgaagttgccatcagttttactaatcttctgtgaaatgcatagatatgcgcatgttcaactttttattgtggtcttataattaaatgtaaaattgaaaattcatttgctgtttcaaagtgtgatatctttcacaatagcctttttatagtcagtaattcagaataatcaagttcatatggataaatgcatttttatttcctatttctttagggagtgctacaaatgtttgtcacttaaatttcaagtttctgttttaatagttaactgactatagattgttttctatgccatgtatgtgccacttctgagagtagtaaatgactctttgctacattttaaaagcaattgtattagtaagaactttgtaaataaatacctaaaacccaagtgta

SEQ ID NO: 1486 - DNA, 637 bp, Homo sapiens
  source 1..637: mol_type = genomic DNA
aggcttcccggatccgggaactccctcgccgcaccccacccccagcagccgggccctgacgcggagtgggagaccgaagcccccagtattgctgggcatcttcgccctcacctgttggctcttttggacagaagagtctgatttagaagaatacaaatcatggctgaaaatagtgtattaacatccactactgggaggactagcttggcagactcttccatttttgattctaaagttactgagatttccaaggaaaacttacttattggatctacttcatatgtagaagaagagatgcctcagattgaaacaagagtgatattggttcaagaagctggaaaacaagaagaacttataaaagccttaaaggacattaaagtgggctttgtaaagatggagtcagtggaagaatttgaaggtttggattctccggaatttgaaaatgtatttgtagtcacggactttcaggattctgtctttaatgacctctacaaggctgattgtagagttattggaccaccagttgtattaaattgttcacaaaaaggagagcctttgccattttcatgtcgcccgttgtattgtacaagtatgatgaatctagtactatgctttactggatttaggaaaaaagaag

SEQ ID NO: 1487 - DNA, 4363 bp, Homo sapiens
  source 1..4363: mol_type = genomic DNA
aatcggcatggctcttagagagagcagcttagtttttgaatcggttgtggcggccgccggcgaggaatggcggtatttgtgagaggagtcggcgtttgaagaggtggaactcctagggcttttttgagagtgacggagtctacctcttgttacctagactggagtgcagtggcacgatctcggctcactgcaacctctgcctcccgggttcaagcgattctcctgcctcagcctcctgagtagctgggattacaggtgcctgccaccaagcccagctaatttttgtatttttagtagagacggggtttcattgtgttggccaggctggtctcgaactcctgacctcgtgatccgcccgccttggcctcccaaagtgctaggattacaagtgtgagccaccgcgtccggcctttcaaatggtatttttgattttcctcttccagtccttaaagcagctgatttagaagaatacaaatcatggctgaaaatagtgtattaacatccactactgggaggactagcttggcagactcttccatttttgattctaaagttactgagatttccaaggaaaacttacttattggatctacttcatatgtagaagagatgcctcagattgaaacaagagtgatattggttcaagaagctggaaaacaagaagaacttataaaagccttaaaggacattaaagtgggctttgtaaagatggagtcagtggaagaatttgaaggtttggattctccggaatttgaaaatgtatttgtagtcacggactttcaggattctgtctttaatgacctctacaaggctgattgtagagttattggaccaccagttgtattaaattgttcacaaaaaggagagcctttgccattttcatgtcgcccgttgtattgtacaagtatgatgaatctagtactatgctttactggatttaggaaaaaagaagaactagtcaggttggtgacattggtccatcacatgggtggagttattcgaaaagactttaattcaaaagttacacatttggtggcaaattgtacacaaggagaaaaattcagggttgctgtgagtctaggtactccaattatgaagccagaatggatttataaagcttgggaaaggcggaatgaacaggatttctatgcagcagttgatgactttagaaatgaatttaaagttcctccatttcaagattgtattttaagtttcctgggattttcagatgaagagaaaaccaatatggaagaaatgactgaaatgcaaggaggtaaatatttaccgcttggagatgaaagatgcactcaccttgtagttgaagagaatatagtaaaagatcttccctttgaaccttcaaagaaactttatgttgtcaagcaagagtggttctggggaagcattcaaatggatgcccgagctggagaaactatgtatttatatgaaaaggcaaatactcctgagctcaagaaatcagtgtcaatgctttctctaaatacccctaacagcaatcgcaaacgacgtcgtttaaaagaaacacttgctcagctttcaagagagacagacgtgtcaccatttccaccccgtaagcgcccatcagctgagcattccctttccatagggtcactcctagatatctccaacacaccagagtctagcattaactatggagacaccccaaagtcttgtactaagtcttctaaaagctccactccagttccttcaaagcagtcagcaaggtggcaagttgcaaaagagctttatcaaactgaaagtaattatgttaatatattggcaacaattattcagttatttcaagtaccattggaagaggaaggacaacgtggtggacctatccttgcaccagaggagattaagactatttttggtagcatcccagatatctttgatgtacacactaagataaaggatgatcttgaagaccttatagttaattgggatgagagcaaaagcattggtgacatttttctgaaatattcaaaagatttggtaaaaacctaccctccctttgtaaacttctttgaaatgagcaaggaaacaattattaaatgtgaaaaacagaaaccaagatttcatgcttttctcaagataaaccaagcaaaaccagaatgtggacggcagagccttgttgaacttcttatccgaccagtacagaggttacccagtgttgcattacttttaaatgatcttaagaagcatacagctgatgaaaatccagacaaaagcactttagaaaaagctattggatcactgaaggaagtaatgacgcatattaatgaggataagagaaaaacagaagctcaaaagcaaatttttgatgttgtttatgaagtagatggatgcccagctaatcttttatcttctcaccgaagcttagtacagcgggttgaaacaatttctctaggtgagcacccctgtgacagaggagaacaagtaactctcttcctcttcaatgattgcctagagatagcaagaaaacggcacaaggttattggcacttttaggagtcctcatggccaaacccgacccccagcttctcttaagcatattcacctaatgcctctttctcagattaagaaggtattggacataagagagacagaagattgccataatgcttttgccttgcttgtgaggccaccaacagagcaggcaaatgtgctactcagtttccagatgacatcagatgaacttccaaaagaaaactggctaaagatgctgtgtcgacatgtagctaacaccatttgtaaagcagatgctgagaatcttatttatactgctgatccagaatcctttgaagtaaatacaaaagatatggacagtacattgagtagagcatcaagagcaataaaaaagacttcaaaaaaggttacaagagcattctctttctccaaaactccaaaaagagctcttcgaagggctcttatgacatcccacggctcagtggagggaagaagtccttccagcaatgataagcatgtaatgagtcgtctttctagcacatcatcattagcaggtatcccttctccctcccttgtcagccttccttccttctttgaaaggagaagtcatacgttaagtagatctacaactcatttgatatgaagcgttaccaaaatcttaaattatagaaatgtatagacacctcatactcaaataagaaactgacttaaatggtacttgtaattagcacttggtgaaagctggaaggaagataaataacactaaactatgctatttgatttttcttcttgaaagagtaaggtttacctgttacattttcaagttaattcatgtaaaaaatgatagtgattttgatgtaatttatctcttgtttgaatctgtcattcaaaggccaataatttaagttgctatcagctgatattagtagctttgcaaccctgatagagtaaataaattttatgggcgggtgccaaatactgctgtgaatctatttgtatagtatccatgaatgaatttatggaaatagatatttgtgcagctcaatttatgcagagattaaatgacatcataatactggatgaaaacttgcatagaattctgattaaatagtgggtctgtttcacatgtgcagtttgaagtatttaaataaccactcctttcacagtttattttcttctcaagcgttttcaagatctagcatgtggattttaaaagatttgccctcattaacaagaataacatttaaaggagattgtttcaaaatatttttgcaaattgagataaggacagaaagattgagaaacattgtatattttgcaaaaacaagatgtttgtagctgtttcagagagagtacggtatatttatggtaattttatccactagcaaatcttgatttagtttgatagtgtgtggaattttattttgaaggataagaccatgggaaaattgtggtaaagactgtttgtacccttcatgaaataattctgaagttgccatcagttttactaatcttctgtgaaatgcatagatatgcgcatgttcaactttttattgtggtcttataattaaatgtaaaattgaaaattcatttgctgtttcaaagtgtgatatctttcacaatagcctttttatagtcagtaattcagaataatcaagttcatatggataaatgcatttttatttcctatttctttagggagtgctacaaatgtttgtcacttaaatttcaagtttctgttttaatagttaactgactatagattgttttctatgccatgtatgtgccacttctgagagtagtaaatgactctttgctacattttaaaagcaattgtattagtaagaactttgtaaataaatacctaaaacccaagtgta

SEQ ID NO: 1488 - DNA, 560 bp, Homo sapiens
  source 1..560: mol_type = genomic DNA
gaatcggttgtggcggccgccggcgaggaatggcggtatttgtgagaggagtcggcgtttgaagaggtggaactcctagggcttttttgagagtgacggagtctacctcttgttacctagactggagtgcagtggcacgatctcggctcactgcaacctctgcctcccgggttcaagcgattctcctgcctcagcctcctgagtagctgggattacagctgatttagaagaatacaaatcatggctgaaaatagtgtattaacatccactactgggaggactagcttggcagactcttccatttttgattctaaagttactgagatttccaaggaaaacttacttattggatctacttcatatgtagaagaagagatgcctcagattgaaacaagagtgatattggttcaagaagctggaaaacaagaagaacttataaaagccttaaaggacattaaagtgggctttgtaaagatggagtcagtggaagaatttgaaggtttggattctccggaatttgaaaatgtatttgtagtcacggactttcaggattctgtctt

SEQ ID NO: 1489 - DNA, 2941 bp, Homo sapiens
  source 1..2941: mol_type = genomic DNA
gccaatcggcatggctcttagagagagcagcttagtttttgaatcggttgtggcggccgccggcgaggaatggcggtatttgtgagaggagtcggcgtttgaagaggtggaactcctagggcttttttgagagtgctgatttagaagaatacaaatcatggctgaaaatagtgtattaacatccactactgggaggactagcttggcagactcttccatttttgattctaaagttactgagatttccaaggaaaacttacttattggatctacttcatatgtagaagaagagatgcctcagattgaaacaagagtgatattggttcaagaagctggaaaacaagaagaacttataaaagccttaaaggacattaaagtgggctttgtaaagatggagtcagtggaagaatttgaaggtttggattctccggaatttgaaaatgtatttgtagtcacggactttcaggattctgtctttaatgacctctacaaggctgattgtagagttattggaccaccagttgtattaaattgttcacaaaaaggagagcctttgccattttcatgtcgcccgttgtattgtacaagtatgatgaatctagtactatgctttactggatttaggaaaaaagaagaactagtcaggttggtgacattggtccatcacatgggtggagttattcgaaaagactttaattcaaaagttacacatttggtggcaaattgtacacaaggagaaaaattcagggttgctgtgagtctaggtactccaattatgaagccagaatggatttataaagcttgggaaaggcggaatgaacaggatttctatgcagcagttgatgactttagaaatgaatttaaagttcctccatttcaagattgtattttaagtttcctgggattttcagatgaagagaaaaccaatatggaagaaatgactgaaatgcaaggaggtaaatatttaccgcttggagatgaaagatgcactcaccttgtagttgaagagaatatagtaaaagatcttccctttgaaccttcaaagaaactttatgttgtcaagcaagagtggttctggggaagcattcaaatggatgcccgagctggagaaactatgtatttatatgaaaaggcaaatactcctgagctcaagaaatcagtgtcaatgctttctctaaatacccctaacagcaatcgcaaacgacgtcgtttaaaagaaacacttgctcagctttcaagagagacagacgtgtcaccatttccaccccgtaagcgcccatcagctgagcattccctttccatagggtcactcctagatatctccaacacaccagagtctagcattaactatggagacaccccaaagtcttgtactaagtcttctaaaagctccactccagttccttcaaagcagtcagcaaggtggcaagttgcaaaagagctttatcaaactgaaagtaattatgttaatatattggcaacaattattcagttatttcaagtaccattggaagaggaaggacaacgtggtggacctatccttgcaccagaggagattaagactatttttggtagcatcccagatatctttgatgtacacactaagataaaggatgatcttgaagaccttatagttaattgggatgagagcaaaagcattggtgacatttttctgaaatattcaaaagatttggtaaaaacctaccctccctttgtaaacttctttgaaatgagcaaggaaacaattattaaatgtgaaaaacagaaaccaagatttcatgcttttctcaagataaaccaagcaaaaccagaatgtggacggcagagccttgttgaacttcttatccgaccagtacagaggttacccagtgttgcattacttttaaatgatcttaagaagcatacagctgatgaaaatccagacaaaagcactttagaaaaagctattggatcactgaaggaagtaatgacgcatattaatgaggataagagaaaaacagaagctcaaaagcaaatttttgatgttgtttatgaagtagatggatgcccagctaatcttttatcttctcaccgaagcttagtacagcgggttgaaacaatttctctaggtgagcacccctgtgacagaggagaacaagtaactctcttcctcttcaatgattgcctagagatagcaagaaaacggcacaaggttattggcacttttaggagtcctcatggccaaacccgacccccagcttctcttaagcatattcacctaatgcctctttctcagattaagaaggtattggacataagagagacagaagattgccataatgcttttgccttgcttgtgaggccaccaacagagcaggcaaatgtgctactcagtttccagatgacatcagatgaacttccaaaagaaaactggctaaagatgctgtgtcgacatgtagctaacaccatttgtaaagcagatgctgagaatcttatttatactgctgatccagaatcctttgaagtaaatacaaaagatatggacagtacattgagtagagcatcaagagcaataaaaaagacttcaaaaaaggttacaagagcattctctttctccaaaactccaaaaagagctcttcgaagggctcttatgacatcccacggctcagtggagggaagaagtccttccagcaatgataagcatgtaatgagtcgtctttctagcacatcatcattagcaattacccattctgtttccacaagcaatgtaattggatttactaagcatgtttatgttcagcgcctaaactctactggtgggcgctctcagtactcctggtttcaatctgtacgtcattctgctttccgagctagtttttcagagatactagaaggaaatactgatttttcaaatttcaaaaaagttctttccaagtcatctttgacatttgtgaagaattag

SEQ ID NO: 1490 - DNA, 2825 bp, Homo sapiens
  source 1..2825: mol_type = genomic DNA
ttttgcccaatgaccatgtttatgtatttttattcaaattttattttttcagctgatttagaagaatacaaatcatggctgaaaatagtgtattaacatccactactgggaggactagcttggcagactcttccatttttgattctaaagttactgagatttccaaggaaaacttacttattggatctacttcatatgtagaagaagagatgcctcagattgaaacaagagtgatattggttcaagaagctggaaaacaagaagaacttataaaagccttaaaggacattaaagtgggctttgtaaagatggagtcagtggaagaatttgaaggtttggattctccggaatttgaaaatgtatttgtagtcacggactttcaggattctgtctttaatgacctctacaaggctgattgtagagttattggaccaccagttgtattaaattgttcacaaaaaggagagcctttgccattttcatgtcgcccgttgtattgtacaagtatgatgaatctagtactatgctttactggatttaggaaaaaagaagaactagtcaggttggtgacattggtccatcacatgggtggagttattcgaaaagactttaattcaaaagttacacatttggtggcaaattgtacacaaggagaaaaattcagggttgctgtgagtctaggtactccaattatgaagccagaatggatttataaagcttgggaaaggcggaatgaacaggatttctatgcagcagttgatgactttagaaatgaatttaaagttcctccatttcaagattgtattttaagtttcctgggattttcagatgaagagaaaaccaatatggaagaaatgactgaaatgcaaggaggtaaatatttaccgcttggagatgaaagatgcactcaccttgtagttgaagagaatatagtaaaagatcttccctttgaaccttcaaagaaactttatgttgtcaagcaagagtggttctggggaagcattcaaatggatgcccgagctggagaaactatgtatttatatgaaaaggcaaatactcctgagctcaagaaatcagtgtcaatgctttctctaaatacccctaacagcaatcgcaaacgacgtcgtttaaaagaaacacttgctcagctttcaagagagacagacgtgtcaccatttccaccccgtaagcgcccatcagctgagcattccctttccatagggtcactcctagatatctccaacacaccagagtctagcattaactatggagacaccccaaagtcttgtactaagtcttctaaaagctccactccagttccttcaaagcagtcagcaaggtggcaagttgcaaaagagctttatcaaactgaaagtaattatgttaatatattggcaacaattattcagttatttcaagtaccattggaagaggaaggacaacgtggtggacctatccttgcaccagaggagattaagactatttttggtagcatcccagatatctttgatgtacacactaagataaaggatgatcttgaagaccttatagttaattgggatgagagcaaaagcattggtgacatttttctgaaatattcaaaagatttggtaaaaacctaccctccctttgtaaacttctttgaaatgagcaaggaaacaattattaaatgtgaaaaacagaaaccaagatttcatgcttttctcaagataaaccaagcaaaaccagaatgtggacggcagagccttgttgaacttcttatccgaccagtacagaggttacccagtgttgcattacttttaaatgatcttaagaagcatacagctgatgaaaatccagacaaaagcactttagaaaaagctattggatcactgaaggaagtaatgacgcatattaatgaggataagagaaaaacagaagctcaaaagcaaatttttgatgttgtttatgaagtagatggatgcccagctaatcttttatcttctcaccgaagcttagtacagcgggttgaaacaatttctctaggtgagcacccctgtgacagaggagaacaagtaactctcttcctcttcaatgattgcctagagatagcaagaaaacggcacaaggttattggcacttttaggagtcctcatggccaaacccgacccccagcttctcttaagcatattcacctaatgcctctttctcagattaagaaggtattggacataagagagacagaagattgccataatgcttttgccttgcttgtgaggccaccaacagagcaggcaaatgtgctactcagtttccagatgacatcagatgaacttccaaaagaaaactggctaaagatgctgtgtcgacatgtagctaacaccatttgtaaagcagatgctgagaatcttatttatactgctgatccagaatcctttgaagtaaatacaaaagatatggacagtacattgagtagagcatcaagagcaataaaaaagacttcaaaaaaggttacaagagcattctctttctccaaaactccaaaaagagctcttcgaagggctcttatgacatcccacggctcagtggagggaagaagtccttccagcaatgataagcatgtaatgagtcgtctttctagcacatcatcattagcaggtatcccttctccctcccttgtcagccttccttccttctttgaaaggagaagtcatacgttaagtagatctacaactcatttgatatgaagcgttaccaaaatcttaaattatagaaatgtatagacacctcatactcaaataagaaactgacttaaatggtacttgtaattagcacttggtgaaagc

SEQ ID NO: 1491 - DNA, 2745 bp, Homo sapiens
  source 1..2745: mol_type = genomic DNA
atggctgaaaatagtgtattaacatccactactgggaggactagcttggcagactcttccatttttgattctaaagttactgagatttccaaggaaaacttacttattggatctacttcatatgtagaagaagagatgcctcagattgaaacaagagtgatattggttcaagaagctggaaaacaagaagaacttataaaagccttaaagactattaaaataatggaagtccctgttataaagataaaagaaagttgtcctggaaaatcggatgaaaaattaataaaaagtgttattaatatggacattaaagtgggctttgtaaagatggagtcagtggaagaatttgaaggtttggattctccggaatttgaaaatgtatttgtagtcacggactttcaggattctgtctttaatgacctctacaaggctgattgtagagttattggaccaccagttgtattaaattgttcacaaaaaggagagcctttgccattttcatgtcgcccgttgtattgtacaagtatgatgaatctagtactatgctttactggatttaggaaaaaagaagaactagtcaggttggtgacattggtccatcacatgggtggagttattcgaaaagactttaattcaaaagttacacatttggtggcaaattgtacacaaggagaaaaattcagggttgctgtgagtctaggtactccaattatgaagccagaatggatttataaagcttgggaaaggcggaatgaacaggatttctatgcagcagttgatgactttagaaatgaatttaaagttcctccatttcaagattgtattttaagtttcctgggattttcagatgaagagaaaaccaatatggaagaaatgactgaaatgcaaggaggtaaatatttaccgcttggagatgaaagatgcactcaccttgtagttgaagagaatatagtaaaagatcttccctttgaaccttcaaagaaactttatgttgtcaagcaagagtggttctggggaagcattcaaatggatgcccgagctggagaaactatgtatttatatgaaaaggcaaatactcctgagctcaagaaatcagtgtcaatgctttctctaaatacccctaacagcaatcgcaaacgacgtcgtttaaaagaaacacttgctcagctttcaagagagacagacgtgtcaccatttccaccccgtaagcgcccatcagctgagcattccctttccatagggtcactcctagatatctccaacacaccagagtctagcattaactatggagacaccccaaagtcttgtactaagtcttctaaaagctccactccagttccttcaaagcagtcagcaaggtggcaagttgcaaaagagctttatcaaactgaaagtaattatgttaatatattggcaacaattattcagttatttcaagtaccattggaagaggaaggacaacgtggtggacctatccttgcaccagaggagattaagactatttttggtagcatcccagatatctttgatgtacacactaagataaaggatgatcttgaagaccttatagttaattgggatgagagcaaaagcattggtgacatttttctgaaatattcaaaagatttggtaaaaacctaccctccctttgtaaacttctttgaaatgagcaaggaaacaattattaaatgtgaaaaacagaaaccaagatttcatgcttttctcaagataaaccaagcaaaaccagaatgtggacggcagagccttgttgaacttcttatccgaccagtacagaggttacccagtgttgcattacttttaaatgatcttaagaagcatacagctgatgaaaatccagacaaaagcactttagaaaaagctattggatcactgaaggaagtaatgacgcatattaatgaggataagagaaaaacagaagctcaaaagcaaatttttgatgttgtttatgaagtagatggatgcccagctaatcttttatcttctcaccgaagcttagtacagcgggttgaaacaatttctctaggtgagcacccctgtgacagaggagaacaagtaactctcttcctcttcaatgattgcctagagatagcaagaaaacggcacaaggttattggcacttttaggagtcctcatggccaaacccgacccccagcttctcttaagcatattcacctaatgcctctttctcagattaagaaggtattggacataagagagacagaagattgccataatgcttttgccttgcttgtgaggccaccaacagagcaggcaaatgtgctactcagtttccagatgacatcagatgaacttccaaaagaaaactggctaaagatgctgtgtcgacatgtagctaacaccatttgtaaagcagatgctgagaatcttatttatactgctgatccagaatcctttgaagtaaatacaaaagatatggacagtacattgagtagagcatcaagagcaataaaaaagacttcaaaaaaggttacaagagcattctctttctccaaaactccaaaaagagctcttcgaagggctcttatgacatcccacggctcagtggagggaagaagtccttccagcaatgataagcatgtaatgagtcgtctttctagcacatcatcattagcaggtatcccttctccctcccttgtcagccttccttccttctttgaaaggagaagtcatacgttaagtagatctacaactcatttgatatga

SEQ ID NO: 1492 - DNA, 3104 bp, Homo sapiens
  source 1..3104: mol_type = genomic DNA
acggcggtccggtgcgaggcagagtgctagcgggagcgcgagccagcaagaggcgcctgcgcgatgtccgggcccctgagcccgcggcgctgagccagccgggacggacatgcgcgggagggcgccgcggggcagccgccgctcctccgggggaatgaaagctactggttgattttaaagtgcctgggcctcacaggtttggagatgtcccagaataaggcacaatgtcaatagcaggagttgctgctcaggagatcagagtcccattaaaaactggatttctacataatggccgagccatggggaatatgaggaagacctactggagcagtcgcagtgagtttaaaaacaactttttaaatattgacccgataaccatggcctacagtctgaactcttctgctcaggagcgcctaataccacttgggcatgcttccaaatctgctccgatgaatggccactgctttgcagaaaatggtccatctcaaaagtccagcttgccccctcttcttattcccccaagtgaaaacttgggaccacatgaagaggatcaagttgtatgtggttttaagaaactcacagtgaatggggtttgtgcttccacccctccactgacacccataaaaaactccccttcccttttcccctgtgcccctctttgtgaacggggttctaggcctcttccaccgttgccaatctctgaagccctctctctggatgacacagactgtgaggtggaattcctaactagctcagatacagacttccttttagaagactctacactttctgatttcaaatatgatgttcctggcaggcgaagcttccgtgggtgtggacaaatcaactatgcatattttgataccccagctgtttctgcagcagatctcagctatgtgtctgaccaaaatggaggtgtcccagatccaaatcctcctccacctcagacccaccgaagattaagaaggtctcattcgggaccagctggctcctttaacaagccagccataaggatatccaactgttgtatacacagagcttctcctaactccgatgaagacaaacctgaggttccccccagagttcccatacctcctagaccagtaaagccagattatagaagatggtcagcagaagttacttcgagcacctatagtgatgaagacaggcctcccaaagtaccgccaagagaacctttgtcaccgagtaactcgcgcacaccgagtcccaaaagccttccgtcttacctcaatggggtcatgcccccgacacagagctttgcccctgatcccaagtatgtcagcagcaaagcactgcaaagacagaacagcgaaggatctgccagtaaggttccttgcattctgcccattattgaaaatgggaagaaggttagttcaacacattattacctactacctgaacgaccaccatacctggacaaatatgaaaaattttttagggaagcagaagaaacaaatggaggcgcccaaatccagccattacctgctgactgcggtatatcttcagccacagaaaagccagactcaaaaacaaaaatggatctgggtggccacgtgaagcgtaaacatttatcctatgtggtttctccttagaccttggggtcatggttcagcagaggttacataggagcaaatggttctcaattttccagtttgattgaagtgcagagaaaaatcccttagattgcaaaataaaatagttgaactctctgtcttcatgtggaaggtttagagcagttgtgagatgctgttatgctgagaaaccctgactttgttagtgttggaaaaaagtcttacaagtctataatttaaagatgtgatggtggggaggggaggatggggaagctttttatatatgcatacattacatacctatatataaacttgtggtataaccatagaccatagctgcaggttaaccaattagttactatcgtagagtaatatatattcagaataataaactcaagctggagaaatgagtcctgatagactgaaaattgagcaaatggaagaagatacagtattgtttagatcagaatcattaaaaaatatttttgtttagtaagtttgaagatttctggcttttaggccttttctattttgttccatttatttttgcaggcaatcttttccatggagggcagggtatccattctttaccatgggtgtacctgcttaggttaaaaatcataccaaggcctcatacttccaggtttcatgttgcgtcttgttgagggagggagagcaggttacttggcaaccatattgtcacctgtacctgtcacacatcttgaaaaataaaacgataatagaactagtgactaattttcccttacagttcctgcttggtcccacccactgaagtagctcatcgtagtgcgggccgtattagaggcagtggggtacgttagactcagatggaaaagtattctaggtgccagtgttaggatgtcagttttacaaaataatgaagcaattagctatgtgattgagagttattgtttggggatgtgtgttgtggttttgctttttttttttagactgtattaataaacatacaacacaagctggccttgtgttgctggttcctattcagtatttcctggggattgtttgctttttaagtaaaacacttctgacccatagctcagtatgtctgaattccagaggtcacatcagcatctttctgctttgaaaactctcacagctgtggctgcttcacttagatgcagtgagacacatagttggtgttccgattttcacatccttccatgtatttatcttgaagagataagcacagaagagaaggtgctcactaacagaggtacattactgcaatgttctcttaacagttaaacaagctgtttacagtttaaactgctgaatattatttgagctatttaaagcttattatattttagtatgaactaaatgaaggttaaaacatgcttaagaaaaatgcactgatttctgcattatgtgtacagtattggacaaaggattttattcattttgttgcattattttgaatattgtcttttcattttaataaagttataatacttatttatgataccatta

SEQ ID NO: 1493 - DNA, 2281 bp, Homo sapiens
  source 1..2281: mol_type = genomic DNA
aggagatctacttccgggccctgcgtggcagttgaaagagtggcgggagaagttgcagggaattatttgatagcacatactgatggctctaaagaagtcatcaccctcactggattctggtgatagtgactctgaggagttgccaacatttgcctttctgaagaaggaaccatcttcaacaaagaggagacagcctgaaagggaagagaagattgtagtggttgacatctcagattgtgaagcctcctgtcctccagcaccagagttattttcaccacctgtcccagaaatagctgaaactgtcacacaaacacagccagtcaggttgctaagcagtgaaagtgaagatgaagaagaatttattcctctggctcaaaggcttacatgtaagtttctgacccacaagcaactgagccctgaggactctagctccccagttaaaagtgttttggatcatcaaaataatgaaggtgcatcatgtgactggaaaaagccctttccaaagatccctgaagttcccctccatgataccccagagaggagtgcagcagataacaaggacctgatcttagatccatgctgtcagcttccagcctacctgtctacctgccctggccagagcagcagcttggcagtaaccaaaacaaattctgacatccttccaccccagaagaaaaccaagccgagtcagaaggtccagggaagaggctcacacggatgccggcagcagagacaagcaaggcagaaggaaagcaccctgagaagacaggaaagaaagaatgcagcactggttaccaggatgaaagcccagaggccagaggaatgcttaaaacacatcattgtagtgctggatccagtgctcttacagatggaaggtgggggccagctcctaggagcactgcagaccatggagtgccgctgtgtgattgaggcgcaggctgtgccttgcagtgtcacttggaggagaagggctgggccgtctgaggacagagaggactgggtggaggagccaacagtactggtgttgctccgggcagaggcatttgtgtccatgatcgacaatggaaagcagggaagcctggacagcactatgaaagggaaggaaacgcttcagggctttgtaactgacatcacagcaaagacagcagggaaagctctgtcactggtgattgtggatcaggagaaatgcttcagtgctcagaatcctccaagaagagggaaacagggagcaaataaacagaccaagaagcagcagcagagacaaccagaggccagcatagggtccatggtatccagggtagacgctgaagaggcattggtggatctgcagctacacacagaagcccaggctcaaattgtgcagagctggaaagagctggccgacttcacatgcgcattcacaaaggctgtggctgaggcgcccttcaagaagctccgagatgaaactaccttctccttctgtctggagagtgactgggctggaggggtgaaggtggaccttgctggcaggggactcgcactagtctggaggagacagattcagcagctgaaccgagtcagcctggaaatggccagtgcagttgtgaatgcctatccctccccacagctcctggtacaggcttatcagcagtgtttttcggataaagaacgccagaatttgctcgcagacatacaggtgcgccgtggggaaggtgtgacatccacttctcgccgcattggaccagaactatccaggcgtatctaccttcagatgaccactttacagccacatctctctttagatagtgctgactgattctagccctcagggatgaggatgaaaagctggaaacttccacttccccaacctcagagcctgactgtaatgaagagactggcagcacctcctggaacacaagcctaggtgaggcccagtctttcttgggtcttattatttgtgaaggtctctctgcctgtcggctggggcagagactgaaatactgccacctacctttggcatttaatgttcctctcctggcaaaaattcactgccacagacaaaccacccccactcctacccagccagccctcaaaacacaaaggaacaaagacagtccactcagacacttatttaataactgtagaaatccaaaagaattagcatcaaatcttgaagtcgtgagtgaagctgcgggttggcttgactgggctcagccactgagctgcctcaaccggccaaggaacgggattatgatgactatgcggacttctatattgtcttcatctcattgtgtgtattatg

SEQ ID NO: 1494 - DNA, 2354 bp, Homo sapiens
  source 1..2354: mol_type = genomic DNA
aggagatctacttccgggccctgcgtggcagttgaaagagtggcgggagaagttgcagggaattatttgatagcacatactgatggctctaaagaagtcatcaccctcactggattctggtgatagtgactctgaggagttgccaacatttgcctttctgaagaaggaaccatcttcaacaaagaggagacagcctgaaagggaagagaagattgtagtggttgacatctcagattgtgaagcctcctgtcctccagcaccagagttattttcaccacctgtcccagaaatagctgaaactgtcacacaaacacagccagtcaggttgctaagcagtgaaagtgaagatgaagaagaatttattcctctggctcaaaggcttacatgtaagtttctgacccacaagcaactgagccctgaggactctagctccccagttaaaagtgttttggatcatcaaaataatgaaggtgcatcatgtgactggaaaaagccctttccaaagatccctgaagttcccctccatgataccccagagaggagtgcagcagataacaaggacctgatcttagatccatgctgtcagcttccagcctacctgtctacctgccctggccagagcagcagcttggcagtaaccaaaacaaattctgacatccttccaccccagaagaaaaccaagccgagtcagaaggtccagggaagaggctcacacggatgccggcagcagagacaagcaaggcagaaggaaagcaccctgagaagacaggaaagaaagaatgcagcactggttaccaggatgaaagcccagaggccagaggaatgcttaaaacacatcattgtagtgctggatccagtgctcttacagatggaaggtgggggccagctcctaggagcactgcagaccatggagtgccgctgtgtgattgaggcgcaggctgtgccttgcagtgtcacttggaggagaagggctgggccgtctgaggacagagaggactgggtggaggagccaacagtactggtgttgctccgggcagaggcatttgtgtccatgatcgacaatggaaagcagggaagcctggacagcactatgaaagggaaggaaacgcttcagggctttgtaactgacatcacagcaaagacagcagggaaagctctgtcactggtgattgtggatcaggagaaatgcttcagcctggagctgctgttctttgatttcctcccctgcaccagtgctcagaatcctccaagaagagggaaacagggagcaaataaacagaccaagaagcagcagcagagacaaccagaggccagcatagggtccatggtatccagggtagacgctgaagaggcattggtggatctgcagctacacacagaagcccaggctcaaattgtgcagagctggaaagagctggccgacttcacatgcgcattcacaaaggctgtggctgaggcgcccttcaagaagctccgagatgaaactaccttctccttctgtctggagagtgactgggctggaggggtgaaggtggaccttgctggcaggggactcgcactagtctggaggagacagattcagcagctgaaccgagtcagcctggaaatggccagtgcagttgtgaatgcctatccctccccacagctcctggtacaggcttatcagcagtgtttttcggataaagaacgccagaatttgctcgcagacatacaggtgcgccgtggggaaggtgtgacatccacttctcgccgcattggaccagaactatccaggcgtatctaccttcagatgaccactttacagccacatctctctttagatagtgctgactgattctagccctcagggatgaggatgaaaagctggaaacttccacttccccaacctcagagcctgactgtaatgaagagactggcagcacctcctggaacacaagcctaggtgaggcccagtctttcttgggtcttattatttgtgaaggtctctctgcctgtcggctggggcagagactgaaatactgccacctacctttggcatttaatgttcctctcctggcaaaaattcactgccacagacaaaccacccccactcctacccagccagccctcaaaacacaaaggaacaaagacagtccactcagacacttatttaataactgtagaaatccaaaagaattagcatcaaatcttgaagtcgtgagtgaagctgcgggttggcttgactgggctcagccactgagctgcctcaaccggccaaggaacgggattatgatgactatgcggacttctatattgtcttcatctcattgtgtgtattatgtatttagtttcaataaagcatttgtaccaatggc

SEQ ID NO: 1495 - DNA, 2296 bp, Homo sapiens
  source 1..2296: mol_type = genomic DNA
ggaattatttgatagcacatactgatggctctaaagaagtcatcaccctcactggattctggtgatagtgactctgaggagttgccaacatttgcctttctgaagaaggaaccatcttcaacaaagaggagacagcctgaaagggaagagaagattgtagtggttgacatctcagattgtgaagcctcctgtcctccagcaccagagttattttcaccacctgtcccagaaatagctgaaactgtcacacaaacacagccagtcaggttgctaagcagtgaaagtgaagatgaagaagaatttattcctctggctcaaaggcttacatgtaagtttctgacccacaagcaactgagccctgaggactctagctccccagttaaaagtgttttggatcatcaaaataatgaaggtgcatcatgtgactggaaaaagccctttccaaagatccctgaagttcccctccatgataccccagagaggagtgcagcagataacaaggacctgatcttagatccatgctgtcagcttccagcctacctgtctacctgccctggccagagcagcagcttggcagtaaccaaaacaaattctgacatccttccaccccagaagaaaaccaagccgagtcagaaggtccagggaagaggctcacacggatgccggcagcagagacaagcaaggcagaaggaaagcaccctgagaagacaggaaagaaagaatgcagcactggttaccaggatgaaagcccagaggccagaggaatgcttaaaacacatcattgtagtgctggatccagtgctcttacagatggaaggtgggggccagctcctaggagcactgcagaccatggagtgccgctgtgtgattgaggcgcaggctgtgccttgcagtgtcacttggaggagaagggctgggccgtctgaggacagagaggactgggtggaggagccaacagtactggtgttgctccgggcagaggcatttgtgtccatgatcgacaatggaaagcagggaagcctggacagcactatgaaagggaaggaaacgcttcagggctttgtaactgacatcacagcaaagacagcagggaaagctctgtcactggtgattgtggatcaggagaaatgcttcagcctggagctgctgttctttgatttcctcccctgcaccagtgctcagaatcctccaagaagagggaaacagggagcaaataaacagaccaagaagcagcagcagagacaaccagaggccagcatagggtccatggtatccagggtagacgctgaagaggcattggtggatctgcagctacacacagaagcccaggctcaaattgtgcagagctggaaagagctggccgacttcacatgcgcattcacaaaggctgtggctgaggcgcccttcaagaagctccgagatgaaactaccttctccttctgtctggagagtgactgggctggaggggtgaaggtggaccttgctggcaggggactcgcactagtctggaggagacagattcagcagctgaaccgagtcagcctggaaatggccagtgcagttgtgaatgcctatccctccccacagctcctggtacaggcttatcagcagtgtttttcggataaagaacgccagaatttgctcgcagacatacaggtgcgccgtggggaaggtgtgacatccacttctcgccgcattggaccagaactatccaggcgtatctaccttcagatgaccactttacagccacatctctctttagatagtgctgactgattctagccctcagggatgaggatgaaaagctggaaacttccacttccccaacctcagagcctgactgtaatgaagagactggcagcacctcctggaacacaagcctaggtgaggcccagtctttcttgggtcttattatttgtgaaggtctctctgcctgtcggctggggcagagactgaaatactgccacctacctttggcatttaatgttcctctcctggcaaaaattcactgccacagacaaaccacccccactcctacccagccagccctcaaaacacaaaggaacaaagacagtccactcagacacttatttaataactgtagaaatccaaaagaattagcatcaaatcttgaagtcgtgagtgaagctgcgggttggcttgactgggctcagccactgagctgcctcaaccggccaaggaacgggattatgatgactatgcggacttctatattgtcttcatctcattgtgtgtattatgtatttagtttcaataaagcatttgtaccaatggc

SEQ ID NO: 1496 - DNA, 6455 bp, Homo sapiens
  source 1..6455: mol_type = genomic DNA
gagttgtgcctggagtgatgtttaagccaatgtcagggcaaggcaacagtccctggccgtcctccagcacctttgtaatgcatatgagctcgggagaccagtacttaaagttggaggcccgggagcccaggagctggcggagggcgttcgtcctgggactgcacttgctcccgtcgggtcgcccggcttcaccggacccgcaggctcccggggcagggccggggccagagctcgcgtgtcggcgggacatgcgctgcgtcgcctctaacctcgggctgtgctctttttccaggtggcccgccggtttctgagccttctgccctgcggggacacggtctgcaccctgcccgcggccacggaccatgaccatgaccctccacaccaaagcatctgggatggccctactgcatcagatccaagggaacgagctggagcccctgaaccgtccgcagctcaagatccccctggagcggcccctgggcgaggtgtacctggacagcagcaagcccgccgtgtacaactaccccgagggcgccgcctacgagttcaacgccgcggccgccgccaacgcgcaggtctacggtcagaccggcctcccctacggccccgggtctgaggctgcggcgttcggctccaacggcctggggggtttccccccactcaacagcgtgtctccgagcccgctgatgctactgcacccgccgccgcagctgtcgcctttcctgcagccccacggccagcaggtgccctactacctggagaacgagcccagcggctacacggtgcgcgaggccggcccgccggcattctacaggccaaattcagataatcgacgccagggtggcagagaaagattggccagtaccaatgacaagggaagtatggctatggaatctgccaaggagactcgctactgtgcagtgtgcaatgactatgcttcaggctaccattatggagtctggtcctgtgagggctgcaaggccttcttcaagagaagtattcaaggacataacgactatatgtgtccagccaccaaccagtgcaccattgataaaaacaggaggaagagctgccaggcctgccggctccgtaaatgctacgaagtgggaatgatgaaaggtgggatacgaaaagaccgaagaggagggagaatgttgaaacacaagcgccagagagatgatggggagggcaggggtgaagtggggtctgctggagacatgagagctgccaacctttggccaagcccgctcatgatcaaacgctctaagaagaacagcctggccttgtccctgacggccgaccagatggtcagtgccttgttggatgctgagcccccgatactctattccgagtatgatcctaccagacccttcagtgaagcttcgatgatgggcttactgaccaacctggcagacagggagctggttcacatgatcaactgggcgaagagggtgccaggctttgtggatttgaccctccatgatcaggtccaccttctagaatgtgcctggctagagatcctgatgattggtctcgtctggcgctccatggagcacccagggaagctactgtttgctcctaacttgctcttggacaggaaccagggaaaatgtgtagagggcatggtggagatcttcgacatgctgctggctacatcatctcggttccgcatgatgaatctgcagggagaggagtttgtgtgcctcaaatctattattttgcttaattctggagtgtacacatttctgtccagcaccctgaagtctctggaagagaaggaccatatccaccgagtcctggacaagatcacagacactttgatccacctgatggccaaggcaggcctgaccctgcagcagcagcaccagcggctggcccagctcctcctcatcctctcccacatcaggcacatgagtaacaaaggcatggagcatctgtacagcatgaagtgcaagaacgtggtgcccctctatgacctgctgctggagatgctggacgcccaccgcctacatgcgcccactagccgtggaggggcatccgtggaggagacggaccaaagccacttggccactgcgggctctacttcatcgcattccttgcaaaagtattacatcacgggggaggcagagggtttccctgccacggtctgagagctccctggctcccacacggttcagataatccctgctgcattttaccctcatcatgcaccactttagccaaattctgtctcctgcatacactccggcatgcatccaacaccaatggctttctagatgagtggccattcatttgcttgctcagttcttagtggcacatcttctgtcttctgttgggaacagccaaagggattccaaggctaaatctttgtaacagctctctttcccccttgctatgttactaagcgtgaggattcccgtagctcttcacagctgaactcagtctatgggttggggctcagataactctgtgcatttaagctacttgtagagacccaggcctggagagtagacattttgcctctgataagcactttttaaatggctctaagaataagccacagcaaagaatttaaagtggctcctttaattggtgacttggagaaagctaggtcaagggtttattatagcaccctcttgtattcctatggcaatgcatccttttatgaaagtggtacaccttaaagcttttatatgactgtagcagagtatctggtgattgtcaattcattccccctataggaatacaaggggcacacagggaaggcagatcccctagttggcaagactattttaacttgatacactgcagattcagatgtgctgaaagctctgcctctggctttccggtcatgggttccagttaattcatgcctcccatggacctatggagagcagcaagttgatcttagttaagtctccctatatgagggataagttcctgatttttgtttttatttttgtgttacaaaagaaagccctccctccctgaacttgcagtaaggtcagcttcaggacctgttccagtgggcactgtacttggatcttcccggcgtgtgtgtgccttacacaggggtgaactgttcactgtggtgatgcatgatgagggtaaatggtagttgaaaggagcaggggccctggtgttgcatttagccctggggcatggagctgaacagtacttgtgcaggattgttgtggctactagagaacaagagggaaagtagggcagaaactggatacagttctgaggcacagccagacttgctcagggtggccctgccacaggctgcagctacctaggaacattccttgcagaccccgcattgccctttgggggtgccctgggatccctggggtagtccagctcttcttcatttcccagcgtggccctggttggaagaagcagctgtcacagctgctgtagacagctgtgttcctacaattggcccagcaccctggggcacgggagaagggtggggaccgttgctgtcactactcaggctgactggggcctggtcagattacgtatgcccttggtggtttagagataatccaaaatcagggtttggtttggggaagaaaatcctcccccttcctcccccgccccgttccctaccgcctccactcctgccagctcatttccttcaatttcctttgacctataggctaaaaaagaaaggctcattccagccacagggcagccttccctgggcctttgcttctctagcacaattatgggttacttcctttttcttaacaaaaaagaatgtttgatttcctctgggtgaccttattgtctgtaattgaaaccctattgagaggtgatgtctgtgttagccaatgacccaggtgagctgctcgggcttctcttggtatgtcttgtttggaaaagtggatttcattcatttctgattgtccagttaagtgatcaccaaaggactgagaatctgggagggcaaaaaaaaaaaaaaagtttttatgtgcacttaaatttggggacaattttatgtatctgtgttaaggatatgtttaagaacataattcttttgttgctgtttgtttaagaagcaccttagtttgtttaagaagcaccttatatagtataatatatatttttttgaaattacattgcttgtttatcagacaattgaatgtagtaattctgttctggatttaatttgactgggttaacatgcaaaaaccaaggaaaaatatttagtttttttttttttttttgtatacttttcaagctaccttgtcatgtatacagtcatttatgcctaaagcctggtgattattcatttaaatgaagatcacatttcatatcaacttttgtatccacagtagacaaaatagcactaatccagatgcctattgttggatactgaatgacagacaatcttatgtagcaaagattatgcctgaaaaggaaaattattcagggcagctaattttgcttttaccaaaatatcagtagtaatatttttggacagtagctaatgggtcagtgggttctttttaatgtttatacttagattttcttttaaaaaaattaaaataaaacaaaaaaaaatttctaggactagacgatgtaataccagctaaagccaaacaattatacagtggaaggttttacattattcatccaatgtgtttctattcatgttaagatactactacatttgaagtgggcagagaacatcagatgattgaaatgttcgcccaggggtctccagcaactttggaaatctctttgtatttttacttgaagtgccactaatggacagcagatattttctggctgatgttggtattgggtgtaggaacatgatttaaaaaaaaactcttgcctctgctttcccccactctgaggcaagttaaaatgtaaaagatgtgatttatctggggggctcaggtatggtggggaagtggattcaggaatctggggaatggcaaatatattaagaagagtattgaaagtatttggaggaaaatggttaattctgggtgtgcaccagggttcagtagagtccacttctgccctggagaccacaaatcaactagctccatttacagccatttctaaaatggcagcttcagttctagagaagaaagaacaacatcagcagtaaagtccatggaatagctagtggtctgtgtttcttttcgccattgcctagcttgccgtaatgattctataatgccatcatgcagcaattatgagaggctaggtcatccaaagagaagaccctatcaatgtaggttgcaaaatctaacccctaaggaagtgcagtctttgatttgatttccctagtaaccttgcagatatgtttaaccaagccatagcccatgccttttgagggctgaacaaataagggacttactgataatttacttttgatcacattaaggtgttctcaccttgaaatcttatacactgaaatggccattgatttaggccactggcttagagtactccttcccctgcatgacactgattacaaatactttcctattcatactttccaattatgagatggactgtgggtactgggagtgatcactaacaccatagtaatgtctaatattcacaggcagatctgcttggggaagctagttatgtgaaaggcaaatagagtcatacagtagctcaaaaggcaaccataattctctttggtgcaggtcttgggagcgtgatctagattacactgcaccattcccaagttaatcccctgaaaacttactctcaactggagcaaatgaactttggtcccaaatatccatcttttcagtagcgttaattatgctctgtttccaactgcatttcctttccaattgaattaaagtgtggcctcgtttttagtcatttaaaattgttttctaagtaattgctgcctctattatggcacttcaattttgcactgtcttttgagattcaagaaaaatttctattcttttttttgcatccaattgtgcctgaacttttaaaatatgtaaatgctgccatgttccaaacccatcgtcagtgtgtgtgtttagagctgtgcaccctagaaacaacatattgtcccatgagcaggtgcctgagacacagacccctttgcattcacagagaggtcattggttatagagacttgaattaataagtgacattatgccagtttctgttctctcacaggtgataaacaatgctttttgtgcactacatactcttcagtgtagagctcttgttttatgggaaaaggctcaaatgccaaattgtgtttgatggattaatatgcccttttgccgatgcatactattactgatgtgactcggttttgtcgcagctttgctttgtttaatgaaacacacttgtaaacctcttttgcactttgaaaaagaatccagcgggatgctcgagcacctgtaaacaattttctcaacctatttgatgttcaaataaagaattaaact

SEQ ID NO: 1497 - DNA, 3335 bp, Homo sapiens
  source 1..3335: mol_type = genomic DNA
ctagagcatgggtggccattgttgacctacaggaggcaccactgtcaccaacaaagggtaacagtctttcttttcaatatttatttatatccagtatttattttcaatactgactatggagagagctctcctgtgctcaaacactgcaatactgggggtctttcaaagcacaaaaacatatatttgcatgatggcatcattaacatttttatggctttctatttcttttttgtactggtctcaagagccactcataaatctctcagtaactgcatagtgtcccagggccagagaccggccactcctggcattgtgattagagtcatttaatatccaaggtggtgactaatgtctggcaacaaagcctccattgggtgtcatgtgtcctgggaccctgagcgtgggcactctaggagcacctcagtattgcgtgttagtactatggccgagagaatagttgagaaagtggtcaagaggtggatccatgtgaacgccactgggaaatgagagacctcgttcccaatcacggtcagtgcaactcgaaagcctaaaatcagtttaaaacaaaggtatctacctttatcttatgttcatatcctaggcttttaataatacgtatttttcacatgtttacagaaagcagtcaactgagctattcatggaaaggtttgtgggtttggttaacgaagtggaggagtattacatttcagctggaaacacatccctagaatgccaaaacatttattccaaagtctggtttcctggtgcaatcggaggcatggcaatgcctctgttcagagactgggggctagggccagtaaggcatttgatccacatgtatcccagaaggcttttattgttaaattatattctttcggaaaaaccacccatgtcctattttgtaaacttgatatccatacacttttgactggcattctattttagccgtaagactatgattcacagcaagcctgtttttcctcttgcttggggtggcagcagaaagcatagggtactttccagcctccaagggtaggggcaaaggggctggggtttctcctccccagtacagctttctctggctgtgccacactgctccctgtgagcagacagcaagtctcccctcactccccactgccattcatccagcgctgtgcagtagcccagctgcgtgtctgccgggaggggctgccaagtgccctgcctactggctgcttcccgaatccctgccattccacgcacaaacacatccacacactctctctgcctagttcacacactgagccactcgcacatgcgagcacattccttccttccttctcactctctcggcccttgacttctacaagcccatggaacatttctggaaagacgttcttgatccagcagggtggcccgccggtttctgagccttctgccctgcggggacacggtctgcaccctgcccgcggccacggaccatgaccatgaccctccacaccaaagcatctgggatggccctactgcatcagatccaagggaacgagctggagcccctgaaccgtccgcagctcaagatccccctggagcggcccctgggcgaggtgtacctggacagcagcaagcccgccgtgtacaactaccccgagggcgccgcctacgagttcaacgccgcggccgccgccaacgcgcaggtctacggtcagaccggcctcccctacggccccgggtctgaggctgcggcgttcggctccaacggcctggggggtttccccccactcaacagcgtgtctccgagcccgctgatgctactgcacccgccgccgcagctgtcgcctttcctgcagccccacggccagcaggtgccctactacctggagaacgagcccagcggctacacggtgcgcgaggccggcccgccggcattctacaggccaaattcagataatcgacgccagggtggcagagaaagattggccagtaccaatgacaagggaagtatggctatggaatctgccaaggagactcgctactgtgcagtgtgcaatgactatgcttcaggctaccattatggagtctggtcctgtgagggctgcaaggccttcttcaagagaagtattcaaggacataacgactatatgtgtccagccaccaaccagtgcaccattgataaaaacaggaggaagagctgccaggcctgccggctccgtaaatgctacgaagtgggaatgatgaaaggtgggatacgaaaagaccgaagaggagggagaatgttgaaacacaagcgccagagagatgatggggagggcaggggtgaagtggggtctgctggagacatgagagctgccaacctttggccaagcccgctcatgatcaaacgctctaagaagaacagcctggccttgtccctgacggccgaccagatggtcagtgccttgttggatgctgagcccccgatactctattccgagtatgatcctaccagacccttcagtgaagcttcgatgatgggcttactgaccaacctggcagacagggagctggttcacatgatcaactgggcgaagagggtgccaggctttgtggatttgaccctccatgatcaggtccaccttctagaatgtgcctggctagagatcctgatgattggtctcgtctggcgctccatggagcacccagggaagctactgtttgctcctaacttgctcttggacaggaaccagggaaaatgtgtagagggcatggtggagatcttcgacatgctgctggctacatcatctcggttccgcatgatgaatctgcagggagaggagtttgtgtgcctcaaatctattattttgcttaattctggagtgtacacatttctgtccagcaccctgaagtctctggaagagaaggaccatatccaccgagtcctggacaagatcacagacactttgatccacctgatggccaaggcaggcctgaccctgcagcagcagcaccagcggctggcccagctcctcctcatcctctcccacatcaggcacatgagtaacaaaggcatggagcatctgtacagcatgaagtgcaagaacgtggtgcccctctatgacctgctgctggagatgctggacgcccaccgcctacatgcgcccactagccgtggaggggcatccgtggaggagacggaccaaagccacttggccactgcgggctctacttcatcgcattccttgcaaaagtattacatcacgggggaggcagagggtttccctgccacggtctgagagctccctggctcccacacggttcagataatccctgctgcattttaccctcatcatgcaccactttagccaaattctgtctcctgc

SEQ ID NO: 1498 - DNA, 2165 bp, Homo sapiens
  source 1..2165: mol_type = genomic DNA
gtcgcctctaacctcgggctgtgctctttttccaggtggcccgccggtttctgagccttctgccctgcggggacacggtctgcaccctgcccgcggccacggaccatgaccatgaccctccacaccaaagcatctgggatggccctactgcatcagatccaagggaacgagctggagcccctgaaccgtccgcagctcaagatccccctggagcggcccctgggcgaggtgtacctggacagcagcaagcccgccgtgtacaactaccccgagggcgccgcctacgagttcaacgccgcggccgccgccaacgcgcaggtctacggtcagaccggcctcccctacggccccgggtctgaggctgcggcgttcggctccaacggcctggggggtttccccccactcaacagcgtgtctccgagcccgctgatgctactgcacccgccgccgcagctgtcgcctttcctgcagccccacggccagcaggtgccctactacctggagaacgagcccagcggctacacggtgcgcgaggccggcccgccggcattctacaggccaaattcagataatcgacgccagggtggcagagaaagattggccagtaccaatgacaagggaagtatggctatggaatctgccaaggagactcgctactgtgcagtgtgcaatgactatgcttcaggctaccattatggagtctggtcctgtgagggctgcaaggccttcttcaagagaagtattcaaggacataacgactatatgtgtccagccaccaaccagtgcaccattgataaaaacaggaggaagagctgccaggcctgccggctccgtaaatgctacgaagtgggaatgatgaaaggtgggatacgaaaagaccgaagaggagggagaatgttgaaacacaagctcctcctcatcctctcccacatcaggcacatgagtaacaaaggcatggagcatctgtacagcatgaagtgcaagaacgtggtgcccctctatgacctgctgctggagatgctggacgcccaccgcctacatgcgcccactagccgtggaggggcatccgtggaggagacggaccaaagccacttggccactgcgggctctacttcatcgcattccttgcaaaagtattacatcacgggggaggcagagggtttccctgccacggtctgagagctccctggctcccacacggttcagataatccctgctgcattttaccctcatcatgcaccactttagccaaattctgtctcctgcatacactccggcatgcatccaacaccaatggctttctagatgagtggccattcatttgcttgctcagttcttagtggcacatcttctgtcttctgttgggaacagccaaagggattccaaggctaaatctttgtaacagctctctttcccccttgctatgttactaagcgtgaggattcccgtagctcttcacagctgaactcagtctatgggttggggctcagataactctgtgcatttaagctacttgtagagacccaggcctggagagtagacattttgcctctgataagcactttttaaatggctctaagaataagccacagcaaagaatttaaagtggctcctttaattggtgacttggagaaagctaggtcaagggtttattatagcaccctcttgtattcctatggcaatgcatccttttatgaaagtggtacaccttaaagcttttatatgactgtagcagagtatctggtgattgtcaattcattccccctataggaatacaaggggcacacagggaaggcagatcccctagttggcaagactattttaacttgatacactgcagattcagatgtgctgaaagctctgcctctggctttccggtcatgggttccagttaattcatgcctcccatggacctatggagagcagcaagttgatcttagttaagtctccctatatgagggataagttcctgatttttgtttttatttttgtgttacaaaagaaagccctccctccctgaacttgcagtaaggtcagcttcaggacctgttccagtgggcactgtacttggatcttcccggcgtgtgtgtgccttacacaggggtgaactgttcactgtggtgatgcatgatgagggtaaatggtagttgaaaggagcaggggcc

SEQ ID NO: 1499 - DNA, 624 bp, Homo sapiens
  source 1..624: mol_type = genomic DNA
atggtcataacagcctcctgtctaccgactcagaacggattttaccaaaactgaaaatgcaggctccatgctcagaagctctttaacaggctcgaaaggtccatgctcctttctcctgcccattctatagcataagaagacagtctctgagtgataatcttctcttcaagaagaagaaaactaggaaggagtaagcacaaagatctcttcacattctccgggactgcggtaccaaatatcagcacagcacttcttgaaaaaggatgtagattttaatctgaactttgaaccatcactgaggtggcccgccggtttctgagccttctgccctgcggggacacggtctgcaccctgcccgcggccacggaccatgaccatgaccctccacaccaaagcatctgggatggccctactgcatcagatccaagggaacgagctggagcccctgaaccgtccgcagctcaagatccccctggagcggcccctgggcgaggtgtacctggacagcagcaagcccgccgtgtacaactaccccgagggcgccgcctacgagttcaacgccgcggccgccgccaacgcgcaggtctacggtcagaccggcctcccctacggccccgggtctga

SEQ ID NO: 1500 - DNA, 1251 bp, Homo sapiens
  source 1..1251: mol_type = genomic DNA
aggagctggcggagggcgttcgtcctgggactgcacttgctcccgtcgggtcgcccggcttcaccggacccgcaggctcccggggcagggccggggccagagctcgcgtgtcggcgggacatgcgctgcgtcgcctctaacctcgggctgtgctctttttccaggtggcccgccggtttctgagccttctgccctgcggggacacggtctgcaccctgcccgcggccacggaccatgaccatgaccctccacaccaaagcatctgggatggccctactgcatcagatccaagggaacgagctggagcccctgaaccgtccgcagctcaagatccccctggagcggcccctgggcgaggtgtacctggacagcagcaagcccgccgtgtacaactaccccgagggcgccgcctacgagttcaacgccgcggccgccgccaacgcgcaggtctacggtcagaccggcctcccctacggccccgggtctgaggctgcggcgttcggctccaacggcctggggggtttccccccactcaacagcgtgtctccgagcccgctgatgctactgcacccgccgccgcagctgtcgcctttcctgcagccccacggccagcaggtgccctactacctggagaacgagcccagcggctacacggtgcgcgaggccggcccgccggcattctacaggaaccagggaaaatgtgtagagggcatggtggagatcttcgacatgctgctggctacatcatctcggttccgcatgatgaatctgcagggagaggagtttgtgtgcctcaaatctattattttgcttaattctggagtgtacacatttctgtccagcaccctgaagtctctggaagagaaggaccatatccaccgagtcctggacaagatcacagacactttgatccacctgatggccaaggcaggcctgaccctgcagcagcagcaccagcggctggcccagctcctcctcatcctctcccacatcaggcacatgagtaacaaaggcatggagcatctgtacagcatgaagtgcaagaacgtggtgcccctctatgacctgctgctggagatgctggacgcccaccgcctacatgcgcccactagccgtggaggggcatccgtggaggagacggaccaaagccacttggccactgcgggctctacttcatcgcattccttgcaaaagtattacatcacgggggaggcagagggtttccctgccacggtctgagagctccctggc

SEQ ID NO: 1501 - DNA, 323 bp, Homo sapiens
  source 1..323: mol_type = genomic DNA
cataacgactatatgtgtccagccaccaaccagtgcaccattgataaaaacaggaggaagagctgccaggcctgccggctccgtaaatgctacgaagtgggaatgatgaaaggtggctttgtggatttgaccctccatgatcaggtccaccttctagaatgtgcctggctagagatcctgatgattggtctcgtctggcgctccatggagcacccagggaagctactgtttgctcctaacttgctcttggacaggaaccagggaaaatgtgtagagggcatggtggagatcttcgacatgctgctggctacatcatctcggtt

SEQ ID NO: 1502 - DNA, 5437 bp, Homo sapiens
  source 1..5437: mol_type = genomic DNA
gcttaaaaataatctcctgccagcccagtgacaagcctgtcccacccggggagaatgccccggagtggcgtgcgggtcagccagggtctgcgcctcgcagccactgtggaaggagcgcggccggtccaggacacaggagaccactttgtgacttcaatggcgaagggccaaattcagataatcgacgccagggtggcagagaaagattggccagtaccaatgacaagggaagtatggctatggaatctgccaaggagactcgctactgtgcagtgtgcaatgactatgcttcaggctaccattatggagtctggtcctgtgagggctgcaaggccttcttcaagagaagtattcaaggacataacgactatatgtgtccagccaccaaccagtgcaccattgataaaaacaggaggaagagctgccaggcctgccggctccgtaaatgctacgaagtgggaatgatgaaaggtgggatacgaaaagaccgaagaggagggagaatgttgaaacacaagcgccagagagatgatggggagggcaggggtgaagtggggtctgctggagacatgagagctgccaacctttggccaagcccgctcatgatcaaacgctctaagaagaacagcctggccttgtccctgacggccgaccagatggtcagtgccttgttggatgctgagcccccgatactctattccgagtatgatcctaccagacccttcagtgaagcttcgatgatgggcttactgaccaacctggcagacagggagctggttcacatgatcaactgggcgaagagggtgccaggctttgtggatttgaccctccatgatcaggtccaccttctagaatgtgcctggctagagatcctgatgattggtctcgtctggcgctccatggagcacccagggaagctactgtttgctcctaacttgctcttggacaggaaccagggaaaatgtgtagagggcatggtggagatcttcgacatgctgctggctacatcatctcggttccgcatgatgaatctgcagggagaggagtttgtgtgcctcaaatctattattttgcttaattctggtatctcacatgtagaagcaaagaagagaatcctgaacttgcatcctaaaatatttggaaacaagtggtttcctcgtgtctaaagcctctggtcataaggcctcacagtatcctgcagatcatcaaatccgtgtgtggacgtggggacattttgttttgaggcagttacatgaccatgggcaagtaaattagtctctctggccttcagttttctcatttgcaatgattcaatggtttgccttaaagtgtcttaagaaggataggatagctacccacaaactttggatcaaattttcttcaaaacatccttcccctgactttaaaatatgccctggcaaccaacactcaacacctgtagctagatgagttataacagagtgactgaagagagctcccacaattcctagttattaaatacctgactaattttcattaggagacatttaagaactttagtgatgggaagatttacatatataattgatagtacaatctgacagagctgaatagctcctgtttgtcaactgttaaattctttgtgcaattaggtcaaagatcaagatcaaaacaagggctgcccattgacctgttcactcctgagaaaaatggcaaaccattgaatcataaatcatgacagccaaaataattttaggatattaatgcacccctcatctttgcaaatgagaaaactgaaggccagagagactaatttacttgcccatttttgataaaaatgtcaccatttacagaatgtggactcctatgttggagtctgttgaaggacatggcacatttaacagcatcagagcattttttattaaaatttaatttgtgcatgacttctaatgctgaagaacgccaagctaggaagaagtcatgggctgagatggggacagagagaacacacaatattcagtgactgtccgtgcagctggctgcccttgaaaatatccgaactatccactgggaaaatgcctgtccccttggggtaattaccagagtttcaacatgcccaaagctgcctcatcttcagggggaacttgttctagcgattttagtatcaagaagctaatggtcccagggaaagggttatttttaatatttagctactgtgctaaaaatcacctaagtttctagagtcttgggaaatttcataagggaaagaacaaaggcaacttgttgactacccactggtcattctcctctggtcttattacatacatggatgccagtttagattgtgtttatataggaaaaattaaatgtgtgagcctccttaaggaacatcatcaatacagatatatcagatagttctgtccagcaaaaaacgtgcttatttgctacaagtaaatttttatttatttttctcacttccctcactccttcaaatttccaggtaaatagctgcccaggagttgcttcatctctgtcccaaaatacctagacaattgcgggataaggagaatggcagggagggagtagtggctaaaatcacacccttcaaaagaaagtgtgtaggacacacaattgtgagaagtctgaatgccatgcacatagggtatgactcactttgaaaattgtttataatcaaggaaatgaaaatgagttaatttcgtgcatgcatcatttaaagccaaatgagaagaaacttctaatttattttgttacttttcggctaacactggcagtatgtaacagatttattttgcagaaacatctagattgtccgtgatcttgatcctgcccttatgtgtcttgtctttgaaacccagtgtttcctggatatatggttcaggagacaagtttccagaatcaagttaggacccaggtcttctttttttccaaaccaaacattcttgctaatcctaaactacctgaggcagcctgtggtggcctcagctctaaaaccattgtttaaaggcttctacccatcaatggcccttcagcagagtggtacggttaacggggtagggtctggagtcaggggagacctgggttcaaatcctacatctttacacctctaatccccagtgtccttgtctataaattgggaatatagccatgtcatgggattcttgtgagggttaaatgaggtaaaacacatacaatgcttagcatgtatacaattaagcactaaataattgaaacacattaagtactaaatgaatgtcagcagcttatcactattatctgtataatgataccaagggtgtgccgactcatacccttaggggttggctggattcggccttttctctcgggaaaacatacctgatttattaatagtgctttcaagcatgtgataaatttctcaaactgcctgtcttgttccctagaaacaccaggaaggcctacctcaaatagcaacagagaaacctatcggagccttaccctacagctttccttggggcacgggtgagcaatctgccttagaggggagaggctctgtgctgaggctctttgaatgctttgaataaatagatccccagataatgaaaagacttcaaaacaaattctacaagaaactgagtagtgtttatagtgaggccctagtgtacatgcaaaaaacccccactgcccttgcttaaatgtatctgattaacttgaatacatttttaaatgagggcttttttccctctttcagtgtttcggccagtcatttgccacttctcattccatcttagttctctgtaaagaaggtgccagagacctaaggtgcccaaggcaattttgcattttacaattctaagctttagaatgaagtcatcaatttgctacatccggactacagtgcaattattcctttgccttgctggaaattggagtgaaatctttctagctgtcaatttcaactcagttgcagtagtgttttgaagaattaatggcgataaggttagaaaattttaagtcaaacgtagggaaaaagtaccagctagaccatcataagcatttgctttgaaagcatgcttctaaagtgtgtttaacctcaaataacagtcacaaatatggttattatgaatgtatgcacagatttttatgtttctaattttaagaagttctagggagctccctgtaacgatttagggaatctctagattctgatatactgcaagtcttttaatggtaggaatcacattgaattaattttgtaggcccagggcctaaatttagtaggtgttcagtacctattggcatcaattcatatgtaggtttaaaatactgtatgaagatacagaatcaccaccatcaaatcaaattgaaatatgtaacaggctagtataatattaacatctgactttaaacaacaacaaagaaaccaaatgagtaactcctcccttcaaactaatagtcagtttcttccaactcagtctctttctcctctcaggaagaatgcgtatctaaaaatttcccattgcagactgctggaaacaacattctaaactatttatgcttctgcaataacctttccaatttgctggaccagtgcaagattaaacacgagatatctcaagtctcaatgtaaaggaacaccacgacagcctggactgtgggtgaagttcattcttccccagcagactctgcctttcattctcggggttgggtgtgccccaaacagaggtaccgacggtaacgaagcccaagaatgttcaaccacaacctgtctgtgaaggtgttggatgacgtttgccattcaggtgaagattatttatgttccagtcccacctgagtagcaaagtgaacactgtgctgaatgctcagaaagatgttaatgaaccgtgctggacagagcagagctgaaaggcgccttgcgagtgtcgtagtgagaatgtggctgtcccagctgcaaagccctgttaggaggcatgaggaagcacttgctgccctaagaaacgatgccttcgacattttcaaaagatctatgtggctgtctgaaacaatgcggagagcagatagacgcaatatttgggaaccaaagagtgactgctgttggcgttgcatcataacataagcgctttcccccttctcgtcactatcatttgtatcaaccaaagaactgatctctggtatcctcgaaggaatgctgtggggatattcttcatctctgttcatggtacatcagcaatttgtggggaaaagatggactatataacacaatgatctgcctaaaagaaactgtctctacttatagggggctgagcaaaccttagagcatctgcggatgctcgtcattatcttcaaaagtccccaagagtttttctccatactttattattgctattttgtttaggctagaaaaaaaaaaactcataaaattgtcttcaaaccaaaccaaaggaaatgaaaagaaaaaaaa

SEQ ID NO: 1503 - DNA, 5996 bp, Homo sapiens
  source 1..5996: mol_type = genomic DNA
aaacacatccacacactctctctgcctagttcacacactgagccactcgcacatgcgagcacattccttccttccttctcactctctcggcccttgacttctacaagcccatggaacatttctggaaagacgttcttgatccagcagggtggcccgccggtttctgagccttctgccctgcggggacacggtctgcaccctgcccgcggccacggaccatgaccatgaccctccacaccaaagcatctgggatggccctactgcatcagatccaagggaacgagctggagcccctgaaccgtccgcagctcaagatccccctggagcggcccctgggcgaggtgtacctggacagcagcaagcccgccgtgtacaactaccccgagggcgccgcctacgagttcaacgccgcggccgccgccaacgcgcaggtctacggtcagaccggcctcccctacggccccgggtctgaggctgcggcgttcggctccaacggcctggggggtttccccccactcaacagcgtgtctccgagcccgctgatgctactgcacccgccgccgcagctgtcgcctttcctgcagccccacggccagcaggtgccctactacctggagaacgagcccagcggctacacggtgcgcgaggccggcccgccggcattctacaggccaaattcagataatcgacgccagggtggcagagaaagattggccagtaccaatgacaagggaagtatggctatggaatctgccaaggagactcgctactgtgcagtgtgcaatgactatgcttcaggctaccattatggagtctggtcctgtgagggctgcaaggccttcttcaagagaagtattcaaggacataacgactatatgtgtccagccaccaaccagtgcaccattgataaaaacaggaggaagagctgccaggcctgccggctccgtaaatgctacgaagtgggaatgatgaaaggtgggatacgaaaagaccgaagaggagggagaatgttgaaacacaagcgccagagagatgatggggagggcaggggtgaagtggggtctgctggagacatgagagctgccaacctttggccaagcccgctcatgatcaaacgctctaagaagaacagcctggccttgtccctgacggccgaccagatggtcagtgccttgttggatgctgagcccccgatactctattccgagtatgatcctaccagacccttcagtgaagcttcgatgatgggcttactgaccaacctggcagacagggagctggttcacatgatcaactgggcgaagagggtgccaggctttgtggatttgaccctccatgatcaggtccaccttctagaatgtgcctggctagagatcctgatgattggtctcgtctggcgctccatggagcacccagggaagctactgtttgctcctaacttgctcttggacagtaacaaaggcatggagcatctgtacagcatgaagtgcaagaacgtggtgcccctctatgacctgctgctggagatgctggacgcccaccgcctacatgcgcccactagccgtggaggggcatccgtggaggagacggaccaaagccacttggccactgcgggctctacttcatcgcattccttgcaaaagtattacatcacgggggaggcagagggtttccctgccacggtctgagagctccctggctcccacacggttcagataatccctgctgcattttaccctcatcatgcaccactttagccaaattctgtctcctgcatacactccggcatgcatccaacaccaatggctttctagatgagtggccattcatttgcttgctcagttcttagtggcacatcttctgtcttctgttgggaacagccaaagggattccaaggctaaatctttgtaacagctctctttcccccttgctatgttactaagcgtgaggattcccgtagctcttcacagctgaactcagtctatgggttggggctcagataactctgtgcatttaagctacttgtagagacccaggcctggagagtagacattttgcctctgataagcactttttaaatggctctaagaataagccacagcaaagaatttaaagtggctcctttaattggtgacttggagaaagctaggtcaagggtttattatagcaccctcttgtattcctatggcaatgcatccttttatgaaagtggtacaccttaaagcttttatatgactgtagcagagtatctggtgattgtcaattcattccccctataggaatacaaggggcacacagggaaggcagatcccctagttggcaagactattttaacttgatacactgcagattcagatgtgctgaaagctctgcctctggctttccggtcatgggttccagttaattcatgcctcccatggacctatggagagcagcaagttgatcttagttaagtctccctatatgagggataagttcctgatttttgtttttatttttgtgttacaaaagaaagccctccctccctgaacttgcagtaaggtcagcttcaggacctgttccagtgggcactgtacttggatcttcccggcgtgtgtgtgccttacacaggggtgaactgttcactgtggtgatgcatgatgagggtaaatggtagttgaaaggagcaggggccctggtgttgcatttagccctggggcatggagctgaacagtacttgtgcaggattgttgtggctactagagaacaagagggaaagtagggcagaaactggatacagttctgaggcacagccagacttgctcagggtggccctgccacaggctgcagctacctaggaacattccttgcagaccccgcattgccctttgggggtgccctgggatccctggggtagtccagctcttcttcatttcccagcgtggccctggttggaagaagcagctgtcacagctgctgtagacagctgtgttcctacaattggcccagcaccctggggcacgggagaagggtggggaccgttgctgtcactactcaggctgactggggcctggtcagattacgtatgcccttggtggtttagagataatccaaaatcagggtttggtttggggaagaaaatcctcccccttcctcccccgccccgttccctaccgcctccactcctgccagctcatttccttcaatttcctttgacctataggctaaaaaagaaaggctcattccagccacagggcagccttccctgggcctttgcttctctagcacaattatgggttacttcctttttcttaacaaaaaagaatgtttgatttcctctgggtgaccttattgtctgtaattgaaaccctattgagaggtgatgtctgtgttagccaatgacccaggtgagctgctcgggcttctcttggtatgtcttgtttggaaaagtggatttcattcatttctgattgtccagttaagtgatcaccaaaggactgagaatctgggagggcaaaaaaaaaaaaaaagtttttatgtgcacttaaatttggggacaattttatgtatctgtgttaaggatatgtttaagaacataattcttttgttgctgtttgtttaagaagcaccttagtttgtttaagaagcaccttatatagtataatatatatttttttgaaattacattgcttgtttatcagacaattgaatgtagtaattctgttctggatttaatttgactgggttaacatgcaaaaaccaaggaaaaatatttagtttttttttttttttttgtatacttttcaagctaccttgtcatgtatacagtcatttatgcctaaagcctggtgattattcatttaaatgaagatcacatttcatatcaacttttgtatccacagtagacaaaatagcactaatccagatgcctattgttggatactgaatgacagacaatcttatgtagcaaagattatgcctgaaaaggaaaattattcagggcagctaattttgcttttaccaaaatatcagtagtaatatttttggacagtagctaatgggtcagtgggttctttttaatgtttatacttagattttcttttaaaaaaattaaaataaaacaaaaaaaaatttctaggactagacgatgtaataccagctaaagccaaacaattatacagtggaaggttttacattattcatccaatgtgtttctattcatgttaagatactactacatttgaagtgggcagagaacatcagatgattgaaatgttcgcccaggggtctccagcaactttggaaatctctttgtatttttacttgaagtgccactaatggacagcagatattttctggctgatgttggtattgggtgtaggaacatgatttaaaaaaaaactcttgcctctgctttcccccactctgaggcaagttaaaatgtaaaagatgtgatttatctggggggctcaggtatggtggggaagtggattcaggaatctggggaatggcaaatatattaagaagagtattgaaagtatttggaggaaaatggttaattctgggtgtgcaccagggttcagtagagtccacttctgccctggagaccacaaatcaactagctccatttacagccatttctaaaatggcagcttcagttctagagaagaaagaacaacatcagcagtaaagtccatggaatagctagtggtctgtgtttcttttcgccattgcctagcttgccgtaatgattctataatgccatcatgcagcaattatgagaggctaggtcatccaaagagaagaccctatcaatgtaggttgcaaaatctaacccctaaggaagtgcagtctttgatttgatttccctagtaaccttgcagatatgtttaaccaagccatagcccatgccttttgagggctgaacaaataagggacttactgataatttacttttgatcacattaaggtgttctcaccttgaaatcttatacactgaaatggccattgatttaggccactggcttagagtactccttcccctgcatgacactgattacaaatactttcctattcatactttccaattatgagatggactgtgggtactgggagtgatcactaacaccatagtaatgtctaatattcacaggcagatctgcttggggaagctagttatgtgaaaggcaaatagagtcatacagtagctcaaaaggcaaccataattctctttggtgcaggtcttgggagcgtgatctagattacactgcaccattcccaagttaatcccctgaaaacttactctcaactggagcaaatgaactttggtcccaaatatccatcttttcagtagcgttaattatgctctgtttccaactgcatttcctttccaattgaattaaagtgtggcctcgtttttagtcatttaaaattgttttctaagtaattgctgcctctattatggcacttcaattttgcactgtcttttgagattcaagaaaaatttctattcttttttttgcatccaattgtgcctgaacttttaaaatatgtaaatgctgccatgttccaaacccatcgtcagtgtgtgtgtttagagctgtgcaccctagaaacaacatattgtcccatgagcaggtgcctgagacacagacccctttgcattcacagagaggtcattggttatagagacttgaattaataagtgacattatgccagtttctgttctctcacaggtgataaacaatgctttttgtgcactacatactcttcagtgtagagctcttgttttatgggaaaaggctcaaatgccaaattgtgtttgatggattaatatgcccttttgccgatgcatactattactgatgtgactcggttttgtcgcagctttgctttgtttaatgaaacacacttgtaaacctcttttgcactttgaaaaagaatccagcgggatgctcgagcacctgtaaacaattttctcaacctatttgatgttcaaataaagaattaaactaaa

SEQ ID NO: 1504 - DNA, 5880 bp, Homo sapiens
  source 1..5880: mol_type = genomic DNA
atgaccatgaccctccacaccaaagcatctgggatggccctactgcatcagatccaagggaacgagctggagccccccccactcaacagcgtgtctccgagcccgctgatgctactgcacccgccgccgcagctgtcgcctttcctgcagccccacggccagcaggtgccctactacctggagaacgagcccagcggctacacggtgcgcgaggccggcccgccggcattctacaggccaaattcagataatcgacgccagggtggcagagaaagattggccagtaccaatgacaagggaagtatggctatggaatctgccaaggagactcgctactgtgcagtgtgcaatgactatgcttcaggctaccattatggagtctggtcctgtgagggctgcaaggccttcttcaagagaagtattcaaggacataacgactatatgtgtccagccaccaaccagtgcaccattgataaaaacaggaggaagagctgccaggcctgccggctccgtaaatgctacgaagtgggaatgatgaaaggtgggatacgaaaagaccgaagaggagggagaatgttgaaacacaagcgccagagagatgatggggagggcaggggtgaagtggggtctgctggagacatgagagctgccaacctttggccaagcccgctcatgatcaaacgctctaagaagaacagcctggccttgtccctgacggccgaccagatggtcagtgccttgttggatgctgagcccccgatactctattccgagtatgatcctaccagacccttcagtgaagcttcgatgatgggcttactgaccaacctggcagacagggagctggttcacatgatcaactgggcgaagagggtgccaggctttgtggatttgaccctccatgatcaggtccaccttctagaatgtgcctggctagagatcctgatgattggtctcgtctggcgctccatggagcacccagggaagctactgtttgctcctaacttgctcttggacaggaaccagggaaaatgtgtagagggcatggtggagatcttcgacatgctgctggctacatcatctcggttccgcatgatgaatctgcagggagaggagtttgtgtgcctcaaatctattattttgcttaattctggagtgtacacatttctgtccagcaccctgaagtctctggaagagaaggaccatatccaccgagtcctggacaagatcacagacactttgatccacctgatggccaaggcaggcctgaccctgcagcagcagcaccagcggctggcccagctcctcctcatcctctcccacatcaggcacatgagtaacaaaggcatggagcatctgtacagcatgaagtgcaagaacgtggtgcccctctatgacctgctgctggagatgctggacgcccaccgcctacatgcgcccactagccgtggaggggcatccgtggaggagacggaccaaagccacttggccactgcgggctctacttcatcgcattccttgcaaaagtattacatcacgggggaggcagagggtttccctgccacggtctgagagctccctggctcccacacggttcagataatccctgctgcattttaccctcatcatgcaccactttagccaaattctgtctcctgcatacactccggcatgcatccaacaccaatggctttctagatgagtggccattcatttgcttgctcagttcttagtggcacatcttctgtcttctgttgggaacagccaaagggattccaaggctaaatctttgtaacagctctctttcccccttgctatgttactaagcgtgaggattcccgtagctcttcacagctgaactcagtctatgggttggggctcagataactctgtgcatttaagctacttgtagagacccaggcctggagagtagacattttgcctctgataagcactttttaaatggctctaagaataagccacagcaaagaatttaaagtggctcctttaattggtgacttggagaaagctaggtcaagggtttattatagcaccctcttgtattcctatggcaatgcatccttttatgaaagtggtacaccttaaagcttttatatgactgtagcagagtatctggtgattgtcaattcattccccctataggaatacaaggggcacacagggaaggcagatcccctagttggcaagactattttaacttgatacactgcagattcagatgtgctgaaagctctgcctctggctttccggtcatgggttccagttaattcatgcctcccatggacctatggagagcagcaagttgatcttagttaagtctccctatatgagggataagttcctgatttttgtttttatttttgtgttacaaaagaaagccctccctccctgaacttgcagtaaggtcagcttcaggacctgttccagtgggcactgtacttggatcttcccggcgtgtgtgtgccttacacaggggtgaactgttcactgtggtgatgcatgatgagggtaaatggtagttgaaaggagcaggggccctggtgttgcatttagccctggggcatggagctgaacagtacttgtgcaggattgttgtggctactagagaacaagagggaaagtagggcagaaactggatacagttctgaggcacagccagacttgctcagggtggccctgccacaggctgcagctacctaggaacattccttgcagaccccgcattgccctttgggggtgccctgggatccctggggtagtccagctcttcttcatttcccagcgtggccctggttggaagaagcagctgtcacagctgctgtagacagctgtgttcctacaattggcccagcaccctggggcacgggagaagggtggggaccgttgctgtcactactcaggctgactggggcctggtcagattacgtatgcccttggtggtttagagataatccaaaatcagggtttggtttggggaagaaaatcctcccccttcctcccccgccccgttccctaccgcctccactcctgccagctcatttccttcaatttcctttgacctataggctaaaaaagaaaggctcattccagccacagggcagccttccctgggcctttgcttctctagcacaattatgggttacttcctttttcttaacaaaaaagaatgtttgatttcctctgggtgaccttattgtctgtaattgaaaccctattgagaggtgatgtctgtgttagccaatgacccaggtgagctgctcgggcttctcttggtatgtcttgtttggaaaagtggatttcattcatttctgattgtccagttaagtgatcaccaaaggactgagaatctgggagggcaaaaaaaaaaaaaaagtttttatgtgcacttaaatttggggacaattttatgtatctgtgttaaggatatgtttaagaacataattcttttgttgctgtttgtttaagaagcaccttagtttgtttaagaagcaccttatatagtataatatatatttttttgaaattacattgcttgtttatcagacaattgaatgtagtaattctgttctggatttaatttgactgggttaacatgcaaaaaccaaggaaaaatatttagtttttttttttttttttgtatacttttcaagctaccttgtcatgtatacagtcatttatgcctaaagcctggtgattattcatttaaatgaagatcacatttcatatcaacttttgtatccacagtagacaaaatagcactaatccagatgcctattgttggatactgaatgacagacaatcttatgtagcaaagattatgcctgaaaaggaaaattattcagggcagctaattttgcttttaccaaaatatcagtagtaatatttttggacagtagctaatgggtcagtgggttctttttaatgtttatacttagattttcttttaaaaaaattaaaataaaacaaaaaaaaatttctaggactagacgatgtaataccagctaaagccaaacaattatacagtggaaggttttacattattcatccaatgtgtttctattcatgttaagatactactacatttgaagtgggcagagaacatcagatgattgaaatgttcgcccaggggtctccagcaactttggaaatctctttgtatttttacttgaagtgccactaatggacagcagatattttctggctgatgttggtattgggtgtaggaacatgatttaaaaaaaaactcttgcctctgctttcccccactctgaggcaagttaaaatgtaaaagatgtgatttatctggggggctcaggtatggtggggaagtggattcaggaatctggggaatggcaaatatattaagaagagtattgaaagtatttggaggaaaatggttaattctgggtgtgcaccagggttcagtagagtccacttctgccctggagaccacaaatcaactagctccatttacagccatttctaaaatggcagcttcagttctagagaagaaagaacaacatcagcagtaaagtccatggaatagctagtggtctgtgtttcttttcgccattgcctagcttgccgtaatgattctataatgccatcatgcagcaattatgagaggctaggtcatccaaagagaagaccctatcaatgtaggttgcaaaatctaacccctaaggaagtgcagtctttgatttgatttccctagtaaccttgcagatatgtttaaccaagccatagcccatgccttttgagggctgaacaaataagggacttactgataatttacttttgatcacattaaggtgttctcaccttgaaatcttatacactgaaatggccattgatttaggccactggcttagagtactccttcccctgcatgacactgattacaaatactttcctattcatactttccaattatgagatggactgtgggtactgggagtgatcactaacaccatagtaatgtctaatattcacaggcagatctgcttggggaagctagttatgtgaaaggcaaatagagtcatacagtagctcaaaaggcaaccataattctctttggtgcaggtcttgggagcgtgatctagattacactgcaccattcccaagttaatcccctgaaaacttactctcaactggagcaaatgaactttggtcccaaatatccatcttttcagtagcgttaattatgctctgtttccaactgcatttcctttccaattgaattaaagtgtggcctcgtttttagtcatttaaaattgttttctaagtaattgctgcctctattatggcacttcaattttgcactgtcttttgagattcaagaaaaatttctattcttttttttgcatccaattgtgcctgaacttttaaaatatgtaaatgctgccatgttccaaacccatcgtcagtgtgtgtgtttagagctgtgcaccctagaaacaacatattgtcccatgagcaggtgcctgagacacagacccctttgcattcacagagaggtcattggttatagagacttgaattaataagtgacattatgccagtttctgttctctcacaggtgataaacaatgctttttgtgcactacatactcttcagtgtagagctcttgttttatgggaaaaggctcaaatgccaaattgtgtttgatggattaatatgcccttttgccgatgcatactattactgatgtgactcggttttgtcgcagctttgctttgtttaatgaaacacacttgtaaacctcttttgcactttgaaaaagaatccagcgggatgctcgagcacctgtaaacaattttctcaacctatttgatgttcaaataaagaattaaactaaa

SEQ ID NO: 1505 - DNA, 6466 bp, Homo sapiens
  source 1..6466: mol_type = genomic DNA
atggtcataacagcctcctgtctaccgactcagaacggattttaccaaaactgaaaatgcaggctccatgctcagaagctctttaacaggctcgaaaggtccatgctcctttctcctgcccattctatagcataagaagacagtctctgagtgataatcttctcttcaagaagaagaaaactaggaaggagtaagcacaaagatctcttcacattctccgggactgcggtaccaaatatcagcacagcacttcttgaaaaaggatgtagattttaatctgaactttgaaccatcactgaggtggcccgccggtttctgagccttctgccctgcggggacacggtctgcaccctgcccgcggccacggaccatgaccatgaccctccacaccaaagcatctgggatggccctactgcatcagatccaagggaacgagctggagcccctgaaccgtccgcagctcaagatccccctggagcggcccctgggcgaggtgtacctggacagcagcaagcccgccgtgtacaactaccccgagggcgccgcctacgagttcaacgccgcggccgccgccaacgcgcaggtctacggtcagaccggcctcccctacggccccgggtctgaggctgcggcgttcggctccaacggcctggggggtttccccccactcaacagcgtgtctccgagcccgctgatgctactgcacccgccgccgcagctgtcgcctttcctgcagccccacggccagcaggtgccctactacctggagaacgagcccagcggctacacggtgcgcgaggccggcccgccggcattctacaggccaaattcagataatcgacgccagggtggcagagaaagattggccagtaccaatgacaagggaagtatggctatggaatctgccaaggagactcgctactgtgcagtgtgcaatgactatgcttcaggctaccattatggagtctggtcctgtgagggctgcaaggccttcttcaagagaagtattcaaggacataacgactatatgtgtccagccaccaaccagtgcaccattgataaaaacaggaggaagagctgccaggcctgccggctccgtaaatgctacgaagtgggaatgatgaaaggtgggatacgaaaagaccgaagaggagggagaatgttgaaacacaagcgccagagagatgatggggagggcaggggtgaagtggggtctgctggagacatgagagctgccaacctttggccaagcccgctcatgatcaaacgctctaagaagaacagcctggccttgtccctgacggccgaccagatggtcagtgccttgttggatgctgagcccccgatactctattccgagtatgatcctaccagacccttcagtgaagcttcgatgatgggcttactgaccaacctggcagacagggagctggttcacatgatcaactgggcgaagagggtgccaggctttgtggatttgaccctccatgatcaggtccaccttctagaatgtgcctggctagagatcctgatgattggtctcgtctggcgctccatggagcacccagggaagctactgtttgctcctaacttgctcttggacaggaaccagggaaaatgtgtagagggcatggtggagatcttcgacatgctgctggctacatcatctcggttccgcatgatgaatctgcagggagaggagtttgtgtgcctcaaatctattattttgcttaattctggagtgtacacatttctgtccagcaccctgaagtctctggaagagaaggaccatatccaccgagtcctggacaagatcacagacactttgatccacctgatggccaaggcaggcctgaccctgcagcagcagcaccagcggctggcccagctcctcctcatcctctcccacatcaggcacatgagtaacaaaggcatggagcatctgtacagcatgaagtgcaagaacgtggtgcccctctatgacctgctgctggagatgctggacgcccaccgcctacatgcgcccactagccgtggaggggcatccgtggaggagacggaccaaagccacttggccactgcgggctctacttcatcgcattccttgcaaaagtattacatcacgggggaggcagagggtttccctgccacggtctgagagctccctggctcccacacggttcagataatccctgctgcattttaccctcatcatgcaccactttagccaaattctgtctcctgcatacactccggcatgcatccaacaccaatggctttctagatgagtggccattcatttgcttgctcagttcttagtggcacatcttctgtcttctgttgggaacagccaaagggattccaaggctaaatctttgtaacagctctctttcccccttgctatgttactaagcgtgaggattcccgtagctcttcacagctgaactcagtctatgggttggggctcagataactctgtgcatttaagctacttgtagagacccaggcctggagagtagacattttgcctctgataagcactttttaaatggctctaagaataagccacagcaaagaatttaaagtggctcctttaattggtgacttggagaaagctaggtcaagggtttattatagcaccctcttgtattcctatggcaatgcatccttttatgaaagtggtacaccttaaagcttttatatgactgtagcagagtatctggtgattgtcaattcattccccctataggaatacaaggggcacacagggaaggcagatcccctagttggcaagactattttaacttgatacactgcagattcagatgtgctgaaagctctgcctctggctttccggtcatgggttccagttaattcatgcctcccatggacctatggagagcagcaagttgatcttagttaagtctccctatatgagggataagttcctgatttttgtttttatttttgtgttacaaaagaaagccctccctccctgaacttgcagtaaggtcagcttcaggacctgttccagtgggcactgtacttggatcttcccggcgtgtgtgtgccttacacaggggtgaactgttcactgtggtgatgcatgatgagggtaaatggtagttgaaaggagcaggggccctggtgttgcatttagccctggggcatggagctgaacagtacttgtgcaggattgttgtggctactagagaacaagagggaaagtagggcagaaactggatacagttctgaggcacagccagacttgctcagggtggccctgccacaggctgcagctacctaggaacattccttgcagaccccgcattgccctttgggggtgccctgggatccctggggtagtccagctcttcttcatttcccagcgtggccctggttggaagaagcagctgtcacagctgctgtagacagctgtgttcctacaattggcccagcaccctggggcacgggagaagggtggggaccgttgctgtcactactcaggctgactggggcctggtcagattacgtatgcccttggtggtttagagataatccaaaatcagggtttggtttggggaagaaaatcctcccccttcctcccccgccccgttccctaccgcctccactcctgccagctcatttccttcaatttcctttgacctataggctaaaaaagaaaggctcattccagccacagggcagccttccctgggcctttgcttctctagcacaattatgggttacttcctttttcttaacaaaaaagaatgtttgatttcctctgggtgaccttattgtctgtaattgaaaccctattgagaggtgatgtctgtgttagccaatgacccaggtgagctgctcgggcttctcttggtatgtcttgtttggaaaagtggatttcattcatttctgattgtccagttaagtgatcaccaaaggactgagaatctgggagggcaaaaaaaaaaaaaaagtttttatgtgcacttaaatttggggacaattttatgtatctgtgttaaggatatgtttaagaacataattcttttgttgctgtttgtttaagaagcaccttagtttgtttaagaagcaccttatatagtataatatatatttttttgaaattacattgcttgtttatcagacaattgaatgtagtaattctgttctggatttaatttgactgggttaacatgcaaaaaccaaggaaaaatatttagtttttttttttttttttgtatacttttcaagctaccttgtcatgtatacagtcatttatgcctaaagcctggtgattattcatttaaatgaagatcacatttcatatcaacttttgtatccacagtagacaaaatagcactaatccagatgcctattgttggatactgaatgacagacaatcttatgtagcaaagattatgcctgaaaaggaaaattattcagggcagctaattttgcttttaccaaaatatcagtagtaatatttttggacagtagctaatgggtcagtgggttctttttaatgtttatacttagattttcttttaaaaaaattaaaataaaacaaaaaaaaatttctaggactagacgatgtaataccagctaaagccaaacaattatacagtggaaggttttacattattcatccaatgtgtttctattcatgttaagatactactacatttgaagtgggcagagaacatcagatgattgaaatgttcgcccaggggtctccagcaactttggaaatctctttgtatttttacttgaagtgccactaatggacagcagatattttctggctgatgttggtattgggtgtaggaacatgatttaaaaaaaaactcttgcctctgctttcccccactctgaggcaagttaaaatgtaaaagatgtgatttatctggggggctcaggtatggtggggaagtggattcaggaatctggggaatggcaaatatattaagaagagtattgaaagtatttggaggaaaatggttaattctgggtgtgcaccagggttcagtagagtccacttctgccctggagaccacaaatcaactagctccatttacagccatttctaaaatggcagcttcagttctagagaagaaagaacaacatcagcagtaaagtccatggaatagctagtggtctgtgtttcttttcgccattgcctagcttgccgtaatgattctataatgccatcatgcagcaattatgagaggctaggtcatccaaagagaagaccctatcaatgtaggttgcaaaatctaacccctaaggaagtgcagtctttgatttgatttccctagtaaccttgcagatatgtttaaccaagccatagcccatgccttttgagggctgaacaaataagggacttactgataatttacttttgatcacattaaggtgttctcaccttgaaatcttatacactgaaatggccattgatttaggccactggcttagagtactccttcccctgcatgacactgattacaaatactttcctattcatactttccaattatgagatggactgtgggtactgggagtgatcactaacaccatagtaatgtctaatattcacaggcagatctgcttggggaagctagttatgtgaaaggcaaatagagtcatacagtagctcaaaaggcaaccataattctctttggtgcaggtcttgggagcgtgatctagattacactgcaccattcccaagttaatcccctgaaaacttactctcaactggagcaaatgaactttggtcccaaatatccatcttttcagtagcgttaattatgctctgtttccaactgcatttcctttccaattgaattaaagtgtggcctcgtttttagtcatttaaaattgttttctaagtaattgctgcctctattatggcacttcaattttgcactgtcttttgagattcaagaaaaatttctattcttttttttgcatccaattgtgcctgaacttttaaaatatgtaaatgctgccatgttccaaacccatcgtcagtgtgtgtgtttagagctgtgcaccctagaaacaacatattgtcccatgagcaggtgcctgagacacagacccctttgcattcacagagaggtcattggttatagagacttgaattaataagtgacattatgccagtttctgttctctcacaggtgataaacaatgctttttgtgcactacatactcttcagtgtagagctcttgttttatgggaaaaggctcaaatgccaaattgtgtttgatggattaatatgcccttttgccgatgcatactattactgatgtgactcggttttgtcgcagctttgctttgtttaatgaaacacacttgtaaacctcttttgcactttgaaaaagaatccagcgggatgctcgagcacctgtaaacaattttctcaacctatttgatgttcaaataaagaattaaactaaa

SEQ ID NO: 1506 - DNA, 6357 bp, Homo sapiens
  source 1..6357: mol_type = genomic DNA
gacaaacagagatatatcggagtctggcacggggcacataaggcagcacattagagaaagccggcccctggatccgtctttcgcgtttattttaagcccagtcttccctgggccacctttagcagatcctcgtgcgcccccgccccctggccgtgaaactcagcctctatccagcagcgacgacaagtaaagtggcccgccggtttctgagccttctgccctgcggggacacggtctgcaccctgcccgcggccacggaccatgaccatgaccctccacaccaaagcatctgggatggccctactgcatcagatccaagggaacgagctggagcccctgaaccgtccgcagctcaagatccccctggagcggcccctgggcgaggtgtacctggacagcagcaagcccgccgtgtacaactaccccgagggcgccgcctacgagttcaacgccgcggccgccgccaacgcgcaggtctacggtcagaccggcctcccctacggccccgggtctgaggctgcggcgttcggctccaacggcctggggggtttccccccactcaacagcgtgtctccgagcccgctgatgctactgcacccgccgccgcagctgtcgcctttcctgcagccccacggccagcaggtgccctactacctggagaacgagcccagcggctacacggtgcgcgaggccggcccgccggcattctacaggccaaattcagataatcgacgccagggtggcagagaaagattggccagtaccaatgacaagggaagtatggctatggaatctgccaaggagactcgctactgtgcagtgtgcaatgactatgcttcaggctaccattatggagtctggtcctgtgagggctgcaaggccttcttcaagagaagtattcaaggacataacgactatatgtgtccagccaccaaccagtgcaccattgataaaaacaggaggaagagctgccaggcctgccggctccgtaaatgctacgaagtgggaatgatgaaaggtgggatacgaaaagaccgaagaggagggagaatgttgaaacacaagcgccagagagatgatggggagggcaggggtgaagtggggtctgctggagacatgagagctgccaacctttggccaagcccgctcatgatcaaacgctctaagaagaacagcctggccttgtccctgacggccgaccagatggtcagtgccttgttggatgctgagcccccgatactctattccgagtatgatcctaccagacccttcagtgaagcttcgatgatgggcttactgaccaacctggcagacagggagctggttcacatgatcaactgggcgaagagggtgccaggctttgtggatttgaccctccatgatcaggtccaccttctagaatgtgcctggctagagatcctgatgattggtctcgtctggcgctccatggagcacccagggaagctactgtttgctcctaacttgctcttggacaggaaccagggaaaatgtgtagagggcatggtggagatcttcgacatgctgctggctacatcatctcggttccgcatgatgaatctgcagggagaggagtttgtgtgcctcaaatctattattttgcttaattctggagtgtacacatttctgtccagcaccctgaagtctctggaagagaaggaccatatccaccgagtcctggacaagatcacagacactttgatccacctgatggccaaggcaggcctgaccctgcagcagcagcaccagcggctggcccagctcctcctcatcctctcccacatcaggcacatgagtaacaaaggcatggagcatctgtacagcatgaagtgcaagaacgtggtgcccctctatgacctgctgctggagatgctggacgcccaccgcctacatgcgcccactagccgtggaggggcatccgtggaggagacggaccaaagccacttggccactgcgggctctacttcatcgcattccttgcaaaagtattacatcacgggggaggcagagggtttccctgccacggtctgagagctccctggctcccacacggttcagataatccctgctgcattttaccctcatcatgcaccactttagccaaattctgtctcctgcatacactccggcatgcatccaacaccaatggctttctagatgagtggccattcatttgcttgctcagttcttagtggcacatcttctgtcttctgttgggaacagccaaagggattccaaggctaaatctttgtaacagctctctttcccccttgctatgttactaagcgtgaggattcccgtagctcttcacagctgaactcagtctatgggttggggctcagataactctgtgcatttaagctacttgtagagacccaggcctggagagtagacattttgcctctgataagcactttttaaatggctctaagaataagccacagcaaagaatttaaagtggctcctttaattggtgacttggagaaagctaggtcaagggtttattatagcaccctcttgtattcctatggcaatgcatccttttatgaaagtggtacaccttaaagcttttatatgactgtagcagagtatctggtgattgtcaattcattccccctataggaatacaaggggcacacagggaaggcagatcccctagttggcaagactattttaacttgatacactgcagattcagatgtgctgaaagctctgcctctggctttccggtcatgggttccagttaattcatgcctcccatggacctatggagagcagcaagttgatcttagttaagtctccctatatgagggataagttcctgatttttgtttttatttttgtgttacaaaagaaagccctccctccctgaacttgcagtaaggtcagcttcaggacctgttccagtgggcactgtacttggatcttcccggcgtgtgtgtgccttacacaggggtgaactgttcactgtggtgatgcatgatgagggtaaatggtagttgaaaggagcaggggccctggtgttgcatttagccctggggcatggagctgaacagtacttgtgcaggattgttgtggctactagagaacaagagggaaagtagggcagaaactggatacagttctgaggcacagccagacttgctcagggtggccctgccacaggctgcagctacctaggaacattccttgcagaccccgcattgccctttgggggtgccctgggatccctggggtagtccagctcttcttcatttcccagcgtggccctggttggaagaagcagctgtcacagctgctgtagacagctgtgttcctacaattggcccagcaccctggggcacgggagaagggtggggaccgttgctgtcactactcaggctgactggggcctggtcagattacgtatgcccttggtggtttagagataatccaaaatcagggtttggtttggggaagaaaatcctcccccttcctcccccgccccgttccctaccgcctccactcctgccagctcatttccttcaatttcctttgacctataggctaaaaaagaaaggctcattccagccacagggcagccttccctgggcctttgcttctctagcacaattatgggttacttcctttttcttaacaaaaaagaatgtttgatttcctctgggtgaccttattgtctgtaattgaaaccctattgagaggtgatgtctgtgttagccaatgacccaggtgagctgctcgggcttctcttggtatgtcttgtttggaaaagtggatttcattcatttctgattgtccagttaagtgatcaccaaaggactgagaatctgggagggcaaaaaaaaaaaaaaagtttttatgtgcacttaaatttggggacaattttatgtatctgtgttaaggatatgtttaagaacataattcttttgttgctgtttgtttaagaagcaccttagtttgtttaagaagcaccttatatagtataatatatatttttttgaaattacattgcttgtttatcagacaattgaatgtagtaattctgttctggatttaatttgactgggttaacatgcaaaaaccaaggaaaaatatttagtttttttttttttttttgtatacttttcaagctaccttgtcatgtatacagtcatttatgcctaaagcctggtgattattcatttaaatgaagatcacatttcatatcaacttttgtatccacagtagacaaaatagcactaatccagatgcctattgttggatactgaatgacagacaatcttatgtagcaaagattatgcctgaaaaggaaaattattcagggcagctaattttgcttttaccaaaatatcagtagtaatatttttggacagtagctaatgggtcagtgggttctttttaatgtttatacttagattttcttttaaaaaaattaaaataaaacaaaaaaaaatttctaggactagacgatgtaataccagctaaagccaaacaattatacagtggaaggttttacattattcatccaatgtgtttctattcatgttaagatactactacatttgaagtgggcagagaacatcagatgattgaaatgttcgcccaggggtctccagcaactttggaaatctctttgtatttttacttgaagtgccactaatggacagcagatattttctggctgatgttggtattgggtgtaggaacatgatttaaaaaaaaactcttgcctctgctttcccccactctgaggcaagttaaaatgtaaaagatgtgatttatctggggggctcaggtatggtggggaagtggattcaggaatctggggaatggcaaatatattaagaagagtattgaaagtatttggaggaaaatggttaattctgggtgtgcaccagggttcagtagagtccacttctgccctggagaccacaaatcaactagctccatttacagccatttctaaaatggcagcttcagttctagagaagaaagaacaacatcagcagtaaagtccatggaatagctagtggtctgtgtttcttttcgccattgcctagcttgccgtaatgattctataatgccatcatgcagcaattatgagaggctaggtcatccaaagagaagaccctatcaatgtaggttgcaaaatctaacccctaaggaagtgcagtctttgatttgatttccctagtaaccttgcagatatgtttaaccaagccatagcccatgccttttgagggctgaacaaataagggacttactgataatttacttttgatcacattaaggtgttctcaccttgaaatcttatacactgaaatggccattgatttaggccactggcttagagtactccttcccctgcatgacactgattacaaatactttcctattcatactttccaattatgagatggactgtgggtactgggagtgatcactaacaccatagtaatgtctaatattcacaggcagatctgcttggggaagctagttatgtgaaaggcaaatagagtcatacagtagctcaaaaggcaaccataattctctttggtgcaggtcttgggagcgtgatctagattacactgcaccattcccaagttaatcccctgaaaacttactctcaactggagcaaatgaactttggtcccaaatatccatcttttcagtagcgttaattatgctctgtttccaactgcatttcctttccaattgaattaaagtgtggcctcgtttttagtcatttaaaattgttttctaagtaattgctgcctctattatggcacttcaattttgcactgtcttttgagattcaagaaaaatttctattcttttttttgcatccaattgtgcctgaacttttaaaatatgtaaatgctgccatgttccaaacccatcgtcagtgtgtgtgtttagagctgtgcaccctagaaacaacatattgtcccatgagcaggtgcctgagacacagacccctttgcattcacagagaggtcattggttatagagacttgaattaataagtgacattatgccagtttctgttctctcacaggtgataaacaatgctttttgtgcactacatactcttcagtgtagagctcttgttttatgggaaaaggctcaaatgccaaattgtgtttgatggattaatatgcccttttgccgatgcatactattactgatgtgactcggttttgtcgcagctttgctttgtttaatgaaacacacttgtaaacctcttttgcactttgaaaaagaatccagcgggatgctcgagcacctgtaaacaattttctcaacctatttgatgttcaaataaagaattaaactaaa

SEQ ID NO: 1507 - DNA, 731 bp, Homo sapiens
  source 1..731: mol_type = genomic DNA
atgcaaccgcacaccccattctatctgccctatctcggttacagtgtagtcctccccagggtcatcctatgtacacactacgtatttctagccaacgaggagggggaatcaaacagaaagagagacaaacagagatatatcggagtctggcacggggcacataaggcagcacattagagaaagccggcccctggatccgtctttcgcgtttattttaagcccagtcttccctgggccacctttagcagatcctcgtgcgcccccgccccctggccgtgaaactcagcctctatccagcagcgacgacaagtaaagtggcccgccggtttctgagccttctgccctgcggggacacggtctgcaccctgcccgcggccacggaccatgaccatgaccctccacaccaaagcatctgggatggccctactgcatcagatccaagggaacgagctggagcccctgaaccgtccgcagctcaagatccccctggagcggcccctgggcgaggtgtacctggacagcagcaagcccgccgtgtacaactaccccgagggcgccgcctacgagttcaacgccgcggccgccgccaacgcgcaggtctacggtcagaccggcctcccctacggccccgggtctgaggctgcggcgttcggctccaacggcctggggggtttccccccactcaacagcgtgtctccgagcccgctgatgctactgcacccgccgccgca

SEQ ID NO: 1508 - DNA, 5978 bp, Homo sapiens
  source 1..5978: mol_type = genomic DNA
aaacacatccacacactctctctgcctagttcacacactgagccactcgcacatgcgagcacattccttccttccttctcactctctcggcccttgacttctacaagcccatggaacatttctggaaagacgttcttgatccagcagggtggcccgccggtttctgagccttctgccctgcggggacacggtctgcaccctgcccgcggccacggaccatgaccatgaccctccacaccaaagcatctgggatggccctactgcatcagatccaagggaacgagctggagcccctgaaccgtccgcagctcaagatccccctggagcggcccctgggcgaggtgtacctggacagcagcaagcccgccgtgtacaactaccccgagggcgccgcctacgagttcaacgccgcggccgccgccaacgcgcaggtctacggtcagaccggcctcccctacggccccgggtctgaggctgcggcgttcggctccaacggcctggggggtttccccccactcaacagcgtgtctccgagcccgctgatgctactgcacccgccgccgcagctgtcgcctttcctgcagccccacggccagcaggtgccctactacctggagaacgagcccagcggctacacggtgcgcgaggccggcccgccggcattctacaggccaaattcagataatcgacgccagggtggcagagaaagattggccagtaccaatgacaagggaagtatggctatggaatctgccaaggagactcgctactgtgcagtgtgcaatgactatgcttcaggctaccattatggagtctggtcctgtgagggctgcaaggccttcttcaagagaagtattcaaggacataacgactatatgtgtccagccaccaaccagtgcaccattgataaaaacaggaggaagagctgccaggcctgccggctccgtaaatgctacgaagtgggaatgatgaaaggtggctttgtggatttgaccctccatgatcaggtccaccttctagaatgtgcctggctagagatcctgatgattggtctcgtctggcgctccatggagcacccagggaagctactgtttgctcctaacttgctcttggacaggaaccagggaaaatgtgtagagggcatggtggagatcttcgacatgctgctggctacatcatctcggttccgcatgatgaatctgcagggagaggagtttgtgtgcctcaaatctattattttgcttaattctggagtgtacacatttctgtccagcaccctgaagtctctggaagagaaggaccatatccaccgagtcctggacaagatcacagacactttgatccacctgatggccaaggcaggcctgaccctgcagcagcagcaccagcggctggcccagctcctcctcatcctctcccacatcaggcacatgagtaacaaaggcatggagcatctgtacagcatgaagtgcaagaacgtggtgcccctctatgacctgctgctggagatgctggacgcccaccgcctacatgcgcccactagccgtggaggggcatccgtggaggagacggaccaaagccacttggccactgcgggctctacttcatcgcattccttgcaaaagtattacatcacgggggaggcagagggtttccctgccacggtctgagagctccctggctcccacacggttcagataatccctgctgcattttaccctcatcatgcaccactttagccaaattctgtctcctgcatacactccggcatgcatccaacaccaatggctttctagatgagtggccattcatttgcttgctcagttcttagtggcacatcttctgtcttctgttgggaacagccaaagggattccaaggctaaatctttgtaacagctctctttcccccttgctatgttactaagcgtgaggattcccgtagctcttcacagctgaactcagtctatgggttggggctcagataactctgtgcatttaagctacttgtagagacccaggcctggagagtagacattttgcctctgataagcactttttaaatggctctaagaataagccacagcaaagaatttaaagtggctcctttaattggtgacttggagaaagctaggtcaagggtttattatagcaccctcttgtattcctatggcaatgcatccttttatgaaagtggtacaccttaaagcttttatatgactgtagcagagtatctggtgattgtcaattcattccccctataggaatacaaggggcacacagggaaggcagatcccctagttggcaagactattttaacttgatacactgcagattcagatgtgctgaaagctctgcctctggctttccggtcatgggttccagttaattcatgcctcccatggacctatggagagcagcaagttgatcttagttaagtctccctatatgagggataagttcctgatttttgtttttatttttgtgttacaaaagaaagccctccctccctgaacttgcagtaaggtcagcttcaggacctgttccagtgggcactgtacttggatcttcccggcgtgtgtgtgccttacacaggggtgaactgttcactgtggtgatgcatgatgagggtaaatggtagttgaaaggagcaggggccctggtgttgcatttagccctggggcatggagctgaacagtacttgtgcaggattgttgtggctactagagaacaagagggaaagtagggcagaaactggatacagttctgaggcacagccagacttgctcagggtggccctgccacaggctgcagctacctaggaacattccttgcagaccccgcattgccctttgggggtgccctgggatccctggggtagtccagctcttcttcatttcccagcgtggccctggttggaagaagcagctgtcacagctgctgtagacagctgtgttcctacaattggcccagcaccctggggcacgggagaagggtggggaccgttgctgtcactactcaggctgactggggcctggtcagattacgtatgcccttggtggtttagagataatccaaaatcagggtttggtttggggaagaaaatcctcccccttcctcccccgccccgttccctaccgcctccactcctgccagctcatttccttcaatttcctttgacctataggctaaaaaagaaaggctcattccagccacagggcagccttccctgggcctttgcttctctagcacaattatgggttacttcctttttcttaacaaaaaagaatgtttgatttcctctgggtgaccttattgtctgtaattgaaaccctattgagaggtgatgtctgtgttagccaatgacccaggtgagctgctcgggcttctcttggtatgtcttgtttggaaaagtggatttcattcatttctgattgtccagttaagtgatcaccaaaggactgagaatctgggagggcaaaaaaaaaaaaaaagtttttatgtgcacttaaatttggggacaattttatgtatctgtgttaaggatatgtttaagaacataattcttttgttgctgtttgtttaagaagcaccttagtttgtttaagaagcaccttatatagtataatatatatttttttgaaattacattgcttgtttatcagacaattgaatgtagtaattctgttctggatttaatttgactgggttaacatgcaaaaaccaaggaaaaatatttagtttttttttttttttttgtatacttttcaagctaccttgtcatgtatacagtcatttatgcctaaagcctggtgattattcatttaaatgaagatcacatttcatatcaacttttgtatccacagtagacaaaatagcactaatccagatgcctattgttggatactgaatgacagacaatcttatgtagcaaagattatgcctgaaaaggaaaattattcagggcagctaattttgcttttaccaaaatatcagtagtaatatttttggacagtagctaatgggtcagtgggttctttttaatgtttatacttagattttcttttaaaaaaattaaaataaaacaaaaaaaaatttctaggactagacgatgtaataccagctaaagccaaacaattatacagtggaaggttttacattattcatccaatgtgtttctattcatgttaagatactactacatttgaagtgggcagagaacatcagatgattgaaatgttcgcccaggggtctccagcaactttggaaatctctttgtatttttacttgaagtgccactaatggacagcagatattttctggctgatgttggtattgggtgtaggaacatgatttaaaaaaaaactcttgcctctgctttcccccactctgaggcaagttaaaatgtaaaagatgtgatttatctggggggctcaggtatggtggggaagtggattcaggaatctggggaatggcaaatatattaagaagagtattgaaagtatttggaggaaaatggttaattctgggtgtgcaccagggttcagtagagtccacttctgccctggagaccacaaatcaactagctccatttacagccatttctaaaatggcagcttcagttctagagaagaaagaacaacatcagcagtaaagtccatggaatagctagtggtctgtgtttcttttcgccattgcctagcttgccgtaatgattctataatgccatcatgcagcaattatgagaggctaggtcatccaaagagaagaccctatcaatgtaggttgcaaaatctaacccctaaggaagtgcagtctttgatttgatttccctagtaaccttgcagatatgtttaaccaagccatagcccatgccttttgagggctgaacaaataagggacttactgataatttacttttgatcacattaaggtgttctcaccttgaaatcttatacactgaaatggccattgatttaggccactggcttagagtactccttcccctgcatgacactgattacaaatactttcctattcatactttccaattatgagatggactgtgggtactgggagtgatcactaacaccatagtaatgtctaatattcacaggcagatctgcttggggaagctagttatgtgaaaggcaaatagagtcatacagtagctcaaaaggcaaccataattctctttggtgcaggtcttgggagcgtgatctagattacactgcaccattcccaagttaatcccctgaaaacttactctcaactggagcaaatgaactttggtcccaaatatccatcttttcagtagcgttaattatgctctgtttccaactgcatttcctttccaattgaattaaagtgtggcctcgtttttagtcatttaaaattgttttctaagtaattgctgcctctattatggcacttcaattttgcactgtcttttgagattcaagaaaaatttctattcttttttttgcatccaattgtgcctgaacttttaaaatatgtaaatgctgccatgttccaaacccatcgtcagtgtgtgtgtttagagctgtgcaccctagaaacaacatattgtcccatgagcaggtgcctgagacacagacccctttgcattcacagagaggtcattggttatagagacttgaattaataagtgacattatgccagtttctgttctctcacaggtgataaacaatgctttttgtgcactacatactcttcagtgtagagctcttgttttatgggaaaaggctcaaatgccaaattgtgtttgatggattaatatgcccttttgccgatgcatactattactgatgtgactcggttttgtcgcagctttgctttgtttaatgaaacacacttgtaaacctcttttgcactttgaaaaagaatccagcgggatgctcgagcacctgtaaacaattttctcaacctatttgatgttcaaataaagaattaaactaaa

SEQ ID NO: 1509 - DNA, 5418 bp, Homo sapiens
  source 1..5418: mol_type = genomic DNA
gcttaaaaataatctcctgccagcccagtgacaagcctgtcccacccggggagaatgccccggagtggcgtgcgggtcagccagggtctgcgcctcgcagccactgtggaaggagcgcggccggtccaggacacaggagaccactttgtgacttcaatggcgaaggccaaattcagataatcgacgccagggtggcagagaaagattggccagtaccaatgacaagggaagtatggctatggaatctgccaaggagactcgctactgtgcagtgtgcaatgactatgcttcaggctaccattatggagtctggtcctgtgagggctgcaaggccttcttcaagagaagtattcaaggacataacgactatatgtgtccagccaccaaccagtgcaccattgataaaaacaggaggaagagctgccaggcctgccggctccgtaaatgctacgaagtgggaatgatgaaaggtgggatacgaaaagaccgaagaggagggagaatgttgaaacacaagcgccagagagatgatggggagggcaggggtgaagtggggtctgctggagacatgagagctgccaacctttggccaagcccgctcatgatcaaacgctctaagaagaacagcctggccttgtccctgacggccgaccagatggtcagtgccttgttggatgctgagcccccgatactctattccgagtatgatcctaccagacccttcagtgaagcttcgatgatgggcttactgaccaacctggcagacagggagctggttcacatgatcaactgggcgaagagggtgccaggctttgtggatttgaccctccatgatcaggtccaccttctagaatgtgcctggctagagatcctgatgattggtctcgtctggcgctccatggagcacccagggaagctactgtttgctcctaacttgctcttggacaggaaccagggaaaatgtgtagagggcatggtggagatcttcgacatgctgctggctacatcatctcggttccgcatgatgaatctgcagggagaggagtttgtgtgcctcaaatctattattttgcttaattctggtatctcacatgtagaagcaaagaagagaatcctgaacttgcatcctaaaatatttggaaacaagtggtttcctcgtgtctaaagcctctggtcataaggcctcacagtatcctgcagatcatcaaatccgtgtgtggacgtggggacattttgttttgaggcagttacatgaccatgggcaagtaaattagtctctctggccttcagttttctcatttgcaatgattcaatggtttgccttaaagtgtcttaagaaggataggatagctacccacaaactttggatcaaattttcttcaaaacatccttcccctgactttaaaatatgccctggcaaccaacactcaacacctgtagctagatgagttataacagagtgactgaagagagctcccacaattcctagttattaaatacctgactaattttcattaggagacatttaagaactttagtgatgggaagatttacatatataattgatagtacaatctgacagagctgaatagctcctgtttgtcaactgttaaattctttgtgcaattaggtcaaagatcaagatcaaaacaagggctgcccattgacctgttcactcctgagaaaaatggcaaaccattgaatcataaatcatgacagccaaaataattttaggatattaatgcacccctcatctttgcaaatgagaaaactgaaggccagagagactaatttacttgcccatttttgataaaaatgtcaccatttacagaatgtggactcctatgttggagtctgttgaaggacatggcacatttaacagcatcagagcattttttattaaaatttaatttgtgcatgacttctaatgctgaagaacgccaagctaggaagaagtcatgggctgagatggggacagagagaacacacaatattcagtgactgtccgtgcagctggctgcccttgaaaatatccgaactatccactgggaaaatgcctgtccccttggggtaattaccagagtttcaacatgcccaaagctgcctcatcttcagggggaacttgttctagcgattttagtatcaagaagctaatggtcccagggaaagggttatttttaatatttagctactgtgctaaaaatcacctaagtttctagagtcttgggaaatttcataagggaaagaacaaaggcaacttgttgactacccactggtcattctcctctggtcttattacatacatggatgccagtttagattgtgtttatataggaaaaattaaatgtgtgagcctccttaaggaacatcatcaatacagatatatcagatagttctgtccagcaaaaaacgtgcttatttgctacaagtaaatttttatttatttttctcacttccctcactccttcaaatttccaggtaaatagctgcccaggagttgcttcatctctgtcccaaaatacctagacaattgcgggataaggagaatggcagggagggagtagtggctaaaatcacacccttcaaaagaaagtgtgtaggacacacaattgtgagaagtctgaatgccatgcacatagggtatgactcactttgaaaattgtttataatcaaggaaatgaaaatgagttaatttcgtgcatgcatcatttaaagccaaatgagaagaaacttctaatttattttgttacttttcggctaacactggcagtatgtaacagatttattttgcagaaacatctagattgtccgtgatcttgatcctgcccttatgtgtcttgtctttgaaacccagtgtttcctggatatatggttcaggagacaagtttccagaatcaagttaggacccaggtcttctttttttccaaaccaaacattcttgctaatcctaaactacctgaggcagcctgtggtggcctcagctctaaaaccattgtttaaaggcttctacccatcaatggcccttcagcagagtggtacggttaacggggtagggtctggagtcaggggagacctgggttcaaatcctacatctttacacctctaatccccagtgtccttgtctataaattgggaatatagccatgtcatgggattcttgtgagggttaaatgaggtaaaacacatacaatgcttagcatgtatacaattaagcactaaataattgaaacacattaagtactaaatgaatgtcagcagcttatcactattatctgtataatgataccaagggtgtgccgactcatacccttaggggttggctggattcggccttttctctcgggaaaacatacctgatttattaatagtgctttcaagcatgtgataaatttctcaaactgcctgtcttgttccctagaaacaccaggaaggcctacctcaaatagcaacagagaaacctatcggagccttaccctacagctttccttggggcacgggtgagcaatctgccttagaggggagaggctctgtgctgaggctctttgaatgctttgaataaatagatccccagataatgaaaagacttcaaaacaaattctacaagaaactgagtagtgtttatagtgaggccctagtgtacatgcaaaaaacccccactgcccttgcttaaatgtatctgattaacttgaatacatttttaaatgagggcttttttccctctttcagtgtttcggccagtcatttgccacttctcattccatcttagttctctgtaaagaaggtgccagagacctaaggtgcccaaggcaattttgcattttacaattctaagctttagaatgaagtcatcaatttgctacatccggactacagtgcaattattcctttgccttgctggaaattggagtgaaatctttctagctgtcaatttcaactcagttgcagtagtgttttgaagaattaatggcgataaggttagaaaattttaagtcaaacgtagggaaaaagtaccagctagaccatcataagcatttgctttgaaagcatgcttctaaagtgtgtttaacctcaaataacagtcacaaatatggttattatgaatgtatgcacagatttttatgtttctaattttaagaagttctagggagctccctgtaacgatttagggaatctctagattctgatatactgcaagtcttttaatggtaggaatcacattgaattaattttgtaggcccagggcctaaatttagtaggtgttcagtacctattggcatcaattcatatgtaggtttaaaatactgtatgaagatacagaatcaccaccatcaaatcaaattgaaatatgtaacaggctagtataatattaacatctgactttaaacaacaacaaagaaaccaaatgagtaactcctcccttcaaactaatagtcagtttcttccaactcagtctctttctcctctcaggaagaatgcgtatctaaaaatttcccattgcagactgctggaaacaacattctaaactatttatgcttctgcaataacctttccaatttgctggaccagtgcaagattaaacacgagatatctcaagtctcaatgtaaaggaacaccacgacagcctggactgtgggtgaagttcattcttccccagcagactctgcctttcattctcggggttgggtgtgccccaaacagaggtaccgacggtaacgaagcccaagaatgttcaaccacaacctgtctgtgaaggtgttggatgacgtttgccattcaggtgaagattatttatgttccagtcccacctgagtagcaaagtgaacactgtgctgaatgctcagaaagatgttaatgaaccgtgctggacagagcagagctgaaaggcgccttgcgagtgtcgtagtgagaatgtggctgtcccagctgcaaagccctgttaggaggcatgaggaagcacttgctgccctaagaaacgatgccttcgacattttcaaaagatctatgtggctgtctgaaacaatgcggagagcagatagacgcaatatttgggaaccaaagagtgactgctgttggcgttgcatcataacataagcgctttcccccttctcgtcactatcatttgtatcaaccaaagaactgatctctggtatcctcgaaggaatgctgtggggatattcttcatctctgttcatggtacatcagcaatttgtggggaaaagatggactatataacacaatgatctgcctaaaagaaactgtctctacttatagggggctgagcaaaccttagagcatctgcggatgctcgtcattatcttcaaaagtccccaagagtttttctccatactttattattgctattttgtttaggctagaaaaaaaaaaactcataaaattgtcttcaaaccaaaccaaagg

SEQ ID NO: 1510 - DNA, 1788 bp, Homo sapiens
  source 1..1788: mol_type = genomic DNA
ctcggtctttaaaaggaagaaggggcttatcgttaagtcgcttgtgatcttttcagtttctccagctgctggctttttggacacccactcccccgccaggaggcagttgcaagcgcggaggctgcgagaaataactgcctcttgaaacttgcagggcgaagagcaggcggcgagcgctgggccggggagggaccacccgagctgcgacgggctctggggctgcggggcagggctggcgcccggagcctgagctgcaggaggtgcgctcgctttcctcaacaggtggcggcggggcgcgcgccgggagaccccccctaatgcgggaaaagcacgtgtccgcattttagagaaggcaaggccggtgtgtttatctgcaagccattatacttgcccacgaatctttgagaacattataatgacctttgtgcctcttcttgcaaggtgttttctcagctgttatctcaagacatggatataaaaaactcaccatctagccttaattctccttcctcctacaactgcagtcaatccatcttacccctggagcacggctccatatacataccttcctcctatgtagacagccaccatgaatatccagccatgacattctatagccctgctgtgatgaattacagcattcccagcaatgtcactaacttggaaggtgggcctggtcggcagaccacaagcccaaatgtgttgtggccaacacctgggcacctttctcctttagtggtccatcgccagttatcacatctgtatgcggaacctcaaaagagtccctggtgtgaagcaagatcgctagaacacaccttacctgtaaacagagagacactgaaaaggaaggttagtgggaaccgttgcgccagccctgttactggtccaggttcaaagagggatgctcacttctgcgctgtctgcagcgattacgcatcgggatatcactatggagtctggtcgtgtgaaggatgtaaggccttttttaaaagaagcattcaaggacataatgattatatttgtccagctacaaatcagtgtacaatcgataaaaaccggcgcaagagctgccaggcctgccgacttcggaagtgttacgaagtgggaatggtgaagtgtggctcccggagagagagatgtgggtaccgccttgtgcggagacagagaagtgccgacgagcagctgcactgtgccggcaaggccaagagaagtggcggccacgcgccccgagtgcgggagctgctgctggacgccctgagccccgagcagctagtgctcaccctcctggaggctgagccgccccatgtgctgatcagccgccccagtgcgcccttcaccgaggcctccatgatgatgtccctgaccaagttggccgacaaggagttggtacacatgatcagctgggccaagaagattcccggtatgtaccctctggtcacagcgacccaggatgctgacagcagccggaagctggctcacttgctgaacgccgtgaccgatgctttggtttgggtgattgccaagagcggcatctcctcccagcagcaatccatgcgcctggctaacctcctgatgctcctgtcccacgtcaggcatgcgagtaacaagggcatggaacatctgctcaacatgaagtgcaaaaatgtggtcccagtgtatgacctgctgctggagatgctgaatgcccacgtgcttcgcgggtgcaagtcctccatcacggggtccgagtgcagcccggcagaggacagtaaaagcaaagagggctcccagaacccacagtctcagtga

SEQ ID NO: 1511 - DNA, 2060 bp, Homo sapiens
  source 1..2060: mol_type = genomic DNA
tttcagtttctccagctgctggctttttggacacccactcccccgccaggaggcagttgcaagcgcggaggctgcgagaaataactgcctcttgaaacttgcagggcgaagagcaggcggcgagcgctgggccggggagggaccacccgagctgcgacgggctctggggctgcggggcagggctggcgcccggagcctgagctgcaggaggtgcgctcgctttcctcaacaggtggcggcggggcgcgcgccgggagaccccccctaatgcgggaaaagcacgtgtccgcattttagagaaggcaaggccggtgtgtttatctgcaagccattatacttgcccacgaatctttgagaacattataatgacctttgtgcctcttcttgcaaggtgttttctcagctgttatctcaagacatggatataaaaaactcaccatctagccttaattctccttcctcctacaactgcagtcaatccatcttacccctggagcacggctccatatacataccttcctcctatgtagacagccaccatgaatatccagccatgacattctatagccctgctgtgatgaattacagcattcccagcaatgtcactaacttggaaggtgggcctggtcggcagaccacaagcccaaatgtgttgtggccaacacctgggcacctttctcctttagtggtccatcgccagttatcacatctgtatgcggaacctcaaaagagtccctggtgtgaagcaagatcgctagaacacaccttacctgtaaacagagagacactgaaaaggaaggttagtgggaaccgttgcgccagccctgttactggtccaggttcaaagagggatgctcacttctgcgctgtctgcagcgattacgcatcgggatatcactatggagtctggtcgtgtgaaggatgtaaggccttttttaaaagaagcattcaaggacataatgattatatttgtccagctacaaatcagtgtacaatcgataaaaaccggcgcaagagctgccaggcctgccgacttcggaagtgttacgaagtgggaatggtgaagtgtggctcccggagagagagatgtgggtaccgccttgtgcggagacagagaagtgccgacgagcagctgcactgtgccggcaaggccaagagaagtggcggccacgcgccccgagtgcgggagctgctgctggacgccctgagccccgagcagctagtgctcaccctcctggaggctgagccgccccatgtgctgatcagccgccccagtgcgcccttcaccgaggcctccatgatgatgtccctgaccaagttggccgacaaggagttggtacacatgatcagctgggccaagaagattcccggctttgtggagctcagcctgttcgaccaagtgcggctcttggagagctgttggatggaggtgttaatgatggggctgatgtggcgctcaattgaccaccccggcaagctcatctttgctccagatcttgttctggacagggatgaggggaaatgcgtagaaggaattctggaaatctttgacatgctcctggcaactacttcaaggtttcgagagttaaaactccaacacaaagaatatctctgtgtcaaggccatgatcctgctcaattccagtatgtaccctctggtcacagcgacccaggatgctgacagcagccggaagctggctcacttgctgaacgccgtgaccgatgctttggtttgggtgattgccaagagcggcatctcctcccagcagcaatccatgcgcctggctaacctcctgatgctcctgtcccacgtcaggcatgcgagtaacaagggcatggaacatctgctcaacatgaagtgcaaaaatgtggtcccagtgtatgacctgctgctggagatgctgaatgcccacgtgcttcgcgggtgcaagtcctccatcacggggtccgagtgcagcccggcagaggacagtaaaagcaaagagggctcccagaacccacagtctcagtgacgcctggccctgaggtgaactggcccacagaggtcacaggctgaagcgt

SEQ ID NO: 1512 - DNA, 2454 bp, Homo sapiens
  source 1..2454: mol_type = genomic DNA
ctcggtctttaaaaggaagaaggggcttatcgttaagtcgcttgtgatcttttcagtttctccagctgctggctttttggacacccactcccccgccaggaggcagttgcaagcgcggaggctgcgagaaataactgcctcttgaaacttgcagggcgaagagcaggcggcgagcgctgggccggggagggaccacccgagctgcgacgggctctggggctgcggggcagggctggcgcccggagcctgagctgcaggaggtgcgctcgctttcctcaacaggtggcggcggggcgcgcgccgggagaccccccctaatgcgggaaaagcacgtgtccgcattttagagaaggcaaggccggtgtgtttatctgcaagccattatacttgcccacgaatctttgagaacattataatgacctttgtgcctcttcttgcaaggtgttttctcagctgttatctcaagacatggatataaaaaactcaccatctagccttaattctccttcctcctacaactgcagtcaatccatcttacccctggagcacggctccatatacataccttcctcctatgtagacagccaccatgaatatccagccatgacattctatagccctgctgtgatgaattacagcattcccagcaatgtcactaacttggaaggtgggcctggtcggcagaccacaagcccaaatgtgttgtggccaacacctgggcacctttctcctttagtggtccatcgccagttatcacatctgtatgcggaacctcaaaagagtccctggtgtgaagcaagatcgctagaacacaccttacctgtaaacagagagacactgaaaaggaaggttagtgggaaccgttgcgccagccctgttactggtccaggttcaaagagggatgctcacttctgcgctgtctgcagcgattacgcatcgggatatcactatggagtctggtcgtgtgaaggatgtaaggccttttttaaaagaagcattcaaggacataatgattatatttgtccagctacaaatcagtgtacaatcgataaaaaccggcgcaagagctgccaggcctgccgacttcggaagtgttacgaagtgggaatggtgaagtgtggctcccggagagagagatgtgggtaccgccttgtgcggagacagagaagtgccgacgagcagctgcactgtgccggcaaggccaagagaagtggcggccacgcgccccgagtgcgggagctgctgctggacgccctgagccccgagcagctagtgctcaccctcctggaggctgagccgccccatgtgctgatcagccgccccagtgcgcccttcaccgaggcctccatgatgatgtccctgaccaagttggccgacaaggagttggtacacatgatcagctgggccaagaagattcccggctttgtggagctcagcctgttcgaccaagtgcggctcttggagagctgttggatggaggtgttaatgatggggctgatgtggcgctcaattgaccaccccggcaagctcatctttgctccagatcttgttctggacagggatgaggggaaatgcgtagaaggaattctggaaatctttgacatgctcctggcaactacttcaaggtttcgagagttaaaactccaacacaaagaatatctctgtgtcaaggccatgatcctgctcaattccagtatgtaccctctggtcacagcgacccaggatgctgacagcagccggaagctggctcacttgctgaacgccgtgaccgatgctttggtttgggtgattgccaagagcggcatctcctcccagcagcaatccatgcgcctggctaacctcctgatgctcctgtcccacgtcaggcatgcgagggcagaaaaggcctctcaaacactcacctcatttggaatgaagatggagactcttttgcctgaagcaacgatggagcagtgaccctctaatcaactcggtggcctaaagaaaaatcttgggtaacattttcacttcagtttccctctgggatcattgtaatccatgaaaaaaataattttaaagaaagagttaaaatactttgaagttagttatgtggttaaaaaccaccttcctttctattatcaatccaacaatttgataactgtaaacgctaaagtgaagacggattctcttcagatggtctccttaactgcccagggcttgcagatgtctcacccatgaggggcaccaatgtagaaagctgaggcttcatctactgatgagcttcactggtttcccctgaggtttgtgctttggcagagaaggggaggaggggactgggattgtgtggtcagctgtgcctgccaacagatgcaggttaggaactgtgttcagtatcttccaataagaaaggggaaatgccgatgcctatcctctttgtttaggtagaaagtaaaatgctactggacttaaatgggc

SEQ ID NO: 1513 - DNA, 1914 bp, Homo sapiens
  source 1..1914: mol_type = genomic DNA
ctcggtctttaaaaggaagaaggggcttatcgttaagtcgcttgtgatcttttcagtttctccagctgctggctttttggacacccactcccccgccaggaggcagttgcaagcgcggaggctgcgagaaataactgcctcttgaaacttgcagggcgaagagcaggcggcgagcgctgggccggggagggaccacccgagctgcgacgggctctggggctgcggggcagggctggcgcccggagcctgagctgcaggaggtgcgctcgctttcctcaacaggtggcggcggggcgcgcgccgggagaccccccctaatgcgggaaaagcacgtgtccgcattttagagaaggcaaggccggtgtgtttatctgcaagccattatacttgcccacgaatctttgagaacattataatgacctttgtgcctcttcttgcaaggtgttttctcagctgttatctcaagacatggatataaaaaactcaccatctagccttaattctccttcctcctacaactgcagtcaatccatcttacccctggagcacggctccatatacataccttcctcctatgtagacagccaccatgaatatccagccatgacattctatagccctgctgtgatgaattacagcattcccagcaatgtcactaacttggaaggtgggcctggtcggcagaccacaagcccaaatgtgttgtggccaacacctgggcacctttctcctttagtggtccatcgccagttatcacatctgtatgcggaacctcaaaagagtccctggtgtgaagcaagatcgctagaacacaccttacctgtaaacagagagacactgaaaaggaaggttagtgggaaccgttgcgccagccctgttactggtccaggttcaaagagggatgctcacttctgcgctgtctgcagcgattacgcatcgggatatcactatggagtctggtcgtgtgaaggatgtaaggccttttttaaaagaagcattcaaggacataatgattatatttgtccagctacaaatcagtgtacaatcgataaaaaccggcgcaagagctgccaggcctgccgacttcggaagtgttacgaagtgggaatggtgaagtgtggctcccggagagagagatgtgggtaccgccttgtgcggagacagagaagtgccgacgagcagctgcactgtgccggcaaggccaagagaagtggcggccacgcgccccgagtgcgggagctgctgctggacgccctgagccccgagcagctagtgctcaccctcctggaggctgagccgccccatgtgctgatcagccgccccagtgcgcccttcaccgaggcctccatgatgatgtccctgaccaagttggccgacaaggagttggtacacatgatcagctgggccaagaagattcccggctttgtggagctcagcctgttcgaccaagtgcggctcttggagagctgttggatggaggtgttaatgatggggctgatgtggcgctcaattgaccaccccggcaagctcatctttgctccagatcttgttctggacagggatgaggggaaatgcgtagaaggaattctggaaatctttgacatgctcctggcaactacttcaaggtttcgagagttaaaactccaacacaaagaatatctctgtgtcaaggccatgatcctgctcaattccagtatgtaccctctggtcacagcgacccaggatgctgacagcagccggaagctggctcacttgctgaacgccgtgaccgatgctttggtttgggtgattgccaagagcggcatctcctcccagcagcaatccatgcgcctggctaacctcctgatgctcctgtcccacgtcaggcatgcgagatggggagaaaagcaattcattcatttgaagttatcttag

SEQ ID NO: 1514 - DNA, 1899 bp, Homo sapiens
  source 1..1899: mol_type = genomic DNA
gatgccagttaactgtcgagaggggacgctccctcctcgtaggcgtccacactggagaaggaataagatgggcgattgcctgggaagcctgacagggcggcggcagctgggatgctggagaggactggccccttgagttactgagtccgatgaatgtgcttgctctgctggaggaaccgcgctcaggttacagtcatcccaatatggttctgaagccattatacttgcccacgaatctttgagaacattataatgacctttgtgcctcttcttgcaaggtgttttctcagctgttatctcaagacatggatataaaaaactcaccatctagccttaattctccttcctcctacaactgcagtcaatccatcttacccctggagcacggctccatatacataccttcctcctatgtagacagccaccatgaatatccagccatgacattctatagccctgctgtgatgaattacagcattcccagcaatgtcactaacttggaaggtgggcctggtcggcagaccacaagcccaaatgtgttgtggccaacacctgggcacctttctcctttagtggtccatcgccagttatcacatctgtatgcggaacctcaaaagagtccctggtgtgaagcaagatcgctagaacacaccttacctgtaaacagagagacactgaaaaggaaggttagtgggaaccgttgcgccagccctgttactggtccaggttcaaagagggatgctcacttctgcgctgtctgcagcgattacgcatcgggatatcactatggagtctggtcgtgtgaaggatgtaaggccttttttaaaagaagcattcaaggacataatgattatatttgtccagctacaaatcagtgtacaatcgataaaaaccggcgcaagagctgccaggcctgccgacttcggaagtgttacgaagtgggaatggtgaagtgtggctcccggagagagagatgtgggtaccgccttgtgcggagacagagaagtgccgacgagcagctgcactgtgccggcaaggccaagagaagtggcggccacgcgccccgagtgcgggagctgctgctggacgccctgagccccgagcagctagtgctcaccctcctggaggctgagccgccccatgtgctgatcagccgccccagtgcgcccttcaccgaggcctccatgatgatgtccctgaccaagttggccgacaaggagttggtacacatgatcagctgggccaagaagattcccggctttgtggagctcagcctgttcgaccaagtgcggctcttggagagctgttggatggaggtgttaatgatggggctgatgtggcgctcaattgaccaccccggcaagctcatctttgctccagatcttgttctggacagggatgaggggaaatgcgtagaaggaattctggaaatctttgacatgctcctggcaactacttcaaggtttcgagagttaaaactccaacacaaagaatatctctgtgtcaaggccatgatcctgctcaattccagtatgtaccctctggtcacagcgacccaggatgctgacagcagccggaagctggctcacttgctgaacgccgtgaccgatgctttggtttgggtgattgccaagagcggcatctcctcccagcagcaatccatgcgcctggctaacctcctgatgctcctgtcccacgtcaggcatgcgagggcagaaaaggcctctcaaacactcacctcatttggaatgaagatggagactcttttgcctgaagcaacgatggagcagtgaccctctaatcaactcggtggcctaaagaaaaatcttgggtaacattttcacttcagtttccctctgggatcattgtaatccatgaaaaaaataattttaaagaaag

SEQ ID NO: 1515 - DNA, 2695 bp, Homo sapiens
  source 1..2695: mol_type = genomic DNA
ctcggtctttaaaaggaagaaggggcttatcgttaagtcgcttgtgatcttttcagtttctccagctgctggctttttggacacccactcccccgccaggaggcagttgcaagcgcggaggctgcgagaaataactgcctcttgaaacttgcagggcgaagagcaggcggcgagcgctgggccggggagggaccacccgagctgcgacgggctctggggctgcggggcagggctggcgcccggagcctgagctgcaggaggtgcgctcgctttcctcaacaggtggcggcggggcgcgcgccgggagaccccccctaatgcgggaaaagcacgtgtccgcattttagagaaggcaaggccggtgtgtttatctgcaagccattatacttgcccacgaatctttgagaacattataatgacctttgtgcctcttcttgcaaggtgttttctcagctgttatctcaagacatggatataaaaaactcaccatctagccttaattctccttcctcctacaactgcagtcaatccatcttacccctggagcacggctccatatacataccttcctcctatgtagacagccaccatgaatatccagccatgacattctatagccctgctgtgatgaattacagcattcccagcaatgtcactaacttggaaggtgggcctggtcggcagaccacaagcccaaatgtgttgtggccaacacctgggcacctttctcctttagtggtccatcgccagttatcacatctgtatgcggaacctcaaaagagtccctggtgtgaagcaagatcgctagaacacaccttacctgtaaacagagagacactgaaaaggaaggttagtgggaaccgttgcgccagccctgttactggtccaggttcaaagagggatgctcacttctgcgctgtctgcagcgattacgcatcgggatatcactatggagtctggtcgtgtgaaggatgtaaggccttttttaaaagaagcattcaaggacataatgattatatttgtccagctacaaatcagtgtacaatcgataaaaaccggcgcaagagctgccaggcctgccgacttcggaagtgttacgaagtgggaatggtgaagtgtggctcccggagagagagatgtgggtaccgccttgtgcggagacagagaagtgccgacgagcagctgcactgtgccggcaaggccaagagaagtggcggccacgcgccccgagtgcgggagctgctgctggacgccctgagccccgagcagctagtgctcaccctcctggaggctgagccgccccatgtgctgatcagccgccccagtgcgcccttcaccgaggcctccatgatgatgtccctgaccaagttggccgacaaggagttggtacacatgatcagctgggccaagaagattcccggctttgtggagctcagcctgttcgaccaagtgcggctcttggagagctgttggatggaggtgttaatgatggggctgatgtggcgctcaattgaccaccccggcaagctcatctttgctccagatcttgttctggacagggatgaggggaaatgcgtagaaggaattctggaaatctttgacatgctcctggcaactacttcaaggtttcgagagttaaaactccaacacaaagaatatctctgtgtcaaggccatgatcctgctcaattccagtatgtaccctctggtcacagcgacccaggatgctgacagcagccggaagctggctcacttgctgaacgccgtgaccgatgctttggtttgggtgattgccaagagcggcatctcctcccagcagcaatccatgcgcctggctaacctcctgatgctcctgtcccacgtcaggcatgcgagctctctctcactctcttggagattgtttatgctgagggaagccagctgccatggtgtgaggcagactcctggaggagcccacgtgtctgtaagtagaagcagatcttttgaggcctgtcaacagccacgggaatgagcttggaagcagatcccacctcctccctcacacaagtcgagccttcagatgagcctgcagcctttgtcgacaccttgaccgcattctcatgagagaccttgagccagagatacttagctaagccatgcccatggactcctgacccacagaaactgtgataataagtttgttgtttcaagctgctaacttatggagtaatatgttacacaaaaatagctaatatatagctcaaaactggaagcaacccaaatatctattaactggtagataaacaaactactcatttccaaacttatttccaaaactggaacactacttggcaatcaaataattaactatgcattaagtgtaacaacctggatgaatctcaaaggcattatgttaagtgaaacaagtgagccacgtaagactacatactgtttgattccctctatatgatattctagaaaaggcaaaactatagtaataggaaacagtgagtgatcacctagggttgaagacaggtgaaaggggattgactgcaaagaggcaggaggaaacgtcttgggagatggagatgttccttatattgatggcggtggtggttacacaactgcacttttatcaaaacttacctaactgctacttaaaataggtgtattaatatttttactgtatgtaaattatacctcaataaatttgattt

SEQ ID NO: 1516 - DNA, 3588 bp, Homo sapiens
  source 1..3588: mol_type = genomic DNA
cgagaggggacgctccctcctcgtaggcgtccacactggagaaggaataagatgggcgattgcctgggaagcctgacagggcggcggcagctgggatgctggagaggactggccccttgagttactgagtccgatgaatgtgcttgctctgctggaggaaccgcgctcaggttacagtcatcccaatatggttctgaagacatccaagtggagatatggcatttaaattcatgagattggatgagatcccaccaaaggaacaggtttaggtggagacaaccaaataccgatgcctaggacactgcagtgtttagaattcaaggagatgagaaggaaacaggagggaagattgaaaagaagagtccagtgtgttatgaggaaaaccccaagagcatgctgccttacaagacaggtgaaaaatgtgttctgtgaaagaaagagtaattaactgttaaatgttacagactgatcaaataaaatgaagactgagaatggcctgtttgtaagagggagacatcaacctgttgtggaaaagaatgatcacttaaagtctttagaaattctgaaccaactctctagcaggtgatccttgttagaatttgagcccttaacgctatccaggactggaggttgaagggacgatagagggagcaggaggagaatgcacatggattaaggagcgagaacacagaaatcctgggctctcttctcccagccacaaggttaggttgaaaaacagagcagatggaggtagtttgtagcctacaggtgccctgaatgaagcttccacagtgctaaagtggaagaacgagggactccaagggaaggattcaaggctgggcccatgcacctgtgtaattcagaagagaccccagaggagatcagcgccctctaattagccctgtatctgggctctacaggacagacatgcctccatttatgcaacaaataagaacagcatctcatgacagtggagaaaacatgggatgtgcaggtagggttttgttttgcctcttggtagtttctttcctacggaaaattctccctctgatctttccaagtcaaaggcttcagcaaacatttgttgaacgcgtggattgtgctaggtgggtgttatggaccatggagaatgctagagatgtaagacatgcgctgtccaatcgcagcgcaggttgtgttgacagccattatacttgcccacgaatctttgagaacattataatgacctttgtgcctcttcttgcaaggtgttttctcagctgttatctcaagacatggatataaaaaactcaccatctagccttaattctccttcctcctacaactgcagtcaatccatcttacccctggagcacggctccatatacataccttcctcctatgtagacagccaccatgaatatccagccatgacattctatagccctgctgtgatgaattacagcattcccagcaatgtcactaacttggaaggtgggcctggtcggcagaccacaagcccaaatgtgttgtggccaacacctgggcacctttctcctttagtggtccatcgccagttatcacatctgtatgcggaacctcaaaagagtccctggtgtgaagcaagatcgctagaacacaccttacctgtaaacagagagacactgaaaaggaaggttagtgggaaccgttgcgccagccctgttactggtccaggttcaaagagggatgctcacttctgcgctgtctgcagcgattacgcatcgggatatcactatggagtctggtcgtgtgaaggatgtaaggccttttttaaaagaagcattcaaggacataatgattatatttgtccagctacaaatcagtgtacaatcgataaaaaccggcgcaagagctgccaggcctgccgacttcggaagtgttacgaagtgggaatggtgaagtgtggctcccggagagagagatgtgggtaccgccttgtgcggagacagagaagtgccgacgagcagctgcactgtgccggcaaggccaagagaagtggcggccacgcgccccgagtgcgggagctgctgctggacgccctgagccccgagcagctagtgctcaccctcctggaggctgagccgccccatgtgctgatcagccgccccagtgcgcccttcaccgaggcctccatgatgatgtccctgaccaagttggccgacaaggagttggtacacatgatcagctgggccaagaagattcccggctttgtggagctcagcctgttcgaccaagtgcggctcttggagagctgttggatggaggtgttaatgatggggctgatgtggcgctcaattgaccaccccggcaagctcatctttgctccagatcttgttctggacagggatgaggggaaatgcgtagaaggaattctggaaatctttgacatgctcctggcaactacttcaaggtttcgagagttaaaactccaacacaaagaatatctctgtgtcaaggccatgatcctgctcaattccagtatgtaccctctggtcacagcgacccaggatgctgacagcagccggaagctggctcacttgctgaacgccgtgaccgatgctttggtttgggtgattgccaagagcggcatctcctcccagcagcaatccatgcgcctggctaacctcctgatgctcctgtcccacgtcaggcatgcgagggcagaaaaggcctctcaaacactcacctcatttggaatgaagatggagactcttttgcctgaagcaacgatggagcagtgaccctctaatcaactcggtggcctaaagaaaaatcttgggtaacattttcacttcagtttccctctgggatcattgtaatccatgaaaaaaataattttaaagaaagagttaaaatactttgaagttagttatgtggttaaaaaccaccttcctttctattatcaatccaacaatttgataactgtaaacgctaaagtgaagacggattctcttcagatggtctccttaactgcccagggcttgcagatgtctcacccatgaggggcaccaatgtagaaagctgaggcttcatctactgatgagcttcactggtttcccctgaggtttgtgctttggcagagaaggggaggaggggactgggattgtgtggtcagctgtgcctgccaacagatgcaggttaggaactgtgttcagtatcttccaataagaaaggggaaatgccgatgcctatcctctttgtttaggtagaaagtaaaatgctactggacttaaatgggcaacaaggggctttgcctgttcatttgccatggagagggctgggaatccaggtgcggtggctcacacctgtaatcccaacactttgggaggccgaggtgggcagatcagttgaggtcaggagtttgaaaccagcctggccaacatggcgaaaccccgtctctattaaaaatataataattagccaggcatggtggtgtgtgcttgtaatcccagctactcaggaggctgaggcatgagaatggcttgaacctggaaggcaaaggttgcagtgagccgagattgggccaccgcactccagcctgggtgactgacagagtgagactctgtc

SEQ ID NO: 1517 - DNA, 5458 bp, Homo sapiens
  source 1..5458: mol_type = genomic DNA
atggatataaaaaactcaccatctagccttaattctccttcctcctacaactgcagtcaatccatcttacccctggagcacggctccatatacataccttcctcctatgtagacagccaccatgaatatccagccatgacattctatagccctgctgtgatgaattacagcattcccagcaatgtcactaacttggaaggtgggcctggtcggcagaccacaagcccaaatgtgttgtggccaacacctgggcacctttctcctttagtggtccatcgccagttatcacatctgtatgcggaacctcaaaagagtccctggtgtgaagcaagatcgctagaacacaccttacctgtaaacagagagacactgaaaaggaaggttagtgggaaccgttgcgccagccctgttactggtccaggttcaaagagggatgctcacttctgcgctgtctgcagcgattacgcatcgggatatcactatggagtctggtcgtgtgaaggatgtaaggccttttttaaaagaagcattcaaggacataatgattatatttgtccagctacaaatcagtgtacaatcgataaaaaccggcgcaagagctgccaggcctgccgacttcggaagtgttacgaagtgggaatggtgaagtgtggctcccggagagagagatgtgggtaccgccttgtgcggagacagagaagtgccgacgagcagctgcactgtgccggcaaggccaagagaagtggcggccacgcgccccgagtgcgggagctgctgctggacgccctgagccccgagcagctagtgctcaccctcctggaggctgagccgccccatgtgctgatcagccgccccagtgcgcccttcaccgaggcctccatgatgatgtccctgaccaagttggccgacaaggagttggtacacatgatcagctgggccaagaagattcccggctttgtggagctcagcctgttcgaccaagtgcggctcttggagagctgttggatggaggtgttaatgatggggctgatgtggcgctcaattgaccaccccggcaagctcatctttgctccagatcttgttctggacagggatgaggggaaatgcgtagaaggaattctggaaatctttgacatgctcctggcaactacttcaaggtttcgagagttaaaactccaacacaaagaatatctctgtgtcaaggccatgatcctgctcaattccagtatgtaccctctggtcacagcgacccaggatgctgacagcagccggaagctggctcacttgctgaacgccgtgaccgatgctttggtttgggtgattgccaagagcggcatctcctcccagcagcaatccatgcgcctggctaacctcctgatgctcctgtcccacgtcaggcatgcgaggtacgcgccctaaggagctgctctgcttgggcttgggatgggattatgtgctccacggagggtgaagtgatttgggaaaagtgtctgcaagttaaggaaaatgaatgcctgaaagggaatggggaatttgtcagttcacacacctgtaagcaaagatgggcacagagtgggcatggaaggaatgtcatgtggtatcttacaggctctgcatggcagccagtggtggctcatgggtttttcaattgctggggtttatagcctgtttatggagtcctaaaaggggcagttcctcccctaacacgaactgccacccctgtttacaccacccagggctgaggccctgaggccactttttgtggagaggctaagacccgctcccctagatggcccctcgagctggtgatgcgaagaagtgcacaaatgcttccctaagagttgttctttcggtggcatcaggaaattaaggataagacttaagagaagtggtggacccagcagatttaggaaggcagggctgtaggtagggcatgtttctgatcaggaaacgtaattgtgtgtgctgatgaagagggtgtgcagtggtggctactgttggtacaatgatgctcagtgcttggtgtcacccacgatgagggtagccttgccctggagctggaggaggggaggggagggtggaaggtaattaactggtcactgaggaggcaagtctagaggctgtggagaaggacaatatacacctcgagaatcttaagtgagatgaagacctctgcctttcccctttaatgattgctcagcacatagccatttgcagaacagatcctgtgtttgtagattccttcattgtgaatttatctgcttgctaaaatttatttgtaaccccaaaatcaatatttgtggtgtttttgaggtcatgaacagagtggcagaaattttgagttgccctttatgtacagtcccagctgagatggaacaagcagctgctctcatactgtcaacaagtgtcctttacttggtctacttagtgccatggttttacatttttgtgcttttggtgacttcactgtttaaaatgcccccctggtgtggtgctgaagacctgtctagtgttcctcggtgtgaaaaagctgtgatgtgccttatggagaaagtatgtgttaagctttgctcgggtgtgagttatagtgctgctggccatgagttcaatgttaatgagtcaatggtatttatcacataaggcatctttagaaagaaacacacataaaacaaggttttgtattgatcagctgatgaagatgtggccagaggcttgcaggaacctaaccctgtatttcccctatgagtgaggattcagtgttcacagtgactttacggaacataattaccgcaaacaatgaggattgattgtcctatgtgtcaggccattgtaggtgtgtggtgggacacagaggctgacaagacatcgtccttgcccttgagcctaaattatcagggggagctggatgcacgagccatggataaatgggctgggggaagagtgggtttaggggtggggtagactggctctgagcaaagagagccggggaaggcttcggggttcctgtggctgcctcggaggagggaatctcagcacctttttgtccccatagtaacaagggcatggaacatctgctcaacatgaagtgcaaaaatgtggtcccagtgtatgacctgctgctggagatgctgaatgcccacgtgcttcgcgggtgcaagtcctccatcacggggtccgagtgcagcccggcagaggacagtaaaagcaaagagggctcccagaacccacagtctcagtgacgcctggccctgaggtgaactggcccacagaggtcacaggctgaagcgtgaactccagtgtgtcaggagcctgggcttcatctttctgctgtgtggtccctcatttggtgatggcaggcttggtcatgtaccatccttccctccaccttcccaactctcaggagtcggtgtgaggaagccatagtttcccttgttagcagagggcacatttgaatgcagcgtttccacactcaatggcctcataggatctcagtgtggtctttcttactttccttcttccttcctcccctttgtgaaacatcttaaaggttttggaatgaatggtggaaatctgacttggaagggctgcgaatcagaaaggggagaggaagtgacacgcttacagaagtgggctaacccttcttgtgtggcacacactacccttccctctgagagttgacctttgctgttttccggaccactccattgtaagattgaaaacccctgtggcaattgcgtacttacctcccaggcctgtggggactgatcatatcatatgatgcttattctgtcaaaggccagagggactgtggttaagctgggatgtgagtcatgttctctccctgaccttgctgccagctgcacacagatttgtccctctcgatttgtattcacagagcctgccaataatttggggtatgtgtgtatgagcgtgtgatcattttcatgcaggactgtgggagatacaaatctcgctgcttctggagctgctcttccttaaacctgttgtcccatggggccagcgtgggtgctggagaaaggccgtgtttgcaggaatggggttctctcctgtgggtgtgggtgacagccacagtgtttccctggggcaatgtggatgcagtttccatcttgtacaacctcataagtagcagccacaattgccccatcagtcaccacaagtagtcagggatactttgggctgtggatgtgtgcagtgtgctgttttatggatggatgagtagctatgcaccccagtgtgtcagctctggggccacactgtatagccttgatgagtacgccccttgaacaagacccagtttgtgaactctccttaaagagaaatatttagggataattatttatagcaagaaagaattcttttacacttgagagctcttttaaaaatattttcttattggaaaatttatatggtgggcagggtgaaaaagaaacagtaaaaatattagttcttattccaagtggaacataaataggacatgaagaagggcacctctgaaatgacaactttaactcaccttttaaaagatgtgaaatttccagttttggatacacggtgaatatgtaaaatgagtaacagcatactatggaagccagcaattaaataatcatgtttcattattgcagtaacgttttaaacaattaccttgtgatatgatattaaatatattttctttttgaaaatatgttcactttgggtagcacatcctgtatttactaagtcattaggaagactgcattcagtgttaccaagactggtttttgctagtaagacctcgaataatccataattttgatattggtgcaattttactataagttgagcttagctgtttcagaaatgcttggacaagtacctagagaacacactgatgtctgtgttctgaggcagtctgaagttattcttagagactcagttacagctttagtaagatttagtacaggcaggataagcttggtttcataggaaccagggaaccagtgttagtgtcagcttctttcctcctggtcagcctagaatcccccactcccaatagaggggtttggaagctggagagtaggaagtaagaggcaaagaaggcagccttcagcaactcattatctgccagtgaaattctattaaatgtatttttaaaagagattaccaggtaacaaaaacataaaaaaccaaaacaaggccagatgtggtggctcacgcctgtaatcccagcactttgggaggccgaggtgggcgaaccacttgagcccatgagtttgactccaggctgggcaacatggaaaccctgtcctacaaaagatacaaaaattagccaggcgtggtggtgcaggcctgtagttccagctacctgggaggctgaggtgggaggatcacctgagcctggggagatcaaggctgcagtccattgcactccagcctgggtgacagagggagaccctgtctc

SEQ ID NO: 1518 - DNA, 1883 bp, Homo sapiens
  source 1..1883: mol_type = genomic DNA
atggatataaaaaactcaccatctagccttaattctccttcctcctacaactgcagtcaatccatcttacccctggagcacggctccatatacataccttcctcctatgtagacagccaccatgaatatccagccatgacattctatagccctgctgtgatgaattacagcattcccagcaatgtcactaacttggaaggtgggcctggtcggcagaccacaagcccaaatgtgttgtggccaacacctgggcacctttctcctttagtggtccatcgccagttatcacatctgtatgcggaacctcaaaagagtccctggtgtgaagcaagatcgctagaacacaccttacctgtaaacagagagacactgaaaaggaaggttagtgggaaccgttgcgccagccctgttactggtccaggttcaaagagggatgctcacttctgcgctgtctgcagcgattacgcatcgggatatcactatggagtctggtcgtgtgaaggatgtaaggccttttttaaaagaagcattcaaggacataatgattatatttgtccagctacaaatcagtgtacaatcgataaaaaccggcgcaagagctgccaggcctgccgacttcggaagtgttacgaagtgggaatggtgaagtgtggctcccggagagagagatgtgggtaccgccttgtgcggagacagagaagtgccgacgagcagctgcactgtgccggcaaggccaagagaagtggcggccacgcgccccgagtgcgggagctgctgctggacgccctgagccccgagcagctagtgctcaccctcctggaggctgagccgccccatgtgctgatcagccgccccagtgcgcccttcaccgaggcctccatgatgatgtccctgaccaagttggccgacaaggagttggtacacatgatcagctgggccaagaagattcccggctttgtggagctcagcctgttcgaccaagtgcggctcttggagagctgttggatggaggtgttaatgatggggctgatgtggcgctcaattgaccaccccggcaagctcatctttgctccagatcttgttctggacagggatgaggggaaatgcgtagaaggaattctggaaatctttgacatgctcctggcaactacttcaaggtttcgagagttaaaactccaacacaaagaatatctctgtgtcaaggccatgatcctgctcaattccagtatgtaccctctggtcacagcgacccaggatgctgacagcagccggaagctggctcacttgctgaacgccgtgaccgatgctttggtttgggtgattgccaagagcggcatctcctcccagcagcaatccatgcgcctggctaacctcctgatgctcctgtcccacgtcaggcatgcgagatggggagaaaagcaattcattcatttgaagttatcttagtgccaagagtcatgtgaaaatgtcccttgcatgtgggcaatgaaagatttgcagacgatataaaacccagactacctcataaaagagttttgggaatacactgagctttgagtgaaagaagctgcagtggcctccctggagatggggagcaaaccagcttaaaggcccttatcctgaggaagagacaaaaattgacatgcacaatattaagctttgaaatgcagaccacacttcctttcactgcaactttgacttgtcccgcatctctacttaagggcagaaaaggcctctcaaacactcacctcatttggaatgaagatggagactcttttgcctgaagcaacgatggagcagtgaccctctaatcaactcggtggcctaaagaaaaatcttgggtaacattttcacttcagtttccctctgggatcattgtaatc

SEQ ID NO: 1519 - DNA, 6348 bp, Homo sapiens
  source 1..6348: mol_type = genomic DNA
cgttattggctgcgggaagaacctcgccgggacctaacccgaagctccgccccctcgcggttaccctggatacccgtcaggctcgggctgcagagaaggaggatcagggcaagtggcttcagagatgcagccctcactgcttaacgtcctagttattgtccttgaaacccgagccatctcaccgctcgcccccaaccctgggctctggctgtttaaaagctggagaggaagtgaaagcgtcaagtacagttgatagaagtccagatcctgaggaaatctccagctaaatgctcaaaatataaaatactgagctgagatttgcgaagagcagcagcatggatggattttatgaccagcaagtgccttacatggtcaccaatagtcagcgtgggagaaattgtaacgagaaaccaacaaatgtcaggaaaagaaaattcattaacagagatctggctcatgattcagaagaactctttcaagatctaagtcaattacaggaaacatggcttgcagaagtggcttttcatggcctgccactgaaaatcaagaaagaaccccacagtccatgttcagaaatcagctctgcctgcagtcaagaacagccctttaaattcagctatggagaaaagtgcctgtacaatgtcagtgcctatgatcagaagccacaagtgggaatgaggccctccaacccccccacaccatccagcacgccagtgtccccactgcatcatgcatctccaaactcaactcatacaccgaaacctgaccgggccttcccagctcacctccctccatcgcagtccataccagatagcagctaccccatggaccacagatttcgccgccagctttctgaaccctgtaactcctttcctcctttgccgacgatgccaagggaaggacgtcctatgtaccaacgccagatgtctgagccaaacatccccttcccaccacaaggctttaagcaggagtaccacgacccagtgtatgaacacaacaccatggttggcagtgcggccagccaaagctttccccctcctctgatgattaaacaggaacccagagattttgcatatgactcagaagtgcctagctgccactccatttatatgaggcaagaaggcttcctggctcatcccagcagaacagaaggctgtatgtttgaaaagggccccaggcagttttatgatgacacctgtgttgtcccagaaaaattcgatggagacatcaaacaagagccaggaatgtatcgggaaggacccacataccaacggcgaggatcacttcagctctggcagtttttggtagctcttctggatgacccttcaaattctcattttattgcctggactggtcgaggcatggaatttaaactgattgagcctgaagaggtggcccgacgttggggcattcagaaaaacaggccagctatgaactatgataaacttagccgttcactccgctattactatgagaaaggaattatgcaaaaggtggctggagagagatatgtctacaagtttgtgtgtgatccagaagcccttttctccatggcctttccagataatcagcgtccactgctgaagacagacatggaacgtcacatcaacgaggaggacacagtgcctctttctcactttgatgagagcatggcctacatgccggaagggggctgctgcaacccccacccctacaacgaaggctacgtgtattaacacaagtgacagtcaagcagggcgtttttgcgcttttccttttttctgcaagatacagagaattgctgaatctttgttttatttctgttgtttgtattttatttttaaataataatacacaaaaaggggcttttcctgttgcattattctatggtctgccatggactgtgcactttatttgagggtgggtgggagtaatctaaacatttattctgtgtaacaggaagctaatgggtgaatgggcagagggatttggggattactttttacttaggcttgggatggggtcctacaagttttgagtatgatgaaactatatcatgtctgtttgatttcataacaacataagataatgtttattttatcggggtatctatggtacagttaatttcacgttgtgtaaatatccacttggagactatttgccttgggcattttcccctgtcatttatgagtctctgcaggtgtacaaaaaaaccccaatctactgtaaatggcagtttaattgttagaaatgactgtttttgcaccacttgtaaaaaggtatttagcgattgcatttgctgtttgttgttttattttgctttatatatgacttgcagaggataaccataaaatgggtaattctctctgaagttgaataatcaccatgactgtaaatgaggggcacaattttggactctggcgccaaactgagtcataggccagtagcattacgtgtatctggtgccaccttgctgtttagatacaaatcataccgtcttttaaatattttgaagcccatttcagttaaataatgacatgtcatggtcctttggaatcttcatttaaatgttaaatctggaatcaaaatgaagcaaaaaatatctgtctccttttcactttcttcagtacataaatacattatttaatcaataagaattaactgtactaaatcatgtattatgctgttctagttacagcaaacactctttaagaaaaatatccaatacactaaataggtactatagtaatttttagacatggtacccattgatatgcatttaaaccttttactgctgtgttatgttgataacatatataaatattagataatgctaatgcttctgctgctgtcttttctgtaatattctctttcatgctgaatttactatgaccatttataagcagtgcagttaactacagatagcatttcaggacaaaatagatgactcaaaccatttattgcttaaaaaatagcttacgccatgctatgctataagcagcttttatgcacattgacaaatgaagagtaagcttcagcttgctaaaggaaactgtggaaccttttgtaacttttggtgatatggaaaattatttacaaaccgtcaaagaatatgaggaagttgctgtatgacatagtgctggcactgatattatccatcatctctttttggacacttctgtaaatgtgattggattgtttgaaagaagatttaaagtttcaaagttttttgttctgtttttgctttgcatttggagaaaatattgaaagcagggtatgttgtttcattcaccttgaaaaaaccatgagtaaatggggatatagaatctctgaatagctcgctaaaagattcaagcaagggacatgaattttgttccatctatcaataatatccagaagaacaacttttttaaagagtctatagcaaaaagcaaaaaaaaaaaaaaattctaaacacaaagtcaaaataaacctattgtaaaagcatttcgtgatgagcatgaaaaagattgtttaaagatgatccccccagctacccattttccaaaactacacagatcacagctcatttctctaagtggagcagttatcaagaaacccaaacaccaaaattgctactcttcacatttaatcctacaaaaagtactccaatttcaaaatatgtatgtaacctgcgatttcaatgattgttgttcatatacatcatgtattattttggcccattttgggcctaaaaaagaaaactatgccttaaaaatcagaaccttttctccccactatgcttatgtggccatctacagcacttagaataaaaacagatgttaaaatattcagtgaaagttttattggaaaaaggaattgagatatataattgagatttggtgaaattgaaggagaaaatttaagtgagtctttaaaatatattctgaatgaaaactgtattgaggattcatttttgttccttttttttctttttctcttttctcctttttcttctttttaatagtctagttttagtcagtcagtgaggaagaattgggccatgctaacgttatcacaagagaacaatggcagaaatggtattagttatataatatttaaggacaaactatatgttttgctgttttaacgtagtgactcactgaactaaatacataattgaccaacattaagtgtatttccaatacagaagggttgaaaatattacattataaactcttttgaaaaatgtatctaaaattttttaagttctgttttgattccactttttggttgagtttttatgtttttgttttcaggtagattaataaatctggcagctgatttctgcaagattcttgtgttttgaatttctcattgaattggctactcaaacatagaaatcatttgttaatgatgtaatgtcttctctcagcttttatcttcactgctgtttgctgtctcttgatgatgacatgttaatacccaatagattaattgcaacaaacacttatactcaaataactaagtaaaaataatttttcttgttatgtccatgaaaagtgcttcagaataaaaatccacaagactgacagtgcagaacatttttctcaaatcatgggcggatcttggaggtctagtttcccgtagatgctgtaaccaattaccacaacttcagtaatttacacaaatttatcttatagttctggaggcagaagttcaaaagaagccttaagagactaaaaccaagatgtccttaggtctggttccttctggaggctccaggggagattcttccagctttcacttctagagtctgctgacattccttggctcctggctacatcacttcaatctctgcttccatggtcacatactcttctactatagtcaaatttccttcctgcctcttataaggatgcttgtgattacatttaggggatgctcagataatccaggacaatctctccatctcaagatccttaacttaatgacgtgtgccaagtccctttggctagataattattcataggtcccagggattaggacatggatgtaaggggtgagggcagggctgttattcagaacaccgcacggaggaggaagactgtgtagcaaagactctaattgatttactcaggaacagtggagttctgctgagggatctaggatttgaaagtactagagtttgcttttatttaccactgagatattttccccttattctgcataaataattttgaaaactttctatattaaatttcaactattccactaaaatgtctggtaatcacatcaagcctttagattattcaaatccttccccagcccccaggaaaacactaagtcatgaaacagaaaaacagaaggtatgataataatagtaataacagttaaatcagtggtctaatccagattttattttttaatacatttcttttggtgttaatatgggttactatgtgatcttatcatttgctagtgattattacttattaggtaagaacaatgtgtaaaatatgtctattactcaaaagaacaattgcaaaatgagtcaacttatctttatataaccaggaaagaaatatattgccagaagctacagaattttgccagatgatagggatttctaaaatgagccactttgtctatcatgcagccttttcagagcttgtaatgagaaaacattacagaggagaaggtcatttggatgtttgttacttggaatcctagaaaacaaaaactaaaatttaaaaataagaagtgagtaagctattttccatttgcgatttggtatggagaagagaggaaatagaattattaaaaaaatacaaattgggtaaaagtgatggtggaaaaaatataaagaaggcaaatgtacatattaagcaattctactaagaattggaaaaatcaagtttcaaaaagatggtaatagttgggcatgatactagaaaatttcacccagtttattcagagctcaactagtacttttaggacttctttttttatatacatgagactcactttgacatacttaaaaaaaaaacagtttatggaaagtacagtttaagaggagaatttgattagactaagtggatatctttatagaaatattaatgatttcagaattttcagttacaagtgtatataccgtggctattgtttatggattcatatgtaaggtagggtcttttttgcatatagactccagtattagttactttcattctaaaattatatttatgcttctatggggaagaaaatttttaattcacttggttgtattaaaattatacttacggtttgagaaaacatgctatgaaaatcatgattatagcaaattaaatatgctcaaaatttaaatctaaaataaaagcccagaaactg

SEQ ID NO: 1520 - DNA, 6752 bp, Homo sapiens
  source 1..6752: mol_type = genomic DNA
aaggaaaccagcccaatagtggacctaacaccccaataatgggaactggcgactcgaaacacacggtttcagtatccccaggcgccttaacaataagcagcgggttacagaggaaatcgagtctctccgtggcgcttccaggctgaggacccagcgcctaccggccgagcaccccctagggcagaggggcgagggagacccgcgggaaggggcagcaagccgcctgattgacagcccgaaatctgatcttgtgaaagagacgcggagccaatgggaggcagcgatccatcagtttggattggaggcccctggaggagaagtagaggaaaaaccaccgaattgagctctgtcagaggcgctttcggcttccaagggggaagtgctgggctataattaatgtttttattaaatttggagggaagtttttgcagcctttcgcctagcgtggccttcagtcccgttaggtgcaaagcaagtctcgttgatcgccattgctagttttgcacacgtttgcgaatcagagctgcccggggtacaccgaccgcgcagggaaacatcgagagtgtaaataaatacatcgcctcttgttcggatttttgctactaccgaaaatatgtaaattgtgaactctgttggctctctttggatccaggttgatagaagtccagatcctgaggaaatctccagctaaatgctcaaaatataaaatactgagctgagatttgcgaagagcagcagcatggatggattttatgaccagcaagtgccttacatggtcaccaatagtcagcgtgggagaaattgtaacgagaaaccaacaaatgtcaggaaaagaaaattcattaacagagatctggctcatgattcagaagaactctttcaagatctaagtcaattacaggaaacatggcttgcagaagtggcttttcatggcctgccactgaaaatcaagaaagaaccccacagtccatgttcagaaatcagctctgcctgcagtcaagaacagccctttaaattcagctatggagaaaagtgcctgtacaatgtcagtgcctatgatcagaagccacaagtgggaatgaggccctccaacccccccacaccatccagcacgccagtgtccccactgcatcatgcatctccaaactcaactcatacaccgaaacctgaccgggccttcccagctcacctccctccatcgcagtccataccagatagcagctaccccatggaccacagatttcgccgccagctttctgaaccctgtaactcctttcctcctttgccgacgatgccaagggaaggacgtcctatgtaccaacgccagatgtctgagccaaacatccccttcccaccacaaggctttaagcaggagtaccacgacccagtgtatgaacacaacaccatggttggcagtgcggccagccaaagctttccccctcctctgatgattaaacaggaacccagagattttgcatatgactcagaagtgcctagctgccactccatttatatgaggcaagaaggcttcctggctcatcccagcagaacagaaggctgtatgtttgaaaagggccccaggcagttttatgatgacacctgtgttgtcccagaaaaattcgatggagacatcaaacaagagccaggaatgtatcgggaaggacccacataccaacggcgaggatcacttcagctctggcagtttttggtagctcttctggatgacccttcaaattctcattttattgcctggactggtcgaggcatggaatttaaactgattgagcctgaagaggtggcccgacgttggggcattcagaaaaacaggccagctatgaactatgataaacttagccgttcactccgctattactatgagaaaggaattatgcaaaaggtggctggagagagatatgtctacaagtttgtgtgtgatccagaagcccttttctccatggcctttccagataatcagcgtccactgctgaagacagacatggaacgtcacatcaacgaggaggacacagtgcctctttctcactttgatgagagcatggcctacatgccggaagggggctgctgcaacccccacccctacaacgaaggctacgtgtattaacacaagtgacagtcaagcagggcgtttttgcgcttttccttttttctgcaagatacagagaattgctgaatctttgttttatttctgttgtttgtattttatttttaaataataatacacaaaaaggggcttttcctgttgcattattctatggtctgccatggactgtgcactttatttgagggtgggtgggagtaatctaaacatttattctgtgtaacaggaagctaatgggtgaatgggcagagggatttggggattactttttacttaggcttgggatggggtcctacaagttttgagtatgatgaaactatatcatgtctgtttgatttcataacaacataagataatgtttattttatcggggtatctatggtacagttaatttcacgttgtgtaaatatccacttggagactatttgccttgggcattttcccctgtcatttatgagtctctgcaggtgtacaaaaaaaccccaatctactgtaaatggcagtttaattgttagaaatgactgtttttgcaccacttgtaaaaaggtatttagcgattgcatttgctgtttgttgttttattttgctttatatatgacttgcagaggataaccataaaatgggtaattctctctgaagttgaataatcaccatgactgtaaatgaggggcacaattttggactctggcgccaaactgagtcataggccagtagcattacgtgtatctggtgccaccttgctgtttagatacaaatcataccgtcttttaaatattttgaagcccatttcagttaaataatgacatgtcatggtcctttggaatcttcatttaaatgttaaatctggaatcaaaatgaagcaaaaaatatctgtctccttttcactttcttcagtacataaatacattatttaatcaataagaattaactgtactaaatcatgtattatgctgttctagttacagcaaacactctttaagaaaaatatccaatacactaaataggtactatagtaatttttagacatggtacccattgatatgcatttaaaccttttactgctgtgttatgttgataacatatataaatattagataatgctaatgcttctgctgctgtcttttctgtaatattctctttcatgctgaatttactatgaccatttataagcagtgcagttaactacagatagcatttcaggacaaaatagatgactcaaaccatttattgcttaaaaaatagcttacgccatgctatgctataagcagcttttatgcacattgacaaatgaagagtaagcttcagcttgctaaaggaaactgtggaaccttttgtaacttttggtgatatggaaaattatttacaaaccgtcaaagaatatgaggaagttgctgtatgacatagtgctggcactgatattatccatcatctctttttggacacttctgtaaatgtgattggattgtttgaaagaagatttaaagtttcaaagttttttgttctgtttttgctttgcatttggagaaaatattgaaagcagggtatgttgtttcattcaccttgaaaaaaccatgagtaaatggggatatagaatctctgaatagctcgctaaaagattcaagcaagggacatgaattttgttccatctatcaataatatccagaagaacaacttttttaaagagtctatagcaaaaagcaaaaaaaaaaaaaaattctaaacacaaagtcaaaataaacctattgtaaaagcatttcgtgatgagcatgaaaaagattgtttaaagatgatccccccagctacccattttccaaaactacacagatcacagctcatttctctaagtggagcagttatcaagaaacccaaacaccaaaattgctactcttcacatttaatcctacaaaaagtactccaatttcaaaatatgtatgtaacctgcgatttcaatgattgttgttcatatacatcatgtattattttggcccattttgggcctaaaaaagaaaactatgccttaaaaatcagaaccttttctccccactatgcttatgtggccatctacagcacttagaataaaaacagatgttaaaatattcagtgaaagttttattggaaaaaggaattgagatatataattgagatttggtgaaattgaaggagaaaatttaagtgagtctttaaaatatattctgaatgaaaactgtattgaggattcatttttgttccttttttttctttttctcttttctcctttttcttctttttaatagtctagttttagtcagtcagtgaggaagaattgggccatgctaacgttatcacaagagaacaatggcagaaatggtattagttatataatatttaaggacaaactatatgttttgctgttttaacgtagtgactcactgaactaaatacataattgaccaacattaagtgtatttccaatacagaagggttgaaaatattacattataaactcttttgaaaaatgtatctaaaattttttaagttctgttttgattccactttttggttgagtttttatgtttttgttttcaggtagattaataaatctggcagctgatttctgcaagattcttgtgttttgaatttctcattgaattggctactcaaacatagaaatcatttgttaatgatgtaatgtcttctctcagcttttatcttcactgctgtttgctgtctcttgatgatgacatgttaatacccaatagattaattgcaacaaacacttatactcaaataactaagtaaaaataatttttcttgttatgtccatgaaaagtgcttcagaataaaaatccacaagactgacagtgcagaacatttttctcaaatcatgggcggatcttggaggtctagtttcccgtagatgctgtaaccaattaccacaacttcagtaatttacacaaatttatcttatagttctggaggcagaagttcaaaagaagccttaagagactaaaaccaagatgtccttaggtctggttccttctggaggctccaggggagattcttccagctttcacttctagagtctgctgacattccttggctcctggctacatcacttcaatctctgcttccatggtcacatactcttctactatagtcaaatttccttcctgcctcttataaggatgcttgtgattacatttaggggatgctcagataatccaggacaatctctccatctcaagatccttaacttaatgacgtgtgccaagtccctttggctagataattattcataggtcccagggattaggacatggatgtaaggggtgagggcagggctgttattcagaacaccgcacggaggaggaagactgtgtagcaaagactctaattgatttactcaggaacagtggagttctgctgagggatctaggatttgaaagtactagagtttgcttttatttaccactgagatattttccccttattctgcataaataattttgaaaactttctatattaaatttcaactattccactaaaatgtctggtaatcacatcaagcctttagattattcaaatccttccccagcccccaggaaaacactaagtcatgaaacagaaaaacagaaggtatgataataatagtaataacagttaaatcagtggtctaatccagattttattttttaatacatttcttttggtgttaatatgggttactatgtgatcttatcatttgctagtgattattacttattaggtaagaacaatgtgtaaaatatgtctattactcaaaagaacaattgcaaaatgagtcaacttatctttatataaccaggaaagaaatatattgccagaagctacagaattttgccagatgatagggatttctaaaatgagccactttgtctatcatgcagccttttcagagcttgtaatgagaaaacattacagaggagaaggtcatttggatgtttgttacttggaatcctagaaaacaaaaactaaaatttaaaaataagaagtgagtaagctattttccatttgcgatttggtatggagaagagaggaaatagaattattaaaaaaatacaaattgggtaaaagtgatggtggaaaaaatataaagaaggcaaatgtacatattaagcaattctactaagaattggaaaaatcaagtttcaaaaagatggtaatagttgggcatgatactagaaaatttcacccagtttattcagagctcaactagtacttttaggacttctttttttatatacatgagactcactttgacatacttaaaaaaaaaacagtttatggaaagtacagtttaagaggagaatttgattagactaagtggatatctttatagaaatattaatgatttcagaattttcagttacaagtgtatataccgtggctattgtttatggattcatatgtaaggtagggtcttttttgcatatagactccagtattagttactttcattctaaaattatatttatgcttctatggggaagaaaatttttaattcacttggttgtattaaaattatacttacggtttgagaaaacatgctatgaaaatcatgattatagcaaattaaatatgctcaaaatttaaatctaaaataaaagcccagaaactg

SEQ ID NO: 1521 - DNA, 6096 bp, Homo sapiens
  source 1..6096: mol_type = genomic DNA
gtcatgcatacattagagcctctgatgagtttgtctttggggactctggggctgtactacccagtgtcatcacaaattaccaggagaaattgcttccagctcacaatcacatctgcttttggcaagaactaatgcaccaagacttcaagttctaagcctctgttcagattttaattgcaattgatcaggtttatattattgtacctccagagacctcctagagccagaacccggctggcttgctgtttcctttagagcagcgcatatcattatttggtgttctggtggaggacttttctgatggcagaaattagtttctctgggttcatcaggacgggatgcttcaagatttaagtgcaagtgtcttctttccaccttgttcacaacacagaacgttagctcaggtacctgacaatgatgagcagtttgtaccagactatcaggctgaaagtttggcttttcatggcctgccactgaaaatcaagaaagaaccccacagtccatgttcagaaatcagctctgcctgcagtcaagaacagccctttaaattcagctatggagaaaagtgcctgtacaatgtcagatttcgccgccagctttctgaaccctgtaactcctttcctcctttgccgacgatgccaagggaaggacgtcctatgtaccaacgccagatgtctgagccaaacatccccttcccaccacaaggctttaagcaggagtaccacgacccagtgtatgaacacaacaccatggttggcagtgcggccagccaaagctttccccctcctctgatgattaaacaggaacccagagattttgcatatgactcagaagtgcctagctgccactccatttatatgaggcaagaaggcttcctggctcatcccagcagaacagaaggctgtatgtttgaaaagggccccaggcagttttatgatgacacctgtgttgtcccagaaaaattcgatggagacatcaaacaagagccaggaatgtatcgggaaggacccacataccaacggcgaggatcacttcagctctggcagtttttggtagctcttctggatgacccttcaaattctcattttattgcctggactggtcgaggcatggaatttaaactgattgagcctgaagaggtggcccgacgttggggcattcagaaaaacaggccagctatgaactatgataaacttagccgttcactccgctattactatgagaaaggaattatgcaaaaggtggctggagagagatatgtctacaagtttgtgtgtgatccagaagcccttttctccatggcctttccagataatcagcgtccactgctgaagacagacatggaacgtcacatcaacgaggaggacacagtgcctctttctcactttgatgagagcatggcctacatgccggaagggggctgctgcaacccccacccctacaacgaaggctacgtgtattaacacaagtgacagtcaagcagggcgtttttgcgcttttccttttttctgcaagatacagagaattgctgaatctttgttttatttctgttgtttgtattttatttttaaataataatacacaaaaaggggcttttcctgttgcattattctatggtctgccatggactgtgcactttatttgagggtgggtgggagtaatctaaacatttattctgtgtaacaggaagctaatgggtgaatgggcagagggatttggggattactttttacttaggcttgggatggggtcctacaagttttgagtatgatgaaactatatcatgtctgtttgatttcataacaacataagataatgtttattttatcggggtatctatggtacagttaatttcacgttgtgtaaatatccacttggagactatttgccttgggcattttcccctgtcatttatgagtctctgcaggtgtacaaaaaaaccccaatctactgtaaatggcagtttaattgttagaaatgactgtttttgcaccacttgtaaaaaggtatttagcgattgcatttgctgtttgttgttttattttgctttatatatgacttgcagaggataaccataaaatgggtaattctctctgaagttgaataatcaccatgactgtaaatgaggggcacaattttggactctggcgccaaactgagtcataggccagtagcattacgtgtatctggtgccaccttgctgtttagatacaaatcataccgtcttttaaatattttgaagcccatttcagttaaataatgacatgtcatggtcctttggaatcttcatttaaatgttaaatctggaatcaaaatgaagcaaaaaatatctgtctccttttcactttcttcagtacataaatacattatttaatcaataagaattaactgtactaaatcatgtattatgctgttctagttacagcaaacactctttaagaaaaatatccaatacactaaataggtactatagtaatttttagacatggtacccattgatatgcatttaaaccttttactgctgtgttatgttgataacatatataaatattagataatgctaatgcttctgctgctgtcttttctgtaatattctctttcatgctgaatttactatgaccatttataagcagtgcagttaactacagatagcatttcaggacaaaatagatgactcaaaccatttattgcttaaaaaatagcttacgccatgctatgctataagcagcttttatgcacattgacaaatgaagagtaagcttcagcttgctaaaggaaactgtggaaccttttgtaacttttggtgatatggaaaattatttacaaaccgtcaaagaatatgaggaagttgctgtatgacatagtgctggcactgatattatccatcatctctttttggacacttctgtaaatgtgattggattgtttgaaagaagatttaaagtttcaaagttttttgttctgtttttgctttgcatttggagaaaatattgaaagcagggtatgttgtttcattcaccttgaaaaaaccatgagtaaatggggatatagaatctctgaatagctcgctaaaagattcaagcaagggacatgaattttgttccatctatcaataatatccagaagaacaacttttttaaagagtctatagcaaaaagcaaaaaaaaaaaaaaattctaaacacaaagtcaaaataaacctattgtaaaagcatttcgtgatgagcatgaaaaagattgtttaaagatgatccccccagctacccattttccaaaactacacagatcacagctcatttctctaagtggagcagttatcaagaaacccaaacaccaaaattgctactcttcacatttaatcctacaaaaagtactccaatttcaaaatatgtatgtaacctgcgatttcaatgattgttgttcatatacatcatgtattattttggcccattttgggcctaaaaaagaaaactatgccttaaaaatcagaaccttttctccccactatgcttatgtggccatctacagcacttagaataaaaacagatgttaaaatattcagtgaaagttttattggaaaaaggaattgagatatataattgagatttggtgaaattgaaggagaaaatttaagtgagtctttaaaatatattctgaatgaaaactgtattgaggattcatttttgttccttttttttctttttctcttttctcctttttcttctttttaatagtctagttttagtcagtcagtgaggaagaattgggccatgctaacgttatcacaagagaacaatggcagaaatggtattagttatataatatttaaggacaaactatatgttttgctgttttaacgtagtgactcactgaactaaatacataattgaccaacattaagtgtatttccaatacagaagggttgaaaatattacattataaactcttttgaaaaatgtatctaaaattttttaagttctgttttgattccactttttggttgagtttttatgtttttgttttcaggtagattaataaatctggcagctgatttctgcaagattcttgtgttttgaatttctcattgaattggctactcaaacatagaaatcatttgttaatgatgtaatgtcttctctcagcttttatcttcactgctgtttgctgtctcttgatgatgacatgttaatacccaatagattaattgcaacaaacacttatactcaaataactaagtaaaaataatttttcttgttatgtccatgaaaagtgcttcagaataaaaatccacaagactgacagtgcagaacatttttctcaaatcatgggcggatcttggaggtctagtttcccgtagatgctgtaaccaattaccacaacttcagtaatttacacaaatttatcttatagttctggaggcagaagttcaaaagaagccttaagagactaaaaccaagatgtccttaggtctggttccttctggaggctccaggggagattcttccagctttcacttctagagtctgctgacattccttggctcctggctacatcacttcaatctctgcttccatggtcacatactcttctactatagtcaaatttccttcctgcctcttataaggatgcttgtgattacatttaggggatgctcagataatccaggacaatctctccatctcaagatccttaacttaatgacgtgtgccaagtccctttggctagataattattcataggtcccagggattaggacatggatgtaaggggtgagggcagggctgttattcagaacaccgcacggaggaggaagactgtgtagcaaagactctaattgatttactcaggaacagtggagttctgctgagggatctaggatttgaaagtactagagtttgcttttatttaccactgagatattttccccttattctgcataaataattttgaaaactttctatattaaatttcaactattccactaaaatgtctggtaatcacatcaagcctttagattattcaaatccttccccagcccccaggaaaacactaagtcatgaaacagaaaaacagaaggtatgataataatagtaataacagttaaatcagtggtctaatccagattttattttttaatacatttcttttggtgttaatatgggttactatgtgatcttatcatttgctagtgattattacttattaggtaagaacaatgtgtaaaatatgtctattactcaaaagaacaattgcaaaatgagtcaacttatctttatataaccaggaaagaaatatattgccagaagctacagaattttgccagatgatagggatttctaaaatgagccactttgtctatcatgcagccttttcagagcttgtaatgagaaaacattacagaggagaaggtcatttggatgtttgttacttggaatcctagaaaacaaaaactaaaatttaaaaataagaagtgagtaagctattttccatttgcgatttggtatggagaagagaggaaatagaattattaaaaaaatacaaattgggtaaaagtgatggtggaaaaaatataaagaaggcaaatgtacatattaagcaattctactaagaattggaaaaatcaagtttcaaaaagatggtaatagttgggcatgatactagaaaatttcacccagtttattcagagctcaactagtacttttaggacttctttttttatatacatgagactcactttgacatacttaaaaaaaaaacagtttatggaaagtacagtttaagaggagaatttgattagactaagtggatatctttatagaaatattaatgatttcagaattttcagttacaagtgtatataccgtggctattgtttatggattcatatgtaaggtagggtcttttttgcatatagactccagtattagttactttcattctaaaattatatttatgcttctatggggaagaaaatttttaattcacttggttgtattaaaattatacttacggtttgagaaaacatgctatgaaaatcatgattatagcaaattaaatatgctcaaaatttaaatctaaaataaaagcccagaaactg

SEQ ID NO: 1522 - DNA, 1603 bp, Homo sapiens
  source 1..1603: mol_type = genomic DNA
accccctgcttggttgcaccctcagatagtacccatgagcttcactgttcagcctcggggcccaggcgcttcctggaatctctccttggccggggttaaaatgcagttcccgctcaaaatgcttataggttgatagaagtccagatcctgaggaaatctccagctaaatgctcaaaatataaaatactgagctgagatttgcgaagagcagcagcatggatggattttatgaccagcaagtgccttacatggtcaccaatagtcagcgtgggagaaattgtaacgagaaaccaacaaatgtcaggaaaagaaaattcattaacagagatctggctcatgattcagaagaactctttcaagatctaagtcaattacaggaaacatggcttgcagaagtggcttttcatggcctgccactgaaaatcaagaaagaaccccacagtccatgttcagaaatcagctctgcctgcagtcaagaacagccctttaaattcagctatggagaaaagtgcctgtacaatgtcagtgcctatgatcagaagccacaagtgggaatgaggccctccaacccccccacaccatccagcacgccagtgtccccactgcatcatgcatctccaaactcaactcatacaccgaaacctgaccgggccttcccagctcacctccctccatcgcagtccataccagatagcagctaccccatggaccacagatttcgccgccagctttctgaaccctgtaactcctttcctcctttgccgacgatgccaagggaaggacgtcctatgtaccaacgccagatgtctgagccaaacatccccttcccaccacaaggctttaagcaggagtaccacgacccagtgtatgaacacaacaccatggttggcagtgcggccagccaaagctttccccctcctctgatgattaaacaggaacccagagattttgcatatgactcagaagtgcctagctgccactccatttatatgaggcaagaaggcttcctggctcatcccagcagaacagaaggctgtatgtttgaaaagggccccaggcagttttatgatgacacctgtgttgtcccagaaaaattcgatggagacatcaaacaagagccaggaatgtatcgggaaggacccacataccaacggcgaggatcacttcagctctggcagtttttggtagctcttctggatgacccttcaaattctcattttattgcctggactggtcgaggcatggaatttaaactgattgagcctgaagaggtggcccgacgttggggcattcagaaaaacaggccagctatgaactatgataaacttagccgttcactccgctattactatgagaaaggaattatgcaaaaggtggctggagagagatatgtctacaagtttgtgtgtgatccagaagcccttttctccatggcctttccagataatcagcgtccactgctgaagacagacatggaacgtcacatcaacgaggaggacacagtgcctctttctcactttgatgagagcatggcctacatgccggaagggggctgctgcaacccccacccctacaacgaaggctacgtgtattaacacaagtg

SEQ ID NO: 1523 - DNA, 3391 bp, Homo sapiens
  source 1..3391: mol_type = genomic DNA
agtatccccaggcgccttaacaataagcagcgggttacagaggaaatcgagtctctccgtggcgcttccaggctgaggacccagcgcctaccggccgagcaccccctagggcagaggggcgagggagacccgcgggaaggggcagcaagccgcctgattgacagcccgaaatctgatcttgtgaaagagacgcggagccaatgggaggcagcgatccatcagtttggattggaggcccctggaggagaagtagaggaaaaaccaccgaattgagctctgtcagaggcgctttcggcttccaagggggaagtgctgggctataattaatgtttttattaaatttggagggaagtttttgcagcctttcgcctagcgtggccttcaggttgatagaagtccagatcctgaggaaatctccagctaaatgctcaaaatataaaatactgagctgagatttgcgaagagcagcagcatggatggattttatgaccagcaagtgccttacatggtcaccaatagtcagcgtgggagaaattgtaacgagaaaccaacaaatgtcaggaaaagaaaattcattaacagagatctggctcatgattcagaagaactctttcaagatctaagtcaattacaggaaacatggcttgcagaagctcaggtacctgacaatgatgagcagtttgtaccagactatcaggctgaaagtttggcttttcatggcctgccactgaaaatcaagaaagaaccccacagtccatgttcagaaatcagctctgcctgcagtcaagaacagccctttaaattcagctatggagaaaagtgcctgtacaatgtcagtgcctatgatcagaagccacaagtgggaatgaggccctccaacccccccacaccatccagcacgccagtgtccccactgcatcatgcatctccaaactcaactcatacaccgaaacctgaccgggccttcccagctcacctccctccatcgcagtccataccagatagcagctaccccatggaccacagatttcgccgccagctttctgaaccctgtaactcctttcctcctttgccgacgatgccaagggaaggacgtcctatgtaccaacgccagatgtctgagccaaacatccccttcccaccacaaggctttaagcaggagtaccacgacccagtgtatgaacacaacaccatggttggcagtgcggccagccaaagctttccccctcctctgatgattaaacaggaacccagagattttgcatatgactcagaagtgcctagctgccactccatttatatgaggcaagaaggcttcctggctcatcccagcagaacagaaggctgtatgtttgaaaagggccccaggcagttttatgatgacacctgtgttgtcccagaaaaattcgatggagacatcaaacaagagccaggaatgtatcgggaaggacccacataccaacggcgaggatcacttcagctctggcagtttttggtagctcttctggatgacccttcaaattctcattttattgcctggactggtcgaggcatggaatttaaactgattgagcctgaagaggtggcccgacgttggggcattcagaaaaacaggccagctatgaactatgataaacttagccgttcactccgctattactatgagaaaggaattatgcaaaaggtggctggagagagatatgtctacaagtttgtgtgtgatccagaagcccttttctccatggcctttccagataatcagcgtccactgctgaagacagacatggaacgtcacatcaacgaggaggacacagtgcctctttctcactttgatgagagcatggcctacatgccggaagggggctgctgcaacccccacccctacaacgaaggctacgtgtattaacacaagtgacagtcaagcagggcgtttttgcgcttttccttttttctgcaagatacagagaattgctgaatctttgttttatttctgttgtttgtattttatttttaaataataatacacaaaaaggggcttttcctgttgcattattctatggtctgccatggactgtgcactttatttgagggtgggtgggagtaatctaaacatttattctgtgtaacaggaagctaatgggtgaatgggcagagggatttggggattactttttacttaggcttgggatggggtcctacaagttttgagtatgatgaaactatatcatgtctgtttgatttcataacaacataagataatgtttattttatcggggtatctatggtacagttaatttcacgttgtgtaaatatccacttggagactatttgccttgggcattttcccctgtcatttatgagtctctgcaggtgtacaaaaaaaccccaatctactgtaaatggcagtttaattgttagaaatgactgtttttgcaccacttgtaaaaaggtatttagcgattgcatttgctgtttgttgttttattttgctttatatatgacttgcagaggataaccataaaatgggtaattctctctgaagttgaataatcaccatgactgtaaatgaggggcacaattttggactctggcgccaaactgagtcataggccagtagcattacgtgtatctggtgccaccttgctgtttagatacaaatcataccgtcttttaaatattttgaagcccatttcagttaaataatgacatgtcatggtcctttggaatcttcatttaaatgttaaatctggaatcaaaatgaagcaaaaaatatctgtctccttttcactttcttcagtacataaatacattatttaatcaataagaattaactgtactaaatcatgtattatgctgttctagttacagcaaacactctttaagaaaaatatccaatacactaaataggtactatagtaatttttagacatggtacccattgatatgcatttaaaccttttactgctgtgttatgttgataacatatataaatattagataatgctaatgcttctgctgctgtcttttctgtaatattctctttcatgctgaatttactatgaccatttataagcagtgcagttaactacagatagcatttcaggacaaaatagatgactcaaaccatttattgcttaaaaaatagcttacgccatgctatgctataagcagcttttatgcacattgacaaatgaagagtaagcttcagcttgctaaaggaaactgtggaaccttttgtaacttttggtgatatggaaaattatttacaaaccgtcaaagaatatgaggaagttgctgtatgacatagtgctggcactgatattatccatcatctctttttggacacttctgtaaatgtgattggattgtttgaaagaagatttaaagtttc

SEQ ID NO: 1524 - DNA, 6231 bp, Homo sapiens
  source 1..6231: mol_type = genomic DNA
gtcatgcatacattagagcctctgatgagtttgtctttggggactctggggctgtactacccagtgtcatcacaaattaccaggagaaattgcttccagctcacaatcacatctgcttttggcaagaactaatgcaccaagacttcaagttctaagcctctgttcagattttaattgcaattgatcaggtttatattattgtacctccagagacctcctagagccagaacccggctggcttgctgtttcctttagagcagcgcatatcattatttggtgttctggtggaggacttttctgatggcagaaattagtttctctgggttcatcaggacgggatgcttcaagatttaagtgcaagtgtcttctttccaccttgttcacaacacagaacgttagtggcttttcatggcctgccactgaaaatcaagaaagaaccccacagtccatgttcagaaatcagctctgcctgcagtcaagaacagccctttaaattcagctatggagaaaagtgcctgtacaatgtcagtgcctatgatcagaagccacaagtgggaatgaggccctccaacccccccacaccatccagcacgccagtgtccccactgcatcatgcatctccaaactcaactcatacaccgaaacctgaccgggccttcccagctcacctccctccatcgcagtccataccagatagcagctaccccatggaccacagatttcgccgccagctttctgaaccctgtaactcctttcctcctttgccgacgatgccaagggaaggacgtcctatgtaccaacgccagatgtctgagccaaacatccccttcccaccacaaggctttaagcaggagtaccacgacccagtgtatgaacacaacaccatggttggcagtgcggccagccaaagctttccccctcctctgatgattaaacaggaacccagagattttgcatatgactcagaagtgcctagctgccactccatttatatgaggcaagaaggcttcctggctcatcccagcagaacagaaggctgtatgtttgaaaagggccccaggcagttttatgatgacacctgtgttgtcccagaaaaattcgatggagacatcaaacaagagccaggaatgtatcgggaaggacccacataccaacggcgaggatcacttcagctctggcagtttttggtagctcttctggatgacccttcaaattctcattttattgcctggactggtcgaggcatggaatttaaactgattgagcctgaagaggtggcccgacgttggggcattcagaaaaacaggccagctatgaactatgataaacttagccgttcactccgctattactatgagaaaggaattatgcaaaaggtggctggagagagatatgtctacaagtttgtgtgtgatccagaagcccttttctccatggcctttccagataatcagcgtccactgctgaagacagacatggaacgtcacatcaacgaggaggacacagtgcctctttctcactttgatgagagcatggcctacatgccggaagggggctgctgcaacccccacccctacaacgaaggctacgtgtattaacacaagtgacagtcaagcagggcgtttttgcgcttttccttttttctgcaagatacagagaattgctgaatctttgttttatttctgttgtttgtattttatttttaaataataatacacaaaaaggggcttttcctgttgcattattctatggtctgccatggactgtgcactttatttgagggtgggtgggagtaatctaaacatttattctgtgtaacaggaagctaatgggtgaatgggcagagggatttggggattactttttacttaggcttgggatggggtcctacaagttttgagtatgatgaaactatatcatgtctgtttgatttcataacaacataagataatgtttattttatcggggtatctatggtacagttaatttcacgttgtgtaaatatccacttggagactatttgccttgggcattttcccctgtcatttatgagtctctgcaggtgtacaaaaaaaccccaatctactgtaaatggcagtttaattgttagaaatgactgtttttgcaccacttgtaaaaaggtatttagcgattgcatttgctgtttgttgttttattttgctttatatatgacttgcagaggataaccataaaatgggtaattctctctgaagttgaataatcaccatgactgtaaatgaggggcacaattttggactctggcgccaaactgagtcataggccagtagcattacgtgtatctggtgccaccttgctgtttagatacaaatcataccgtcttttaaatattttgaagcccatttcagttaaataatgacatgtcatggtcctttggaatcttcatttaaatgttaaatctggaatcaaaatgaagcaaaaaatatctgtctccttttcactttcttcagtacataaatacattatttaatcaataagaattaactgtactaaatcatgtattatgctgttctagttacagcaaacactctttaagaaaaatatccaatacactaaataggtactatagtaatttttagacatggtacccattgatatgcatttaaaccttttactgctgtgttatgttgataacatatataaatattagataatgctaatgcttctgctgctgtcttttctgtaatattctctttcatgctgaatttactatgaccatttataagcagtgcagttaactacagatagcatttcaggacaaaatagatgactcaaaccatttattgcttaaaaaatagcttacgccatgctatgctataagcagcttttatgcacattgacaaatgaagagtaagcttcagcttgctaaaggaaactgtggaaccttttgtaacttttggtgatatggaaaattatttacaaaccgtcaaagaatatgaggaagttgctgtatgacatagtgctggcactgatattatccatcatctctttttggacacttctgtaaatgtgattggattgtttgaaagaagatttaaagtttcaaagttttttgttctgtttttgctttgcatttggagaaaatattgaaagcagggtatgttgtttcattcaccttgaaaaaaccatgagtaaatggggatatagaatctctgaatagctcgctaaaagattcaagcaagggacatgaattttgttccatctatcaataatatccagaagaacaacttttttaaagagtctatagcaaaaagcaaaaaaaaaaaaaaattctaaacacaaagtcaaaataaacctattgtaaaagcatttcgtgatgagcatgaaaaagattgtttaaagatgatccccccagctacccattttccaaaactacacagatcacagctcatttctctaagtggagcagttatcaagaaacccaaacaccaaaattgctactcttcacatttaatcctacaaaaagtactccaatttcaaaatatgtatgtaacctgcgatttcaatgattgttgttcatatacatcatgtattattttggcccattttgggcctaaaaaagaaaactatgccttaaaaatcagaaccttttctccccactatgcttatgtggccatctacagcacttagaataaaaacagatgttaaaatattcagtgaaagttttattggaaaaaggaattgagatatataattgagatttggtgaaattgaaggagaaaatttaagtgagtctttaaaatatattctgaatgaaaactgtattgaggattcatttttgttccttttttttctttttctcttttctcctttttcttctttttaatagtctagttttagtcagtcagtgaggaagaattgggccatgctaacgttatcacaagagaacaatggcagaaatggtattagttatataatatttaaggacaaactatatgttttgctgttttaacgtagtgactcactgaactaaatacataattgaccaacattaagtgtatttccaatacagaagggttgaaaatattacattataaactcttttgaaaaatgtatctaaaattttttaagttctgttttgattccactttttggttgagtttttatgtttttgttttcaggtagattaataaatctggcagctgatttctgcaagattcttgtgttttgaatttctcattgaattggctactcaaacatagaaatcatttgttaatgatgtaatgtcttctctcagcttttatcttcactgctgtttgctgtctcttgatgatgacatgttaatacccaatagattaattgcaacaaacacttatactcaaataactaagtaaaaataatttttcttgttatgtccatgaaaagtgcttcagaataaaaatccacaagactgacagtgcagaacatttttctcaaatcatgggcggatcttggaggtctagtttcccgtagatgctgtaaccaattaccacaacttcagtaatttacacaaatttatcttatagttctggaggcagaagttcaaaagaagccttaagagactaaaaccaagatgtccttaggtctggttccttctggaggctccaggggagattcttccagctttcacttctagagtctgctgacattccttggctcctggctacatcacttcaatctctgcttccatggtcacatactcttctactatagtcaaatttccttcctgcctcttataaggatgcttgtgattacatttaggggatgctcagataatccaggacaatctctccatctcaagatccttaacttaatgacgtgtgccaagtccctttggctagataattattcataggtcccagggattaggacatggatgtaaggggtgagggcagggctgttattcagaacaccgcacggaggaggaagactgtgtagcaaagactctaattgatttactcaggaacagtggagttctgctgagggatctaggatttgaaagtactagagtttgcttttatttaccactgagatattttccccttattctgcataaataattttgaaaactttctatattaaatttcaactattccactaaaatgtctggtaatcacatcaagcctttagattattcaaatccttccccagcccccaggaaaacactaagtcatgaaacagaaaaacagaaggtatgataataatagtaataacagttaaatcagtggtctaatccagattttattttttaatacatttcttttggtgttaatatgggttactatgtgatcttatcatttgctagtgattattacttattaggtaagaacaatgtgtaaaatatgtctattactcaaaagaacaattgcaaaatgagtcaacttatctttatataaccaggaaagaaatatattgccagaagctacagaattttgccagatgatagggatttctaaaatgagccactttgtctatcatgcagccttttcagagcttgtaatgagaaaacattacagaggagaaggtcatttggatgtttgttacttggaatcctagaaaacaaaaactaaaatttaaaaataagaagtgagtaagctattttccatttgcgatttggtatggagaagagaggaaatagaattattaaaaaaatacaaattgggtaaaagtgatggtggaaaaaatataaagaaggcaaatgtacatattaagcaattctactaagaattggaaaaatcaagtttcaaaaagatggtaatagttgggcatgatactagaaaatttcacccagtttattcagagctcaactagtacttttaggacttctttttttatatacatgagactcactttgacatacttaaaaaaaaaacagtttatggaaagtacagtttaagaggagaatttgattagactaagtggatatctttatagaaatattaatgatttcagaattttcagttacaagtgtatataccgtggctattgtttatggattcatatgtaaggtagggtcttttttgcatatagactccagtattagttactttcattctaaaattatatttatgcttctatggggaagaaaatttttaattcacttggttgtattaaaattatacttacggtttgagaaaacatgctatgaaaatcatgattatagcaaattaaatatgctcaaaatttaaatctaaaataaaagcccagaaactg

SEQ ID NO: 1525 - DNA, 554 bp, Homo sapiens
  source 1..554: mol_type = genomic DNA
cgttattggctgcgggaagaacctcgccgggacctaacccgaagctccgccccctcgcggttaccctggatacccgtcaggctcgggctgcagagaaggttgatagaagtccagatcctgaggaaatctccagctaaatgctcaaaatataaaatactgagctgagatttgcgaagagcagcagcatggatggattttatgaccagcaagtgccttacatggtcaccaatagtcagcgtgggagaaattgtaacgagaaaccaacaaatgtcaggaaaagaaaattcattaacagagatctggctcatgattcagaagaactctttcaagatctaagtcaattacaggaaacatggcttgcagaagctcaggtacctgacaatgatgagcagtttgtaccagactatcaggctgaaagtttggcttttcatggcctgccactgaaaatcaagaaagaaccccacagtccatgttcagaaatcagctctgcctgcagtcaagaacagccctttaaattcagctatggagaaaagtgcctgtacaatgtcagtgcc

SEQ ID NO: 1526 - DNA, 6740 bp, Homo sapiens
  source 1..6740: mol_type = genomic DNA
gtatccccaggcgccttaacaataagcagcgggttacagaggaaatcgagtctctccgtggcgcttccaggctgaggacccagcgcctaccggccgagcaccccctagggcagaggggcgagggagacccgcgggaaggggcagcaagccgcctgattgacagcccgaaatctgatcttgtgaaagagacgcggagccaatgggaggcagcgatccatcagtttggattggaggcccctggaggagaagtagaggaaaaaccaccgaattgagctctgtcagaggcgctttcggcttccaagggggaagtgctgggctataattaatgtttttattaaatttggagggaagtttttgcagcctttcgcctagcgtggccttcagtcccgttaggtgcaaagcaagtctcgttgatcgccattgctagttttgcacacgtttgcgaatcagagctgcccggggtacaccgaccgcgcagggaaacatcgagagtgtaaataaatacatcgcctcttgttcggatttttgctactaccgaaaatatgtaaattgtgaactctgttggctctctttggatccaggttgatagaagtccagatcctgaggaaatctccagctaaatgctcaaaatataaaatactgagctgagatttgcgaagagcagcagcatggatggattttatgaccagcaagtgccttacatggtcaccaatagtcagcgtgggagaaattgtaacgagaaaccaacaaatgtcaggaaaagaaaattcattaacagagatctggctcatgattcagaagaactctttcaagatctaagtcaattacaggaaacatggcttgcagaagctcaggtacctgacaatgatgagcagtttgtaccagactatcaggctgaaagtttggcttttcatggcctgccactgaaaatcaagaaagaaccccacagtccatgttcagaaatcagctctgcctgcagtcaagaacagccctttaaattcagctatggagaaaagtgcctgtacaatgtcagtgcctatgatcagaagccacaagtgggaatgaggccctccaacccccccacaccatccagcacgccagtgtccccactgcatcatgcatctccaaactcaactcatacaccgaaacctgaccgggccttcccagctcacctccctccatcgcagtccataccagatagcagctaccccatggaccacagatttcgccgccagctttctgaaccctgtaactcctttcctcctttgccgacgatgccaagggaaggacgtcctatgtaccaacgccagatgtctgagccaaacatccccttcccaccacaaggctttaagcaggagtaccacgacccagtgtatgaacacaacaccatggttggcagtgcggccagccaaagctttccccctcctctgatgattaaacaggaacccagagattttgcatatgactcagaagtgcctagctgccactccatttatatgaggcaagaaggcttcctggctcatcccagcagaacagaaggctgtatgtttgaaaagggccccaggcagttttatgatgacacctgtgttgtcccagaaaaattcgatggagacatcaaacaagagccaggaatgtatcgggaaggacccacataccaacggcgaggatcacttcagctctggcagtttttggtagctcttctggatgacccttcaaattctcattttattgcctggactggtcgaggcatggaatttaaactgattgagcctgaagaggtggcccgacgttggggcattcagaaaaacaggccagctatgaactatgataaacttagccgttcactccgctattactatgagaaaggaattatgcaaaaggtggctggagagagatatgtctacaagtttgtgtgtgatccagaagcccttttctccatggcctttccagataatcagcgtccactgctgaagacagacatggaacgtcacatcaacgaggaggacacagtgcctctttctcactttgatgagagcatggcctacatgccggaagggggctgctgcaacccccacccctacaacgaaggctacgtgtattaacacaagtgacagtcaagcagggcgtttttgcgcttttccttttttctgcaagatacagagaattgctgaatctttgttttatttctgttgtttgtattttatttttaaataataatacacaaaaaggggcttttcctgttgcattattctatggtctgccatggactgtgcactttatttgagggtgggtgggagtaatctaaacatttattctgtgtaacaggaagctaatgggtgaatgggcagagggatttggggattactttttacttaggcttgggatggggtcctacaagttttgagtatgatgaaactatatcatgtctgtttgatttcataacaacataagataatgtttattttatcggggtatctatggtacagttaatttcacgttgtgtaaatatccacttggagactatttgccttgggcattttcccctgtcatttatgagtctctgcaggtgtacaaaaaaaccccaatctactgtaaatggcagtttaattgttagaaatgactgtttttgcaccacttgtaaaaaggtatttagcgattgcatttgctgtttgttgttttattttgctttatatatgacttgcagaggataaccataaaatgggtaattctctctgaagttgaataatcaccatgactgtaaatgaggggcacaattttggactctggcgccaaactgagtcataggccagtagcattacgtgtatctggtgccaccttgctgtttagatacaaatcataccgtcttttaaatattttgaagcccatttcagttaaataatgacatgtcatggtcctttggaatcttcatttaaatgttaaatctggaatcaaaatgaagcaaaaaatatctgtctccttttcactttcttcagtacataaatacattatttaatcaataagaattaactgtactaaatcatgtattatgctgttctagttacagcaaacactctttaagaaaaatatccaatacactaaataggtactatagtaatttttagacatggtacccattgatatgcatttaaaccttttactgctgtgttatgttgataacatatataaatattagataatgctaatgcttctgctgctgtcttttctgtaatattctctttcatgctgaatttactatgaccatttataagcagtgcagttaactacagatagcatttcaggacaaaatagatgactcaaaccatttattgcttaaaaaatagcttacgccatgctatgctataagcagcttttatgcacattgacaaatgaagagtaagcttcagcttgctaaaggaaactgtggaaccttttgtaacttttggtgatatggaaaattatttacaaaccgtcaaagaatatgaggaagttgctgtatgacatagtgctggcactgatattatccatcatctctttttggacacttctgtaaatgtgattggattgtttgaaagaagatttaaagtttcaaagttttttgttctgtttttgctttgcatttggagaaaatattgaaagcagggtatgttgtttcattcaccttgaaaaaaccatgagtaaatggggatatagaatctctgaatagctcgctaaaagattcaagcaagggacatgaattttgttccatctatcaataatatccagaagaacaacttttttaaagagtctatagcaaaaagcaaaaaaaaaaaaaaattctaaacacaaagtcaaaataaacctattgtaaaagcatttcgtgatgagcatgaaaaagattgtttaaagatgatccccccagctacccattttccaaaactacacagatcacagctcatttctctaagtggagcagttatcaagaaacccaaacaccaaaattgctactcttcacatttaatcctacaaaaagtactccaatttcaaaatatgtatgtaacctgcgatttcaatgattgttgttcatatacatcatgtattattttggcccattttgggcctaaaaaagaaaactatgccttaaaaatcagaaccttttctccccactatgcttatgtggccatctacagcacttagaataaaaacagatgttaaaatattcagtgaaagttttattggaaaaaggaattgagatatataattgagatttggtgaaattgaaggagaaaatttaagtgagtctttaaaatatattctgaatgaaaactgtattgaggattcatttttgttccttttttttctttttctcttttctcctttttcttctttttaatagtctagttttagtcagtcagtgaggaagaattgggccatgctaacgttatcacaagagaacaatggcagaaatggtattagttatataatatttaaggacaaactatatgttttgctgttttaacgtagtgactcactgaactaaatacataattgaccaacattaagtgtatttccaatacagaagggttgaaaatattacattataaactcttttgaaaaatgtatctaaaattttttaagttctgttttgattccactttttggttgagtttttatgtttttgttttcaggtagattaataaatctggcagctgatttctgcaagattcttgtgttttgaatttctcattgaattggctactcaaacatagaaatcatttgttaatgatgtaatgtcttctctcagcttttatcttcactgctgtttgctgtctcttgatgatgacatgttaatacccaatagattaattgcaacaaacacttatactcaaataactaagtaaaaataatttttcttgttatgtccatgaaaagtgcttcagaataaaaatccacaagactgacagtgcagaacatttttctcaaatcatgggcggatcttggaggtctagtttcccgtagatgctgtaaccaattaccacaacttcagtaatttacacaaatttatcttatagttctggaggcagaagttcaaaagaagccttaagagactaaaaccaagatgtccttaggtctggttccttctggaggctccaggggagattcttccagctttcacttctagagtctgctgacattccttggctcctggctacatcacttcaatctctgcttccatggtcacatactcttctactatagtcaaatttccttcctgcctcttataaggatgcttgtgattacatttaggggatgctcagataatccaggacaatctctccatctcaagatccttaacttaatgacgtgtgccaagtccctttggctagataattattcataggtcccagggattaggacatggatgtaaggggtgagggcagggctgttattcagaacaccgcacggaggaggaagactgtgtagcaaagactctaattgatttactcaggaacagtggagttctgctgagggatctaggatttgaaagtactagagtttgcttttatttaccactgagatattttccccttattctgcataaataattttgaaaactttctatattaaatttcaactattccactaaaatgtctggtaatcacatcaagcctttagattattcaaatccttccccagcccccaggaaaacactaagtcatgaaacagaaaaacagaaggtatgataataatagtaataacagttaaatcagtggtctaatccagattttattttttaatacatttcttttggtgttaatatgggttactatgtgatcttatcatttgctagtgattattacttattaggtaagaacaatgtgtaaaatatgtctattactcaaaagaacaattgcaaaatgagtcaacttatctttatataaccaggaaagaaatatattgccagaagctacagaattttgccagatgatagggatttctaaaatgagccactttgtctatcatgcagccttttcagagcttgtaatgagaaaacattacagaggagaaggtcatttggatgtttgttacttggaatcctagaaaacaaaaactaaaatttaaaaataagaagtgagtaagctattttccatttgcgatttggtatggagaagagaggaaatagaattattaaaaaaatacaaattgggtaaaagtgatggtggaaaaaatataaagaaggcaaatgtacatattaagcaattctactaagaattggaaaaatcaagtttcaaaaagatggtaatagttgggcatgatactagaaaatttcacccagtttattcagagctcaactagtacttttaggacttctttttttatatacatgagactcactttgacatacttaaaaaaaaaacagtttatggaaagtacagtttaagaggagaatttgattagactaagtggatatctttatagaaatattaatgatttcagaattttcagttacaagtgtatataccgtggctattgtttatggattcatatgtaaggtagggtcttttttgcatatagactccagtattagttactttcattctaaaattatatttatgcttctatggggaagaaaatttttaattcacttggttgtattaaaattatacttacggtttgagaaaacatgctatgaaaatcatgattatagcaaattaaatatgctcaaaatttaaatctaaaataaaagcccagaaactgaaaat

SEQ ID NO: 1527 - DNA, 580 bp, Homo sapiens
  source 1..580: mol_type = genomic DNA
aagctccgccccctcgcggttaccctggatacccgtcaggctcgggctgcagagaaggaggatcagggcaagtggcttcagagatgcagccctcactgcttaacgtcctagttattgtccttgaaacccgagccatctcaccgctcgcccccaaccctgggctctggctgtttaaaagctggagaggaagtgaaagcgtcaagtacagttgatagaagtccagatcctgaggaaatctccagctaaatgctcaaaatataaaatactgagctgagatttgcgaagagcagcagcatggatggattttatgaccagcaagtgccttacatggtcaccaatagtcagcgtgggagaaattgtaacgagaaaccaacaaatgtcaggaaaagaaaattcattaacagagatctggctcatgattcagaagaactctttcaagatctaagtcaattacaggaaacatggcttgcagaagctcaggtacctgacaatgatgagcagtttgtaccagactatcaggctgaaagtttggcttttcatggcctgccactgaaaatcaagaaagaaccccacagtccat

SEQ ID NO: 1528 - DNA, 546 bp, Homo sapiens
  source 1..546: mol_type = genomic DNA
agaggcgctttcggcttccaagggggaagtgctgggctataattaatgtttttattaaatttggagggaagtttttgcagcctttcgcctagcgtggccttcaggtgggtctttccaacaactttttatgtctctccagataattgcatggttgtgggtcgcaaaaactatcctgatgaaagaggtgtctccgtctctttagtcccgttaggtgcaaagcaagtctcgttgatcgccattgctagttttgcacacgtttgcgaatcagagctgcccggggtacaccgaccgcgcagggaaacatcgagagtgtaaataaatacatcgcctcttgttcggatttttgctactaccgaaaatatgtaaattgtgaactctgttggctctctttggatccaggttgatagaagtccagatcctgaggaaatctccagctaaatgctcaaaatataaaatactgagctgagatttgcgaagagcagcagcatggatggattttatgaccagcaagtgccttacatggtcaccaatagtcagcgtgggaga

SEQ ID NO: 1529 - DNA, 3363 bp, Homo sapiens
  source 1..3363: mol_type = genomic DNA
gtcatgcatacattagagcctctgatgagtttgtctttggggactctggggctgtactacccagtgtcatcacaaattaccaggagaaattgcttccagctcacaatcacatctgcttttggcaagaactaatgcaccaagacttcaagttctaagcctctgttcagattttaattgcaattgatcaggtttatattattgtacctccagagacctcctagagccagaacccggctggcttgctgtttcctttagagcagcgcatatcattatttggtgttctggtggaggacttttctgatggcagaaattagtttctctgggttcatcaggacgggatgcttcaagatttaagtgcaagtgtcttctttccaccttgttcacaacacagaacgttagctcaggtacctgacaatgatgagcagtttgtaccagactatcaggctgaaagtttggcttttcatggcctgccactgaaaatcaagaaagaaccccacagtccatgttcagaaatcagctctgcctgcagtcaagaacagccctttaaattcagctatggagaaaagtgcctgtacaatgtcagtgcctatgatcagaagccacaagtgggaatgaggccctccaacccccccacaccatccagcacgccagtgtccccactgcatcatgcatctccaaactcaactcatacaccgaaacctgaccgggccttcccagctcacctccctccatcgcagtccataccagatagcagctaccccatggaccacagatttcgccgccagctttctgaaccctgtaactcctttcctcctttgccgacgatgccaagggaaggacgtcctatgtaccaacgccagatgtctgagccaaacatccccttcccaccacaaggctttaagcaggagtaccacgacccagtgtatgaacacaacaccatggttggcagtgcggccagccaaagctttccccctcctctgatgattaaacaggaacccagagattttgcatatgactcagaagtgcctagctgccactccatttatatgaggcaagaaggcttcctggctcatcccagcagaacagaaggctgtatgtttgaaaagggccccaggcagttttatgatgacacctgtgttgtcccagaaaaattcgatggagacatcaaacaagagccaggaatgtatcgggaaggacccacataccaacggcgaggatcacttcagctctggcagtttttggtagctcttctggatgacccttcaaattctcattttattgcctggactggtcgaggcatggaatttaaactgattgagcctgaagaggtggcccgacgttggggcattcagaaaaacaggccagctatgaactatgataaacttagccgttcactccgctattactatgagaaaggaattatgcaaaaggtggctggagagagatatgtctacaagtttgtgtgtgatccagaagcccttttctccatggcctttccagataatcagcgtccactgctgaagacagacatggaacgtcacatcaacgaggaggacacagtgcctctttctcactttgatgagagcatggcctacatgccggaagggggctgctgcaacccccacccctacaacgaaggctacgtgtattaacacaagtgacagtcaagcagggcgtttttgcgcttttccttttttctgcaagatacagagaattgctgaatctttgttttatttctgttgtttgtattttatttttaaataataatacacaaaaaggggcttttcctgttgcattattctatggtctgccatggactgtgcactttatttgagggtgggtgggagtaatctaaacatttattctgtgtaacaggaagctaatgggtgaatgggcagagggatttggggattactttttacttaggcttgggatggggtcctacaagttttgagtatgatgaaactatatcatgtctgtttgatttcataacaacataagataatgtttattttatcggggtatctatggtacagttaatttcacgttgtgtaaatatccacttggagactatttgccttgggcattttcccctgtcatttatgagtctctgcaggtgtacaaaaaaaccccaatctactgtaaatggcagtttaattgttagaaatgactgtttttgcaccacttgtaaaaaggtatttagcgattgcatttgctgtttgttgttttattttgctttatatatgacttgcagaggataaccataaaatgggtaattctctctgaagttgaataatcaccatgactgtaaatgaggggcacaattttggactctggcgccaaactgagtcataggccagtagcattacgtgtatctggtgccaccttgctgtttagatacaaatcataccgtcttttaaatattttgaagcccatttcagttaaataatgacatgtcatggtcctttggaatcttcatttaaatgttaaatctggaatcaaaatgaagcaaaaaatatctgtctccttttcactttcttcagtacataaatacattatttaatcaataagaattaactgtactaaatcatgtattatgctgttctagttacagcaaacactctttaagaaaaatatccaatacactaaataggtactatagtaatttttagacatggtacccattgatatgcatttaaaccttttactgctgtgttatgttgataacatatataaatattagataatgctaatgcttctgctgctgtcttttctgtaatattctctttcatgctgaatttactatgaccatttataagcagtgcagttaactacagatagcatttcaggacaaaatagatgactcaaaccatttattgcttaaaaaatagcttacgccatgctatgctataagcagcttttatgcacattgacaaatgaagagtaagcttcagcttgctaaaggaaactgtggaaccttttgtaacttttggtgatatggaaaattatttacaaaccgtcaaagaatatgaggaagttgctgtatgacatagtgctggcactgatattatccatcatctctttttggacacttctgtaaatgtgattggattgtttgaaagaagatttaaagtttcaaagttttttgttctgtttttgctttgcatttggagaaaatattgaaagcagggtatgttgtttcattcaccttgaaaaaaccatgagtaaatggggatatagaatctctgaatagctcgctaaaagattcaagcaagggacatgaattttgttccatctatcaataatatccagaagaacaacttttttaaagagtctatagcaaaaagcaaaaaaaaaaaaaaa

SEQ ID NO: 1530 - DNA, 4402 bp, Homo sapiens
  source 1..4402: mol_type = genomic DNA
gagctctgtcagaggcgctttcggcttccaagggggaagtgctgggctataattaatgtttttattaaatttggagggaagtttttgcagcctttcgcctagcgtggccttcaggttgatagaagtccagatcctgaggaaatctccagctaaatgctcaaaatataaaatactgagctgagatttgcgaagagcagcagcatggatggattttatgaccagcaagtgccttacatggtcaccaatagtcagcgtgggagaaattgtaacgagaaaccaacaaatgtcaggaaaagaaaattcattaacagagatctggctcatgattcagaagaactctttcaagatctaagtcaattacaggaaacatggcttgcagaagctcaggtacctgacaatgatgagcagtttgtaccagactatcaggctgaaagtttggcttttcatggcctgccactgaaaatcaagaaagaaccccacagtccatgttcagaaatcagctctgcctgcagtcaagaacagccctttaaattcagctatggagaaaagtgcctgtacaatgtcagtgcctatgatcagaagccacaagtgggaatgaggccctccaacccccccacaccatccagcacgccagtgtccccactgcatcatgcatctccaaactcaactcatacaccgaaacctgaccgggccttcccagctcacctccctccatcgcagtccataccagatagcagctaccccatggaccacagatttcgccgccagctttctgaaccctgtaactcctttcctcctttgccgacgatgccaagggaaggacgtcctatgtaccaacgccagatgtctgagccaaacatccccttcccaccacaaggctttaagcaggagtaccacgacccagtgtatgaacacaacaccatggttggcagtgcggccagccaaagctttccccctcctctgatgattaaacaggaacccagagattttgcatatgactcaggctgtatgtttgaaaagggccccaggcagttttatgatgacacctgtgttgtcccagaaaaattcgatggagacatcaaacaagagccaggaatgtatcgggaaggacccacataccaacggcgaggatcacttcagctctggcagtttttggtagctcttctggatgacccttcaaattctcattttattgcctggactggtcgaggcatggaatttaaactgattgagcctgaagaggtggcccgacgttggggcattcagaaaaacaggccagctatgaactatgataaacttagccgttcactccgctattactatgagaaaggaattatgcaaaaggtggctggagagagatatgtctacaagtttgtgtgtgatccagaagcccttttctccatggcctttccagataatcagcgtccactgctgaagacagacatggaacgtcacatcaacgaggaggacacagtgcctctttctcactttgatgagagcatggcctacatgccggaagggggctgctgcaacccccacccctacaacgaaggctacgtgtattaacacaagtgacagtcaagcagggcgtttttgcgcttttccttttttctgcaagatacagagaattgctgaatctttgttttatttctgttgtttgtattttatttttaaataataatacacaaaaaggggcttttcctgttgcattattctatggtctgccatggactgtgcactttatttgagggtgggtgggagtaatctaaacatttattctgtgtaacaggaagctaatgggtgaatgggcagagggatttggggattactttttacttaggcttgggatggggtcctacaagttttgagtatgatgaaactatatcatgtctgtttgatttcataacaacataagataatgtttattttatcggggtatctatggtacagttaatttcacgttgtgtaaatatccacttggagactatttgccttgggcattttcccctgtcatttatgagtctctgcaggtgtacaaaaaaaccccaatctactgtaaatggcagtttaattgttagaaatgactgtttttgcaccacttgtaaaaaggtatttagcgattgcatttgctgtttgttgttttattttgctttatatatgacttgcagaggataaccataaaatgggtaattctctctgaagttgaataatcaccatgactgtaaatgaggggcacaattttggactctggcgccaaactgagtcataggccagtagcattacgtgtatctggtgccaccttgctgtttagatacaaatcataccgtcttttaaatattttgaagcccatttcagttaaataatgacatgtcatggtcctttggaatcttcatttaaatgttaaatctggaatcaaaatgaagcaaaaaatatctgtctccttttcactttcttcagtacataaatacattatttaatcaataagaattaactgtactaaatcatgtattatgctgttctagttacagcaaacactctttaagaaaaatatccaatacactaaataggtactatagtaatttttagacatggtacccattgatatgcatttaaaccttttactgctgtgttatgttgataacatatataaatattagataatgctaatgcttctgctgctgtcttttctgtaatattctctttcatgctgaatttactatgaccatttataagcagtgcagttaactacagatagcatttcaggacaaaatagatgactcaaaccatttattgcttaaaaaatagcttacgccatgctatgctataagcagcttttatgcacattgacaaatgaagagtaagcttcagcttgctaaaggaaactgtggaaccttttgtaacttttggtgatatggaaaattatttacaaaccgtcaaagaatatgaggaagttgctgtatgacatagtgctggcactgatattatccatcatctctttttggacacttctgtaaatgtgattggattgtttgaaagaagatttaaagtttcaaagttttttgttctgtttttgctttgcatttggagaaaatattgaaagcagggtatgttgtttcattcaccttgaaaaaaccatgagtaaatggggatatagaatctctgaatagctcgctaaaagattcaagcaagggacatgaattttgttccatctatcaataatatccagaagaacaacttttttaaagagtctatagcaaaaagcaaaaaaaaaaaaaaattctaaacacaaagtcaaaataaacctattgtaaaagcatttcgtgatgagcatgaaaaagattgtttaaagatgatccccccagctacccattttccaaaactacacagatcacagctcatttctctaagtggagcagttatcaagaaacccaaacaccaaaattgctactcttcacatttaatcctacaaaaagtactccaatttcaaaatatgtatgtaacctgcgatttcaatgattgttgttcatatacatcatgtattattttggcccattttgggcctaaaaaagaaaactatgccttaaaaatcagaaccttttctccccactatgcttatgtggccatctacagcacttagaataaaaacagatgttaaaatattcagtgaaagttttattggaaaaaggaattgagatatataattgagatttggtgaaattgaaggagaaaatttaagtgagtctttaaaatatattctgaatgaaaactgtattgaggattcatttttgttccttttttttctttttctcttttctcctttttcttctttttaatagtctagttttagtcagtcagtgaggaagaattgggccatgctaacgttatcacaagagaacaatggcagaaatggtattagttatataatatttaaggacaaactatatgttttgctgttttaacgtagtgactcactgaactaaatacataattgaccaacattaagtgtatttccaatacagaagggttgaaaatattacattataaactcttttgaaaaatgtatctaaaattttttaagttctgttttgattccactttttggttgagtttttatgtttttgttttcaggtagattaataaatctggcagctgatttctgcaagattcttgtgttttgaatttctcattgaattggctactcaaacatagaaatcatttgttaatgatgtaatgtcttctctcagcttttatcttcactgctgtttgctgtctcttgatgatgacatgttaatacccaatagattaattgcaacaaacacttatactcaaataactaagtaaaaataatttttcttgttatgtccatgaaaagtgcttcagaataaaaatccacaagactgac

SEQ ID NO: 1531 - DNA, 2391 bp, Homo sapiens
  source 1..2391: mol_type = genomic DNA
gggtggagagctgaggccgagcgaaggaaatgcaccaatcagctgctcccccgggctcacaactgtctgctgcgcccgaaaaacaagtcggtgcgctggggacccggggccggggccgccttactccggcctagccccgcggccctcggtgcgggctccagggcatgctcgggaccccccgcggctccagcccagacgccccggcctcaggtctcggcccccgcttggggccccggccgtgcggccggagggagcggccggatggagcggaggatgaaagccggatacttggaccagcaagtgccctacaccttcagcagcaaatcgcccggaaatgggagcttgcgcgaagcgctgatcggcccgctggggaagctcatggacccgggctccctgccgcccctcgactctgaagatctcttccaggatctaagtcacttccaggagacgtggctcgctgaagctcaggtaccagacagtgatgagcagtttgttcctgatttccattcagaaaacctagctttccacagccccaccaccaggatcaagaaggagccccagagtccccgcacagacccggccctgtcctgcagcaggaagccgccactcccctaccaccatggcgagcagtgcctttactccagtgcctatgacccccccagacaaatcgccatcaagtcccctgcccctggtgcccttggacagtcgcccctacagccctttccccgggcagagcaacggaatttcctgagatcctctggcacctcccagccccaccctggccatgggtacctcggggaacatagctccgtcttccagcagcccctggacatttgccactccttcacatctcagggagggggccgggaacccctcccagccccctaccaacaccagctgtcggagccctgcccaccctatccccagcagagctttaagcaagaataccatgatcccctgtatgaacaggcgggccagccagccgtggaccagggtggggtcaatgggcacaggtacccaggggcgggggtggtgatcaaacaggaacagacggacttcgcctacgactcagatgtcaccgggtgcgcatcaatgtacctccacacagagggcttctctgggccctctccaggtgacggggccatgggctatggctatgagaaacctctgcgaccattcccagatgatgtctgcgttgtccctgagaaatttgaaggagacatcaagcaggaaggggtcggtgcatttcgagaggggccgccctaccagcgccggggtgccctgcagctgtggcaatttctggtggccttgctggatgacccaacaaatgcccatttcattgcctggacgggccggggaatggagttcaagctcattgagcctgaggaggtcgccaggctctggggcatccagaagaaccggccagccatgaattacgacaagctgagccgctcgctccgatactattatgagaaaggcatcatgcagaaggtggctggtgagcgttacgtgtacaagtttgtgtgtgagcccgaggccctcttctctttggccttcccggacaatcagcgtccagctctcaaggctgagtttgaccggcctgtcagtgaggaggacacagtccctttgtcccacttggatgagagccccgcctacctcccagagctggctggccccgcccagccatttggccccaagggtggctactcttactagcccccagcggctgttccccctgccgcaggtgggtgctgccctgtgtacatataaatgaatctggtgttggggaaaccttcatctgaaacccacagatgtctctggggcagatccccactgtcctaccagttgccctagcccagactctgagctgctcaccggagtcattgggaaggaaaagtggagaaatggcaagtctagagtctcagaaactcccctgggggtttcacctgggccctggaggaattcagctcagcttcttcctaggtccaagccccccacaccttttccccaaccacagagaacaagagtttgttctgttctgggggacagagaaggcgcttcccaacttcatactggcaggagggtgaggaggttcactgagctccccagatctcccactgcggggagacagaagcctggactctgccccacgctgtggccctggagggtcccggtttgtcagttcttggtgctctgtgttcccagaggcaggcggaggttgaagaaaggaacctgggatgaggggtgctgggtataagcagagagggatgggttcctgctccaagggaccctttgcctttcttctgccctttcctaggcccaggcctgggtttgtacttccacctccaccacatctgccagaccttaataaaggcccccacttctcccatt

SEQ ID NO: 1532 - DNA, 2258 bp, Homo sapiens
  source 1..2258: mol_type = genomic DNA
cacgttcttatgtaaccgagcccgggtaaagcagggctgcagaaagcagaaacggcgagcccggctcctgggagcaggtctcggcccccgcttggggccccggccgtgcggccggagggagcggccggatggagcggaggatgaaagccggatacttggaccagcaagtgccctacaccttcagcagcaaatcgcccggaaatgggagcttgcgcgaagcgctgatcggcccgctggggaagctcatggacccgggctccctgccgcccctcgactctgaagatctcttccaggatctaagtcacttccaggagacgtggctcgctgaagctcaggtaccagacagtgatgagcagtttgttcctgatttccattcagaaaacctagctttccacagccccaccaccaggatcaagaaggagccccagagtccccgcacagacccggccctgtcctgcagcaggaagccgccactcccctaccaccatggcgagcagtgcctttactccagtgcctatgacccccccagacaaatcgccatcaagtcccctgcccctggtgcccttggacagtcgcccctacagccctttccccgggcagagcaacggaatttcctgagatcctctggcacctcccagccccaccctggccatgggtacctcggggaacatagctccgtcttccagcagcccctggacatttgccactccttcacatctcagggagggggccgggaacccctcccagccccctaccaacaccagctgtcggagccctgcccaccctatccccagcagagctttaagcaagaataccatgatcccctgtatgaacaggcgggccagccagccgtggaccagggtggggtcaatgggcacaggtacccaggggcgggggtggtgatcaaacaggaacagacggacttcgcctacgactcagatgtcaccgggtgcgcatcaatgtacctccacacagagggcttctctgggccctctccaggtgacggggccatgggctatggctatgagaaacctctgcgaccattcccagatgatgtctgcgttgtccctgagaaatttgaaggagacatcaagcaggaaggggtcggtgcatttcgagaggggccgccctaccagcgccggggtgccctgcagctgtggcaatttctggtggccttgctggatgacccaacaaatgcccatttcattgcctggacgggccggggaatggagttcaagctcattgagcctgaggaggtcgccaggctctggggcatccagaagaaccggccagccatgaattacgacaagctgagccgctcgctccgatactattatgagaaaggcatcatgcagaaggtggctggtgagcgttacgtgtacaagtttgtgtgtgagcccgaggccctcttctctttggccttcccggacaatcagcgtccagctctcaaggctgagtttgaccggcctgtcagtgaggaggacacagtccctttgtcccacttggatgagagccccgcctacctcccagagctggctggccccgcccagccatttggccccaagggtggctactcttactagcccccagcggctgttccccctgccgcaggtgggtgctgccctgtgtacatataaatgaatctggtgttggggaaaccttcatctgaaacccacagatgtctctggggcagatccccactgtcctaccagttgccctagcccagactctgagctgctcaccggagtcattgggaaggaaaagtggagaaatggcaagtctagagtctcagaaactcccctgggggtttcacctgggccctggaggaattcagctcagcttcttcctaggtccaagccccccacaccttttccccaaccacagagaacaagagtttgttctgttctgggggacagagaaggcgcttcccaacttcatactggcaggagggtgaggaggttcactgagctccccagatctcccactgcggggagacagaagcctggactctgccccacgctgtggccctggagggtcccggtttgtcagttcttggtgctctgtgttcccagaggcaggcggaggttgaagaaaggaacctgggatgaggggtgctgggtataagcagagagggatgggttcctgctccaagggaccctttgcctttcttctgccctttcctaggcccaggcctgggtttgtacttccacctccaccacatctgccagaccttaataaaggcccccacttctcccatt

SEQ ID NO: 1533 - DNA, 2024 bp, Homo sapiens
  source 1..2024: mol_type = genomic DNA
gcagaaagcagaaacggcgagcccggctcctgggagcagaaatcgcccggaaatgggagcttgcgcgaagcgctgatcggcccgctggggaagctcatggacccgggctccctgccgcccctcgactctgaagatctcttccaggatctaagtcacttccaggagacgtggctcgctgaagctcaggtaccagacagtgatgagcagtttgttcctgatttccattcagaaaacctagctttccacagccccaccaccaggatcaagaaggagccccagagtccccgcacagacccggccctgtcctgcagcaggaagccgccactcccctaccaccatggcgagcagtgcctttactccagtgcctatgacccccccagacaaatcgccatcaagtcccctgcccctggtgcccttggacagtcgcccctacagccctttccccgggcagagcaacggaatttcctgagatcctctggcacctcccagccccaccctggccatgggtacctcggggaacatagctccgtcttccagcagcccctggacatttgccactccttcacatctcagggagggggccgggaacccctcccagccccctaccaacaccagctgtcggagccctgcccaccctatccccagcagagctttaagcaagaataccatgatcccctgtatgaacaggcgggccagccagccgtggaccagggtggggtcaatgggcacaggtacccaggggcgggggtggtgatcaaacaggaacagacggacttcgcctacgactcagatgtcaccgggtgcgcatcaatgtacctccacacagagggcttctctgggccctctccaggtgacggggccatgggctatggctatgagaaacctctgcgaccattcccagatgatgtctgcgttgtccctgagaaatttgaaggagacatcaagcaggaaggggtcggtgcatttcgagaggggccgccctaccagcgccggggtgccctgcagctgtggcaatttctggtggccttgctggatgacccaacaaatgcccatttcattgcctggacgggccggggaatggagttcaagctcattgagcctgaggaggtcgccaggctctggggcatccagaagaaccggccagccatgaattacgacaagctgagccgctcgctccgatactattatgagaaaggcatcatgcagaaggtggctggtgagcgttacgtgtacaagtttgtgtgtgagcccgaggccctcttctctttggccttcccggacaatcagcgtccagctctcaaggctgagtttgaccggcctgtcagtgaggaggacacagtccctttgtcccacttggatgagagccccgcctacctcccagagctggctggccccgcccagccatttggccccaagggtggctactcttactagcccccagcggctgttccccctgccgcaggtgggtgctgccctgtgtacatataaatgaatctggtgttggggaaaccttcatctgaaacccacagatgtctctggggcagatccccactgtcctaccagttgccctagcccagactctgagctgctcaccggagtcattgggaaggaaaagtggagaaatggcaagtctagagtctcagaaactcccctgggggtttcacctgggccctggaggaattcagctcagcttcttcctaggtccaagccccccacaccttttccccaaccacagagaacaagagtttgttctgttctgggggacagagaaggcgcttcccaacttcatactggcaggagggtgaggaggttcactgagctccccagatctcccactgcggggagacagaagcctggactctgccccacgctgtggccctggagggtcccggtttgtcagttcttggtgctctgtgttcccagaggcaggcggaggttgaagaaaggaacctgggatgaggggtgctgggtataagcagagagggatgggttcctgctccaagggaccctttgcctttcttctg

SEQ ID NO: 1534 - DNA, 1628 bp, Homo sapiens
  source 1..1628: mol_type = genomic DNA
agccctccctggacggtgtgcgaacgcagccccctcccccaccaggtctcggcccccgcttggggccccggccgtgcggccggagggagcggccggatggagcggaggatgaaagccggatacttggaccagcaagtgccctacaccttcagcagcaaatcgcccggaaatgggagcttgcgcgaagcgctgatcggcccgctggggaagctcatggacccgggctccctgccgcccctcgactctgaagatctcttccaggatctaagtcacttccaggagacgtggctcgctgaagctcaggtaccagacagtgatgagcagtttgttcctgatttccattcagaaaacctagctttccacagccccaccaccaggatcaagaaggagccccagagtccccgcacagacccggccctgtcctgcagcaggaagccgccactcccctaccaccatggcgagcagtgcctttactccagctccgtcttccagcagcccctggacatttgccactccttcacatctcagggagggggccgggaacccctcccagccccctaccaacaccagctgtcggagccctgcccaccctatccccagcagagctttaagcaagaataccatgatcccctgtatgaacaggcgggccagccagccgtggaccagggtggggtcaatgggcacaggtacccaggggcgggggtggtgatcaaacaggaacagacggacttcgcctacgactcagatgtcaccgggtgcgcatcaatgtacctccacacagagggcttctctgggccctctccaggtgacggggccatgggctatggctatgagaaacctctgcgaccattcccagatgatgtctgcgttgtccctgagaaatttgaaggagacatcaagcaggaaggggtcggtgcatttcgagaggggccgccctaccagcgccggggtgccctgcagctgtggcaatttctggtggccttgctggatgacccaacaaatgcccatttcattgcctggacgggccggggaatggagttcaagctcattgagcctgaggaggtcgccaggctctggggcatccagaagaaccggccagccatgaattacgacaagctgagccgctcgctccgatactattatgagaaaggcatcatgcagaaggtggctggtgagcgttacgtgtacaagtttgtgtgtgagcccgaggccctcttctctttggccttcccggacaatcagcgtccagctctcaaggctgagtttgaccggcctgtcagtgaggaggacacagtccctttgtcccacttggatgagagccccgcctacctcccagagctggctggccccgcccagccatttggccccaagggtggctactcttactagcccccagcggctgttccccctgccgcaggtgggtgctgccctgtgtacatataaatgaatctggtgttggggaaaccttcatctgaaacccacagatgtctctggggcagatccccactgtcctaccagttgccctagcccagactctgagctgctcaccggagtcattgggaaggaaaagtggagaaatggcaagtctagagtctcagaaactcccctgggggtttcacctgggccct

SEQ ID NO: 1535 - DNA, 1775 bp, Homo sapiens
  source 1..1775: mol_type = genomic DNA
gcgcccgaaaaacaagtcggtgcgctggggacccggggccggggccgccttactccggcctagccccgcggccctcggtgcgggctccagggcatgctcgggaccccccgcggctccagcccagacgccccggcctcagaaatcgcccggaaatgggagcttgcgcgaagcgctgatcggcccgctggggaagctcatggacccgggctccctgccgcccctcgactctgaagatctcttccaggatctaagtcacttccaggagacgtggctcgctgaagctcaggtaccagacagtgatgagcagtttgttcctgatttccattcagaaaacctagctttccacagccccaccaccaggatcaagaaggagccccagagtccccgcacagacccggccctgtcctgcagcaggaagccgccactcccctaccaccatggcgagcagtgcctttactccagtgcctatgacccccccagacaaatcgccatcaagtcccctgcccctggtgcccttggacagtcgcccctacagccctttccccgggcagagcaacggaatttcctgagatcctctggcacctcccagccccaccctggccatgggtacctcggggaacatagctccgtcttccagcagcccctggacatttgccactccttcacatctcagggagggggccgggaacccctcccagccccctaccaacaccagctgtcggagccctgcccaccctatccccagcagagctttaagcaagaataccatgatcccctgtatgaacaggcgggccagccagccgtggaccagggtggggtcaatgggcacaggtacccaggggcgggggtggtgatcaaacaggaacagacggacttcgcctacgactcagatgtcaccgggtgcgcatcaatgtacctccacacagagggcttctctgggccctctccaggtgacggggccatgggctatggctatgagaaacctctgcgaccattcccagatgatgtctgcgttgtccctgagaaatttgaaggagacatcaagcaggaaggggtcggtgcatttcgagaggggccgccctaccagcgccggggtgccctgcagctgtggcaatttctggtggccttgctggatgacccaacaaatgcccatttcattgcctggacgggccggggaatggagttcaagctcattgagcctgaggaggtcgccaggctctggggcatccagaagaaccggccagccatgaattacgacaagctgagccgctcgctccgatactattatgagaaaggcatcatgcagaaggtggctggtgagcgttacgtgtacaagtttgtgtgtgagcccgaggccctcttctctttggccttcccggacaatcagcgtccagctctcaaggctgagtttgaccggcctgtcagtgaggaggacacagtccctttgtcccacttggatgagagccccgcctacctcccagagctggctggccccgcccagccatttggccccaagggtggctactcttactagcccccagcggctgttccccctgccgcaggtgggtgctgccctgtgtacatataaatgaatctggtgttggggaaaccttcatctgaaacccacagatgtctctggggcagatccccactgtcctaccagttgccctagcccagactctgagctgctcaccggagtcattgggaaggaaaagtggagaaatggcaagtctagagtctcagaaactcccctgggggtttcacctgggccctgg

SEQ ID NO: 1536 - DNA, 2228 bp, Homo sapiens
  source 1..2228: mol_type = genomic DNA
taccgagggaggtgaggggcgggccgggcgggtgtccgaggcggcggcggcggcatggcagggcggcgggtgaacgtgaacgtgggcgtgctgggccacatcgacagcggcaagacggcgctggcgcgggcgctaagcaccacagcctccaccgccgcctttgacaagcagccgcagagccgcgagcgcggcatcacgctcgatctgggcttctcgtgcttctcggtgccgctgcccgcgcgcctgcggtcgtctttgcccgagttccaggcagcgcccgaggccgagcccgagcccggcgagccactgcttcaggtcacgctggtcgactgccccgggcacgcctccctcatccggaccatcatcggcggggcccagatcattgatctgatgatgctggtcatcgatgtgaccaaggggatgcagacccagtcagcggaatgccttgtgatcggccagattgcctgccagaagctggtcgtggtgctgaacaaaatagacctcttacctgaaggaaagagacaggcagcaattgataaaatgaccaagaaaatgcagaagaccctagagaacaccaagttccgaggtgcaccgattatacccgtggcggccaagccggggggaccagaggcccccgaaactgaagctccacagggcattccagagctcattgagctcctgacgtcccagatttccatcccaacgagagatccctcgggaccgttcctcatgtctgtggaccactgtttctccatcaaaggccaaggcactgtgatgacagggaccatcctttcaggctccatcagcctcggtgacagtgtggagatccctgccctcaaggtggtgaagaaggtgaagtccatgcagatgttccacatgcccatcacttcagccatgcaaggagaccggctgggcatctgcgtcacccagtttgaccctaagctgctggagcgcgggttggtgtgtgcccccgagtccctgcacactgtccatgcggccctcatctctgtggaaaagataccgtatttccgggggcccctgcaaaccaaggccaagttccacattacagtgggccatgaaacagtcatgggccggttgatgttcttcagtcctgctccagataactttgaccaggagcctatactggactctttcaacttctctcaagaataccttttccaggagcagtacctgtccaaggatttgacaccagcagtgacagacaatgatgaggccgacaagaaggccggccaggccacagagggccattgtcctcggcagcagtgggccctggtggagtttgagaagcccgtcacctgccctcggctgtgcctggtgattggctccaggctagatgcggacattcacaccaacacgtgccggctagccttccatggcatcctgctccacgggctagaggacaggaactacgccgacagcttcctgcccaggctgaaggtgtacaagctgaagcacaagcatggccttgtggagcgggcgatggatgactacagtgtgatcggccgctccctgttcaaaaaggaaaccaacatccagctcttcgtggggctcaaggtgcacttgtccactggggaactgggcatcatcgacagtgccttcggccagagcggcaagttcaagatccacatcccaggtggcctcagccccgagtccaagaagatcctgacacccgccctcaagaagcgggcccgggctggccgtggggaggccaccaggcaggaggagagcgccgagcggagcgagccctcacagcatgtggtgctcagcctgactttcaagcgttatgtcttcgacacccacaagcgcatggttcagtctccctgagtgtccggtgacctcccccagggcctccttgcccagcccagtccaggctgctgtgccaaatcccaaccagccacgcctcagcctctcccagtctctccctgcagtcctgcagcagcagcccccacccccaagcttggtgctgagccctggtgaggagctgagggggatgggttgctggggccaggagggtctctcctccagcccctgcacactcccacccaggacagcccccagcccaactaggaaagggccatgggcagagggctggtagccagtatcttccactgccccatctgttggccacctgcaggccagtctcaaccctcccccaggtgggcaggcacttgatggctacaaataaatgtcccgtggccccagcccac

SEQ ID NO: 1537 - DNA, 10042 bp, Homo sapiens
  source 1..10042: mol_type = genomic DNA
agcagacgagggcttgtgcgagagggggccgggcggctgcagggaaggcggagtccaaggggaaaacgaaactgagaaccagctctcccgaagccgcgggtctccggccggcggcggcggcggcggcggcggcggcgcagtttctggagcaaattcagtttgccttcctggatttgtaaattgtaatgacctcaaaactttagcagttcttccatctgactcaggtttgcttctctggcggtcttcagaatcaacatccacacttccgtgattatctgcgtgcattttggacaaagcttccaaccaggatacgggaagaagaaatggctggtgatctttcagcaggtttcttcatggaggaacttaatacataccgtcagaagcagggagtagtacttaaatatcaagaactgcctaattcaggacctccacatgataggaggtttacatttcaagttataatagatggaagagaatttccagaaggtgaaggtagatcaaagaaggaagcaaaaaatgccgcagccaaattagctgttgagatacttaataaggaaaagaaggcagttagtcctttattattgacaacaacgaattcttcagaaggattatccatggggaattacataggccttatcaatagaattgcccagaagaaaagactaactgtaaattatgaacagtgtgcatcgggggtgcatgggccagaaggatttcattataaatgcaaaatgggacagaaagaatatagtattggtacaggttctactaaacaggaagcaaaacaattggccgctaaacttgcatatcttcagatattatcagaagaaacctcagtgaaatctgactacctgtcctctggttcttttgctactacgtgtgagtcccaaagcaactctttagtgaccagcacactcgcttctgaatcatcatctgaaggtgacttctcagcagatacatcagagataaattctaacagtgacagtttaaacagttcttcgttgcttatgaatggtctcagaaataatcaaaggaaggcaaaaagatctttggcacccagatttgaccttcctgacatgaaagaaacaaagtatactgtggacaagaggtttggcatggattttaaagaaatagaattaattggctcaggtggatttggccaagttttcaaagcaaaacacagaattgacggaaagacttacgttattaaacgtgttaaatataataacgagaaggcggagcgtgaagtaaaagcattggcaaaacttgatcatgtaaatattgttcactacaatggctgttgggatggatttgattatgatcctgagaccagtgatgattctcttgagagcagtgattatgatcctgagaacagcaaaaatagttcaaggtcaaagactaagtgccttttcatccaaatggaattctgtgataaagggaccttggaacaatggattgaaaaaagaagaggcgagaaactagacaaagttttggctttggaactctttgaacaaataacaaaaggggtggattatatacattcaaaaaaattaattcatagagatcttaagccaagtaatatattcttagtagatacaaaacaagtaaagattggagactttggacttgtaacatctctgaaaaatgatggaaagcgaacaaggagtaagggaactttgcgatacatgagcccagaacagatttcttcgcaagactatggaaaggaagtggacctctacgctttggggctaattcttgctgaacttcttcatgtatgtgacactgcttttgaaacatcaaagtttttcacagacctacgggatggcatcatctcagatatatttgataaaaaagaaaaaactcttctacagaaattactctcaaagaaacctgaggatcgacctaacacatctgaaatactaaggaccttgactgtgtggaagaaaagcccagagaaaaatgaacgacacacatgttagagcccttctgaaaaagtatcctgcttctgatatgcagttttccttaaattatctaaaatctgctagggaatatcaatagatatttaccttttattttaatgtttcctttaattttttactatttttactaatctttctgcagaaacagaaaggttttcttctttttgcttcaaaaacattcttacattttactttttcctggctcatctctttattctttttttttttttaaagacagagtctcgctctgttgcccaggctggagtgcaatgacacagtcttggctcactgcaacttctgcctcttgggttcaagtgattctcctgcctcagcctcctgagtagctggattacaggcatgtgccacccacccaactaatttttgtgtttttaataaagacagggtttcaccatgttggccaggctggtctcaaactcctgacctcaagtaatccacctgcctcggcctcccaaagtgctgggattacagggatgagccaccgcgcccagcctcatctctttgttctaaagatggaaaaaccacccccaaattttctttttatactattaatgaatcaatcaattcatatctatttattaaatttctaccgcttttaggccaaaaaaatgtaagatcgttctctgcctcacatagcttacaagccagctggagaaatatggtactcattaaaaaaaaaaaaaaaagtgatgtacaaccacttcggaaaacaatttggcattatctagtaaagttgaatccatgtatacccacatagctatcaattctattcctacatacgtgcttacaagaatgtccataaaaccctgtttataatagccaaaagaacagggaacaaccataatgcacatcaaaagaagaatggattaaaaaaattatattcacacacaggagtactatatagtattgaaaacaattgaagtacagctaaatgtaataacgtaacacaatacaactctcagaaacataatgttaagcgaacaaagcaggttttcagaaaatatatgcagaataattccatttatataaagttccagagcatgcaaaactaaatcattttgtataaaaaacccaacaaatgtgatgagacaataatgggaaggaagggaatgagaaatattaaattctggatggtggttatctttgagggaggggaatgatgtgattggggaaatggactttcaaaggtaatggtaacttccttaagctggatggtaggtccactagtgtttgctgcatagttataccttttatcttaaatacattttgtatctattgtaacaaccactttaaagacaaccgtgctgtaaggcagtagctaaaaacagaaaatagtccatcgggaagggtaagatggctttctgctgagcacagggctagaagtgacagcccagtgggccttccaactatatgccagggtgttagatgagtagagaggagaccacccaggaagtctggacaaggggtctggcatgagctctggagaagatatatttgaggaacatggggtatgctagtttgttgtcctgaattgctgtagagaagataatttaaattgcatcttagaagacgaccctgagggtgaatttcaacttagggcaattgttttagtttgtttcttattggtttaaatggatacttgaagctggataatttataaggaaaagagatttatatgacttacagttctgcaggctgtacaagaaacatggcaccagcatctgcttcttccccggctgcttccactcatggtggaaggtgaaggggagccggatgtgcagagatcatatggcaagagaggaagcaagagagcgagggagaaggtgccaggctctttttaaataaccggctcttgagggaactaatagattgagaactccttgcttctcctccccagcacaccccacccccagggacggcattaatgtattcatgaggggtcttcccccatgacccaaacacctcccatcaggccccacctccaacactgggatcaaatttcaacatgagattttgggggacaaacatgcaaactatagcagcaaccagctaccattctaaaactgccatatgattttaggatttttaaaaagggccaaatttaggttaagcaaaaagtgaaaatacagtaagagaaaatagttttataaaggctttaaaaagtgttcataaagagcagttcatagatttttcacgtaacgttcatcaatagatgctaaaactattggatgaaaagctattgtggaataggatcttctacaaggatttaaatataatcctacagaagaggtatcaattatacaggggaaaatgtacctttacaatggtcaccacaataaccaagtgattcaatttagcatcacccaaggtggaacaccctaacattatgcccctcctgatgtgacttaagaattttacctatttagttttcttgcacaaagtgttaaactggaatttaatcatgaggaaattattagacaaatcctgaatgtagtcattctataagatgattgacttgggcttctcaaaaagtcagtgtcatgaaaaaaaaaaaaaggggagagacttgtaagatacaatgaccaaatgcaatgtttgaatctttattgtattctggatatttaaaaagacaaaagctggacgcagtagctaatgcctgttatcccagcatttttgggaggtcaaaaggggaggatggcttgagcataggattttgagactagcctgggcaacacagtgagttctcatctctacaaaaaatcagaaaattagctgggcatggtagtgtgcatctgtggtcccagctacttgggggggtgaggtgggaggatcacttgagcctaggaggtcaaggccgcagtgagccatgatcatgttactgcattccagcctgggtgacagagtgagatcatatctaaataataataataataaaagaaagcaacaacccagcaaacagctataaagatatcttcgggacaattgagaacatttgaatatagactgcatattagataacaatgccaaataactgttttctcaggtgtgataatagtatatgtagaaaatgtctttttgttttgttttattttgtttttgtttgtttgtttgttttgagacagagtctcactgtgtcgcccaggctggagtgcagtggcacgatctcggctcactgcaacctctgcctcccaggttcaagtgattctcctgcctctgcttcctgagtagctgggattacaggtatctgccaccactccaggttaattttttctatttttagtagagacggaatttcaccatgttgacccagctggttttgaactcctgacctcaggtgattcacttgccttggcctcccaaagtgttgagattacaggcatgagtcactgcacccagccaaaaatgtttttttaggcaatgcatgcacaaacatttagaggccaagtgtgtcatgatgtctgcaactttcaatgttcagcaaaaatcaacatggagagagaaagagggcacacatgtggcaaaatattagccattgtacaattggtaaatctagatgacagtacacaggtgtttgttgtattattctttgaacttttctgtagatttggaaatgttctgcgtagagagaaatctttttttaaaaaaacaatatctggttttgattaatgaggctatattcaaaagaaacactaaatgatgtggccagttagtgagaatgtagccttatctttactgacctcattttaatattcctactctggctgggcatggtggctcacgcctataatcccagcactctgggaggccgagacgggtggatcacctgaggtcaggggttcgagaccagcctggccaacatggtgaaaccccatctctactaaaaatacaaaaattagctgggtgtggtggtaggcgcctgtaatcccagctactcgggagtccgtggcaggagaatcgcttgaacccaggaggtggaggttgcagtgagctgagatcacgccattgcactccagcctgggtgacaagagcaaaactcagtctcaaaaaaaaaaaagaaaaaaaaagatatatatattcctactcttattaaatgaatatagcatttcttagcaacttcttttgatttgtgagtatatattttcttggcctcaaaattaaagtaaaaagtatcctcttactcagaggaggacaggggcaagagcctgggaccttatttgctaattaaaatgcacacacacacacacacacacagaaattttgagagccattttaatataattgcctccctagaaacataccttttagggaatttttatcactaaaccacatgttatttaaatacgtacatgtttaacataaatacatacataaaattcacatgcatacttaacacttatgttaaatatattcaatgtatatacatatgtacacaatatatgcatatatacatgtgggtatgtggtatgtgtgcatgtgtgtgtatggccagctacataatttgtgggactaagggcaaaatgaaactgtacggccctcgttcaaaaattaggtgtggggtgcttctaagcacagtcttgtgcaactgcacaggttgcatgtccatgaagccatcctgtgtgtgtgcacatatgtgtatgaatatgtattttatataatacatatatatgcatgtatgtatctgagaagaaatgtttaaaaggctacatacaagcttttccaggtctctactatctgttaactaactagagacataactcacaatatgcagtccccactgagtgttcaccataatttgagattcttggcatgttaacttttcattatggaatattgaataatttcaatattattcatacatttctttatgttcaaacatacacaaaaatagaataatgaaactctacccatcacccagctgcaacaaatatcaatactttaccgttcttaatacatctaaccccttactttttgtttgtttcttttggtgaagtatttaattgtaattttttttttaagagacaggatctcactctgtcacccaggccagagtacagtggtacgatcacagctccttgtaacctcgaactcctaggctcaagtgatcctcctgcctcagccgcttgaatagctgggactacatgcatacaccaacacacccaactaatttttaaattttttgtagaaatatggtcttgctgtgtttcccaggctggtctcaaactcctggccttgagagattctcctgccttggtcttccaaactgctgggattacaatatccggccctactggaatattttaaagtaaatctcaggtgttacatcattgcacttgtaagtactttaaaatgtatctctagcagataaatctttttaacaaaaccacagcatcattgtcacactcaaaaaattgacaagatttccttaattatcatataatagtctgtattgtttctatctcaaaaatacagttttcttggttgttgaaatctagatccaacattgcatttggttgatgtgtctcctttactctgtaaaatttacccctgcgttttagttcttttcggcttttatttgtcctgtggaatttcctccactcaggatttgactgagagtatccccagagtgtccagttagacctagaagctggatttgatcctggttcatttattttcccccaagaatactccataggtgatgctatacactttctcttacatcatttcaggaggaacatgatgtctgattgttccactttcagtgattttaatattgatcaatgagttctggtggtaccaactactacaaagtttctcatcaatctttcacctgatggttttagcagctattgataattgttgcctggatccattatttcatttcaggggttgtaaaatagtgattttctggttctatcaaacctcttgcatttatcatctatgattcttctttaaggaactttctctaaatctgaatgggaaagatgcgataaatatttatcaaattttagagtgagttagtgccctagcaacctccacagttgacaaatgagtatttctttaaagcaaggtatggcccaaccaatactttgaaactagcatgtttagaatagagcaggaggaaactatatttgaaaggtcagaagtggaaagactaagagggcctgaacaataagaggacagaaccaagaggagttggcaactaattggatgtggggattaaggaaaggtaagcatcaaagattacctccaagtttgttagaaggttagtagcaggattctgatgccattcaagtaaatacaagtctcagtcagatgaaccccaagagccacatgtatttgaggggtactttgtctcacacttttacctgttacatggttttcagtaatttagaatttaagccagtagtggggcgactgtacatctatcgacatggtgaggtagagcatgtttgggaggaaagacgttgaatcccatttggtgacagtgagcttgaggtgctgccagaacactgcactgaagataggaggagactgtaggaaatacaagataggaaaggtctccactgaaatgttaactctttctctctaaacggccatccaggcctcaatgtctgcagtttctgatctgtgattatgacttatccaaatcttacatttcttaaaaatagtcatagatgaagggaatcacagttgatagttatatggtgacattattggcttaaattctaaataactagaaactgtataataggcaaaactgtgaggcaaataaaatgcttctcaaatctgtgtggctcttatggggttaatttgatttggacctgtattaatttcttatggctgctataactaacaaattaccacaaacttggtggtttaaaacaacacacatttattctctttctgttctggaggccagaagtctaaaatgagattcactgggctgcagttcactgggcaaggccatgctcctctggaggcttccatgatgcatcccatattcagtgtttcccgagtaagccccacccatgcaggtctgcagttttacctcaacaggcttttgcactcagtggctctctcctgtggtttctatctgaaattctcttcattttttttttaataactgctttattgagatataattcacatgccatacaattcacctatacagtatacaattcagtagtgtttactatattcagagttgtgcaactatcatttttctcacccccaaaagaaaccctatgcccgttagtattcactctgttttctcacaactctaggtaaccactaatctactctccatctctatagatttgcccatgctagacatttcatataaatggaatcatacatgtggtctttttcactgagtatattttcaaggtgcatcccagctgtggcatgaatcagcatctcattcctttttattgccaaataatattctatcatatggatatgtcgcattttatgtatccattcatcagctgatggacatttgggttgtttgtactttttggctaccatgaataatgctactatgaacttttgtgtacaaatcttatgtggacttgttttcatttctcttggatgtatattcctaggagaatggctggattatacagtaactctttcctcataactttgcatatcaaaattatatccatctttcagaacccaaattcagtgttatttccaaagtgttccaacatctcccactcaaaatgaatcttctccctagtactcccattgtttagtacctaattgttcttaccagtttgtcttagagctcagtcattcctacacagcacttttcttcattatactgctaatttcattacactgtaagagtggggacaagctgttcttcttgtataccagaaagtagtgagtgcactgctgtgaagaaagcaggaactcaaaagttaagaattttgaatgagcctataaaatgtgtctaataaataataatgttcattttcaaatctcaacaattaaatgtttaacaaataacacttgaaataaatgtttattagaaaaaccaa

SEQ ID NO: 1538 - DNA, 1412 bp, Homo sapiens
  source 1..1412: mol_type = genomic DNA
agcagacgagggcttgtgcgagagggggccgggcggctgcagggaaggcggagtccaaggggaaaacgaaactgagaaccagctctcccgaagccgcgggtctccggccggcggcggcggcggcggcggcggcggcgcagtttctggagcaaattcagtttgccttcctggatttgtaaattgtaatgacctcaaaactttagcagttcttccatctgactcaggtttgcttctctggcggtcttcagaatcaacatccacacttccgtgattatctgcgtgcattttggacaaagcttccaaccaggatacgggaagaagaaatggctggtgatctttcagcaggtttcttcatggaggaacttaatacataccgtcagaagcagggagtagtacttaaatatcaagaactgcctaattcaggacctccacatgataggaggtttacatttcaagttataatagatggaagagaatttccagaaggtgaaggtagatcaaagaaggaagcaaaaaatgccgcagccaaattagctgttgagatacttaataaggaaaagaaggcagttagtcctttattattgacaacaacgaattcttcagaaggattatccatggggaattacataggccttatcaatagaattgcccagaagaaaagactaactgtaaattatgaacagtgtgcatcgggggtgcatgggccagaaggatttcattataaatgcaaaatgggacagaaagaatatagtattggtacaggttctactaaacaggaagcaaaacaattggccgctaaacttgcatatcttcagatattatcagaagaaacctcagtgaaatctgactacctgtcctctggttcttttgctactacgtgtgagtcccaaagcaactctttagtgaccagcacactcgcttctgaatcatcatctgaaggtgacttctcagcagatacatcagagataaattctaacagtgacagtttaaacagttcttcgttgcttatgaatggtctcagaaataatcaaaggaaggcaaaaagatctttggcacccagatttgaccttcctgacatgaaagaaacaaagtatactgtggacaagaggtttggcatggattttaaagaaatagaattaattggctcaggtggatttggccaagttttcaaagcaaaacacagaattgacggaaagacttacgttattaaacgtgttaaatataataacgagtcaaagactaagtgccttttcatccaaatggaattctgtgataaagggaccttggaacaatggattgaaaaaagaagaggcgagaaactagacaaagttttggctttggaactctttgaacaaataacaaaaggggtggattatatacattcaaaaaaaaaaaaaaaaaaaaaaaaaaaa

SEQ ID NO: 1539 - DNA, 564 bp, Homo sapiens
  source 1..564: mol_type = genomic DNA
aatttaccccaatcccgtagcagacgagggcttgtgcgagagggggccgggcggctgcagggaaggcggagtccaaggggaaaacgaaactgagaaccagctctcccgaagccgcgggtctccggccggcggcggcggcggcggcggcggcggcgcaggtttgcttctctggcggtcttcagaatcaacatccacacttccgtgattatctgcgtgcattttggacaaagcttccaaccaggatacgggaagaagaaatggctggtgatctttcagcaggtttcttcatggaggaacttaatacataccgtcagaagcagggagtagtacttaaatatcaagaactgcctaattcaggacctccacatgataggaggtttacatttcaagttataatagatggaagagaatttccagaaggtgaaggtagatcaaagaaggaagcaaaaaatgccgcagccaaattagctgttgagatacttaataaggaaaagaaggcagttagtcctttattattgacaacaacgaattcttcagaaggattatccatggggaattacatag

SEQ ID NO: 1540 - DNA, 2930 bp, Homo sapiens
  source 1..2930: mol_type = genomic DNA
agcagacgagggcttgtgcgagagggggccgggcggctgcagggaaggcggagtccaaggggaaaacgaaactgagaaccagctctcccgaagccgcgggtctccggccggcggcggcggcggcggcggcggcggcgcagtttgctcatactttgtgacttgcggtcacagtggcattcagctccacacttggtagaaccacaggcacgacaagcatagaaacatcctaaacaatcttcatcgaggcatcgaggtccatcccaataaaaatcaggagaccctggctatcatagaccttagtcttcgctggtatcactcgtctgtctgaaccagcggttgcatttttttaagccttcttttttctcttttaccagtttctggagcaaattcagtttgccttcctggatttgtaaattgtaatgacctcaaaactttagcagttcttccatctgactcaggtttgcttctctggcggtcttcagaatcaacatccacacttccgtgattatctgcgtgcattttggacaaagcttccaaccaggatacgggaagaagaaatggctggtgatctttcagcaggtttcttcatggaggaacttaatacataccgtcagaagcagggagtagtacttaaatatcaagaactgcctaattcaggacctccacatgataggaggtttacatttcaagttataatagatggaagagaatttccagaaggtgaaggtagatcaaagaaggaagcaaaaaatgccgcagccaaattagctgttgagatacttaataaggaaaagaaggcagttagtcctttattattgacaacaacgaattcttcagaaggattatccatggggaattacataggccttatcaatagaattgcccagaagaaaagactaactgtaaattatgaacagtgtgcatcgggggtgcatgggccagaaggatttcattataaatgcaaaatgggacagaaagaatatagtattggtacaggttctactaaacaggaagcaaaacaattggccgctaaacttgcatatcttcagatattatcagaagaaacctcagtgaaatctgactacctgtcctctggttcttttgctactacgtgtgagtcccaaagcaactctttagtgaccagcacactcgcttctgaatcatcatctgaaggtgacttctcagcagatacatcagagataaattctaacagtgacagtttaaacagttcttcgttgcttatgaatggtctcagaaataatcaaaggaaggcaaaaagatctttggcacccagatttgaccttcctgacatgaaagaaacaaagtatactgtggacaagaggtttggcatggattttaaagaaatagaattaattggctcaggtggatttggccaagttttcaaagcaaaacacagaattgacggaaagacttacgttattaaacgtgttaaatataataacgagaaggcggagcgtgaagtaaaagcattggcaaaacttgatcatgtaaatattgttcactacaatggctgttgggatggatttgattatgatcctgagaccagtgatgattctcttgagagcagtgattatgatcctgagaacagcaaaaatagttcaaggtcaaagactaagtgccttttcatccaaatggaattctgtgataaagggaccttggaacaatggattgaaaaaagaagaggcgagaaactagacaaagttttggctttggaactctttgaacaaataacaaaaggggtggattatatacattcaaaaaaattaattcatagagatcttaagccaagtaatatattcttagtagatacaaaacaagtaaagattggagactttggacttgtaacatctctgaaaaatgatggaaagcgaacaaggagtaagggaactttgcgatacatgagcccagaacagatttcttcgcaagactatggaaaggaagtggacctctacgctttggggctaattcttgctgaacttcttcatgtatgtgacactgcttttgaaacatcaaagtttttcacagacctacgggatggcatcatctcagatatatttgataaaaaagaaaaaactcttctacagaaattactctcaaagaaacctgaggatcgacctaacacatctgaaatactaaggaccttgactgtgtggaagaaaagcccagagaaaaatgaacgacacacatgttagagcccttctgaaaaagtatcctgcttctgatatgcagttttccttaaattatctaaaatctgctagggaatatcaatagatatttaccttttattttaatgtttcctttaattttttactatttttactaatctttctgcagaaacagaaaggttttcttctttttgcttcaaaaacattcttacattttactttttcctggctcatctctttattctttttttttttttaaagacagagtctcgctctgttgcccaggctggagtgcaatgacacagtcttggctcactgcaacttctgcctcttgggttcaagtgattctcctgcctcagcctcctgagtagctggattacaggcatgtgccacccacccaactaatttttgtgtttttaataaagacagggtttcaccatgttggccaggctggtctcaaactcctgacctcaagtaatccacctgcctcggcctcccaaagtgctgggattacagggatgagccaccgcgcccagcctcatctctttgttctaaagatggaaaaaccacccccaaattttctttttatactattaatgaatcaatcaattcatatctatttattaaatttctaccgcttttaggccaaaaaaatgtaagatcgttctctgcctcacatagcttacaagccagctggagaaatatggtactcattaaaaaaaaaaaaaaaagtgatgtacaacc

SEQ ID NO: 1541 - DNA, 548 bp, Homo sapiens
  source 1..548: mol_type = genomic DNA
gtgcgagagggggccgggcggctgcagggaaggcggagtccaaggggaaaacgaaactgagaaccagctctcccgaagccgcgggtctccggccggcggcggcggcggcggcggcggcggcgcagaatcaacatccacacttccgtgattatctgcgtgcattttggacaaagcttccaaccaggatacgggaagaagaaatggctggtgatctttcagcaggtttcttcatggaggaacttaatacataccgtcagaagcagggagtagtacttaaatatcaagaactgcctaattcaggacctccacatgataggaggtttacatttcaagttataatagatggaagagaatttccagaaggtgaaggtagatcaaagaaggaagcaaaaaatgccgcagccaaattagctgttgagatacttaataaggaaaagaaggcagttagtcctttattattgacaacaacgaattcttcagaaggattatccatggggaattacataggccttatcaatagaattgcccagaagaaaagactaactgta

SEQ ID NO: 1542 - DNA, 1533 bp, Homo sapiens
  source 1..1533: mol_type = genomic DNA
atggctggtgatctttcagcaggtttcttcatggaggaacttaatacataccgtcagaagcagggagtagtacttaaatatcaagaactgcctaattcaggacctccacatgataggaggtttacatttcaagttataatagatggaagagaatttccagaaggtgaaggtagatcaaagaaggaagcaaaaaatgccgcagccaaattagctgttgagatacttaataaggaaaagaaggcagttagtcctttattattgacaacaacgaattcttcagaaggattatccatggggaattacataggccttatcaatagaattgcccagaagaaaagactaactgtaaattatgaacagtgtgcatcgggggtgcatgggccagaaggatttcattataaatgcaaaatgggacagaaagaatatagtattggtacaggttctactaaacaggaagcaaaacaattggccgctaaacttgcatatcttcagatattatcagaagaaacctcagtgaaatctgactacctgtcctctggttcttttgctactacgtgtgagtcccaaagcaactctttagtgaccagcacactcgcttctgaatcatcatctgaaggtgacttctcagcagatacatcagagataaattctaacagtgacagtttaaacagttcttcgttgcttatgaatggtctcagaaataatcaaaggaaggcaaaaagatctttggcacccagatttgaccttcctgacatgaaagaaacaaagtatactgtggacaagaggaaggcggagcgtgaagtaaaagcattggcaaaacttgatcatgtaaatattgttcactacaatggctgttgggatggatttgattatgatcctgagaccagtgatgattctcttgagagcagtgattatgatcctgagaacagcaaaaatagttcaaggtcaaagactaagtgccttttcatccaaatggaattctgtgataaagggaccttggaacaatggattgaaaaaagaagaggcgagaaactagacaaagttttggctttggaactctttgaacaaataacaaaaggggtggattatatacattcaaaaaaattaattcatagagatcttaagccaagtaatatattcttagtagatacaaaacaagtaaagattggagactttggacttgtaacatctctgaaaaatgatggaaagcgaacaaggagtaagggaactttgcgatacatgagcccagaacagatttcttcgcaagactatggaaaggaagtggacctctacgctttggggctaattcttgctgaacttcttcatgtatgtgacactgcttttgaaacatcaaagtttttcacagacctacgggatggcatcatctcagatatatttgataaaaaagaaaaaactcttctacagaaattactctcaaagaaacctgaggatcgacctaacacatctgaaatactaaggaccttgactgtgtggaagaaaagcccagagaaaaatgaacgacacacatgttag

SEQ ID NO: 1543 - DNA, 5646 bp, Homo sapiens
  source 1..5646: mol_type = genomic DNA
tcctcgacggccgccgcccgcctggccttttagggcctgactcccgcccttcctggcctacactcctgggcggcggcaggcctagcttctggcccagtgcgggttccccggcggcaggcgtatcctgtgtgcccctgggccaggcccgaacccggtgtccccgggtggggggtggggacgccacggccgaagcagctagctccgttcgtgatccgggagcctggtgccagcgagacctggaatttccggtctggttggtctggggccccgcggagccaggttgataccctcacctcccaaccccaggccctcggatgcccagaacctgtaggccgcaccgtggacttgttcttaatcgagggggtgctggggggaccctgatgtggcaccaaatgaaatgaacaaagctccacagtccacaggccccccacccgccccatcccccggactcccacagccagcgtttcccccggggcagacagcgccggtggtgttcagtacgccacaagcgacacaaatgaacacgccttctcagccccgccagcacttctaccctagccgggcccagcccccgagcagtgcagcctcccgagtgcagagtgcagcccctgcccgccctggcccagctgcccatgtctaccctgctggatcccaagtaatgatgatcccttcccagatctcctacccagcctcccagggggcctactacatccctggacaggggcgttccacatacgttgtcccgacacagcagtaccctgtgcagccaggagccccaggcttctatccaggtgcaagccctacagaatttgggacctacgctggcgcctactatccagcccaaggggtgcagcagtttcccactggcgtggcccccaccccagttttgatgaaccagccaccccagattgctcccaagagggagcgtaagacgatccgaattcgagatccaaaccaaggaggaaaggatatcacagaggagatcatgtctggggcccgcactgcctccacacccacccctccccagacgggaggcggtctggagcctcaagctaatggggagacgccccaggttgctgtcattgtccggccagatgaccggtcacagggagcaatcattgctgaccggccagggctgcctggcccagagcatagcccttcagaatcccagccttcgtcgccttctccgaccccatcaccatccccagtcttggaaccggggtctgagcctaatctcgcagtcctctctattcctggggacactatgacaactatacaaatgtctgtagaagaatcaacccccatctcccgtgaaactggggagccatatcgcctctctccagaacccactcctctcgccgaacccatactggaagtagaagtgacacttagcaaaccggttccagaatctgagttttcttccagtcctctccaggctcccacccctttggcatctcacacagtggaaattcatgagcctaatggcatggtcccatctgaagatctggaaccagaggtggagtcaagcccagagcttgctcctcccccagcttgcccctccgaatcccctgtgcccattgctccaactgcccaacctgaggaactgctcaacggagccccctcgccaccagctgtggacttaagcccagtcagtgagccagaggagcaggccaaggaggtgacagcatcaatggcgccccccaccatcccctctgctactccagctacggctccttcagctacttccccagctcaggaggaggaaatggaagaagaagaagaagaggaagaaggagaagcaggagaagcaggagaagctgagagtgagaaaggaggagaggaactgctccccccagagagtacccctattccagccaacttgtctcagaatttggaggcagcagcagccactcaagtggcagtatctgtgccaaagaggagacggaaaattaaggagctaaataagaaggaggctgttggagaccttctggatgccttcaaggaggcgaacccggcagtaccagaggtggaaaatcagcctcctgcaggcagcaatccaggcccagagtctgagggcagtggtgtgcccccacgtcctgaggaagcagatgagacctgggactcaaaggaagacaaaattcacaatgctgagaacatccagcccggggaacagaagtatgaatataagtcagatcagtggaagcctctaaacctagaggagaaaaaacgttacgaccgtgagttcctgcttggttttcagttcatctttgccagtatgcagaagccagagggattgccacatatcagtgacgtggtgctggacaaggccaataaaacaccactgcggccactggatcccactagactacaaggcataaattgtggcccagacttcactccatcctttgccaaccttggccggacaacccttagcacccgtgggcccccaaggggtgggccaggtggggagctgccccgtgggccggctggcctgggaccccggcgctctcagcagggaccccgaaaagaaccacgcaagatcattgccacagtgttaatgaccgaagatataaaactgaacaaagcagagaaagcctggaaacccagcagcaagcggacggcggctgataaggatcgaggggaagaagatgctgatggcagcaaaacccaggacctattccgcagggtgcgctccatcctgaataaactgacaccccagatgttccagcagctgatgaagcaagtgacgcagctggccatcgacaccgaggaacgcctcaaaggggtcattgacctcatttttgagaaggccatttcagagcccaacttctctgtggcctatgccaacatgtgccgctgcctcatggcgctgaaagtgcccactacggaaaagccaacagtgactgtgaacttccgaaagctgttgttgaatcgatgtcagaaggagtttgagaaagacaaagatgatgatgaggtttttgagaagaagcaaaaagagatggatgaagctgctacggcagaggaacgaggacgcctgaaggaagagctggaagaggctcgggacatagcccggcggcgctctttagggaatatcaagtttattggagagttgttcaaactgaagatgttaacagaggcaataatgcatgactgtgtggtcaaactgcttaagaaccatgatgaagagtcccttgagtgcctttgtcgtctgctcaccaccattggcaaagacctggactttgaaaaagccaagccccgaatggatcagtatttcaaccagatggaaaaaatcattaaagaaaagaagacgtcatcccgcatccgctttatgctgcaggacgtgctggatctgcgagggagcaattgggtgccacgccgaggggatcagggtcccaagaccattgaccagatccataaggaggctgagatggaagaacatcgagagcacatcaaagtgcagcagctcatggccaagggcagtgacaagcgtcggggcggtcctccaggccctcccatcagccgtggacttccccttgtggatgatggtggctggaacacagttcccatcagcaaaggtagccgccccattgacacctcacgactcaccaagatcaccaagcctggctccatcgattctaacaaccagctctttgcacctggagggcgactgagctggggcaagggcagcagcggaggctcaggagccaagccctcagacgcagcatcagaagctgctcgcccagctactagtactttgaatcgcttctcagcccttcaacaagcggtacccacagaaagcacagataatagacgtgtggtgcagaggagtagcttgagccgagaacgaggcgagaaagctggagaccgaggagaccgcctagagcggagtgaacggggaggggaccgtggggaccggcttgatcgtgcgcggacacctgctaccaagcggagcttcagcaaggaagtggaggagcggagtagagaacggccctcccagcctgaggggctgcgcaaggcagctagcctcacggaggatcgggaccgtgggcgggatgccgtgaagcgagaagctgccctacccccagtgagccccctgaaggcggctctctctgaggaggagttagagaagaaatccaaggctatcattgaggaatatctccatctcaatgacatgaaagaggcagtccagtgcgtgcaggagctggcctcaccctccttgctcttcatctttgtacggcatggtgtcgagtctacgctggagcgcagtgccattgctcgtgagcatatggggcagctgctgcaccagctgctctgtgctgggcatctgtctactgctcagtactaccaagggttgtatgaaatcttggaattggctgaggacatggaaattgacatcccccacgtgtggctctacctagcggaactggtaacacccattctgcaggaaggtggggtgcccatgggggagctgttcagggagattacaaagcctctgagaccgttgggcaaagctgcttccctgttgctggagatcctgggcctcctgtgcaaaagcatgggtcctaaaaaggtggggacgctgtggcgagaagccgggcttagctggaaggaatttctacctgaaggccaggacattggtgcattcgtcgctgaacagaaggtggagtataccctgggagaggagtcggaagcccctggccagagggcactcccctccgaggagctgaacaggcagctggagaagctgctgaaggagggcagcagtaaccagcgggtgttcgactggatagaggccaacctgagtgagcagcagatagtatccaacacgttagttcgagccctcatgacggctgtctgctattctgcaattatttttgagactcccctccgagtggacgttgcagtgctgaaagcgcgagcgaagctgctgcagaaatacctgtgtgacgagcagaaggagctacaggcgctctacgccctccaggcccttgtagtgaccttagaacagcctcccaacctgctgcggatgttctttgacgcactgtatgacgaggacgtggtgaaggaggatgccttctacagttgggagagtagcaaggaccccgctgagcagcagggcaagggtgtggcccttaaatctgtcacagccttcttcaagtggctccgtgaagcagaggaggagtctgaccacaactgagggctggtggggccggggacctggagccccatggacacacagatggcccggctagccgcctggactgcaggggggcggcagcagcggcggtggcagtgggtgcctgtagtgtgatgtgtctgaactaataaagtggctgaagaggcaggatggcttggggctgcctgggcccccctccaggatgccgccaggtgtccctctcctccccctggggcacagagatatattatatataaagtcttgaaatttggtgtgtcttggggtggggaggggcaccaacgcctgcccctggggtccttttttttattttctgaaaatcactctcgggactgccgtcctcgctgctgggggcatatgccccagcccctgtaccacccctgctgttgcctgggcagggggaagggggggcacggtgcctgtaattattaaacatgaattcaattaagctc

SEQ ID NO: 1544 - DNA, 5667 bp, Homo sapiens
  source 1..5667: mol_type = genomic DNA
acttgcctgaaaccggctcctcgacggccgccgcccgcctggccttttagggcctgactcccgcccttcctggcctacactcctgggcggcggcaggcctagcttctggcccagtgcgggttccccggcggcaggcgtatcctgtgtgcccctgggccaggcccgaacccggtgtccccgggtggggggtggggacgccacggccgaagcagctagctccgttcgtgatccgggagcctggtgccagcgagacctggaatttccggtctggttggtctggggccccgcggagccaggttgataccctcacctcccaaccccaggccctcggatgcccagaacctgtaggccgcaccgtggacttgttcttaatcgagggggtgctggggggaccctgatgtggcaccaaatgaaatgaacaaagctccacagtccacaggccccccacccgccccatcccccggactcccacagccagcgtttcccccggggcagacagcgccggtggtgttcagtacgccacaagcgacacaaatgaacacgccttctcagccccgccagcacttctaccctagccgggcccagcccccgagcagtgcagcctcccgagtgcagagtgcagcccctgcccgccctggcccagctgcccatgtctaccctgctggatcccaagtaatgatgatcccttcccagatctcctacccagcctcccagggggcctactacatccctggacaggggcgttccacatacgttgtcccgacacagcagtaccctgtgcagccaggagccccaggcttctatccaggtgcaagccctacagaatttgggacctacgctggcgcctactatccagcccaaggggtgcagcagtttcccactggcgtggcccccaccccagttttgatgaaccagccaccccagattgctcccaagagggagcgtaagacgatccgaattcgagatccaaaccaaggaggaaaggatatcacagaggagatcatgtctggggcccgcactgcctccacacccacccctccccagacgggaggcggtctggagcctcaagctaatggggagacgccccaggttgctgtcattgtccggccagatgaccggtcacagggagcaatcattgctgaccggccagggctgcctggcccagagcatagcccttcagaatcccagccttcgtcgccttctccgaccccatcaccatccccagtcttggaaccggggtctgagcctaatctcgcagtcctctctattcctggggacactatgacaactatacaaatgtctgtagaagaatcaacccccatctcccgtgaaactggggagccatatcgcctctctccagaacccactcctctcgccgaacccatactggaagtagaagtgacacttagcaaaccggttccagaatctgagttttcttccagtcctctccaggctcccacccctttggcatctcacacagtggaaattcatgagcctaatggcatggtcccatctgaagatctggaaccagaggtggagtcaagcccagagcttgctcctcccccagcttgcccctccgaatcccctgtgcccattgctccaactgcccaacctgaggaactgctcaacggagccccctcgccaccagctgtggacttaagcccagtcagtgagccagaggagcaggccaaggaggtgacagcatcaatggcgccccccaccatcccctctgctactccagctacggctccttcagctacttccccagctcaggaggaggaaatggaagaagaagaagaagaggaagaaggagaagcaggagaagcaggagaagctgagagtgagaaaggaggagaggaactgctccccccagagagtacccctattccagccaacttgtctcagaatttggaggcagcagcagccactcaagtggcagtatctgtgccaaagaggagacggaaaattaaggagctaaataagaaggaggctgttggagaccttctggatgccttcaaggaggcgaacccggcagtaccagaggtggaaaatcagcctcctgcaggcagcaatccaggcccagagtctgagggcagtggtgtgcccccacgtcctgaggaagcagatgagacctgggactcaaaggaagacaaaattcacaatgctgagaacatccagcccggggaacagaagtatgaatataagtcagatcagtggaagcctctaaacctagaggagaaaaaacgttacgaccgtgagttcctgcttggttttcagttcatctttgccagtatgcagaagccagagggattgccacatatcagtgacgtggtgctggacaaggccaataaaacaccactgcggccactggatcccactagactacaaggcataaattgtggcccagacttcactccatcctttgccaaccttggccggacaacccttagcacccgtgggcccccaaggggtgggccaggtggggagctgccccgtgggccgcaggctggcctgggaccccggcgctctcagcagggaccccgaaaagaaccacgcaagatcattgccacagtgttaatgaccgaagatataaaactgaacaaagcagagaaagcctggaaacccagcagcaagcggacggcggctgataaggatcgaggggaagaagatgctgatggcagcaaaacccaggacctattccgcagggtgcgctccatcctgaataaactgacaccccagatgttccagcagctgatgaagcaagtgacgcagctggccatcgacaccgaggaacgcctcaaaggggtcattgacctcatttttgagaaggccatttcagagcccaacttctctgtggcctatgccaacatgtgccgctgcctcatggcgctgaaagtgcccactacggaaaagccaacagtgactgtgaacttccgaaagctgttgttgaatcgatgtcagaaggagtttgagaaagacaaagatgatgatgaggtttttgagaagaagcaaaaagagatggatgaagctgctacggcagaggaacgaggacgcctgaaggaagagctggaagaggctcgggacatagcccggcggcgctctttagggaatatcaagtttattggagagttgttcaaactgaagatgttaacagaggcaataatgcatgactgtgtggtcaaactgcttaagaaccatgatgaagagtcccttgagtgcctttgtcgtctgctcaccaccattggcaaagacctggactttgaaaaagccaagccccgaatggatcagtatttcaaccagatggaaaaaatcattaaagaaaagaagacgtcatcccgcatccgctttatgctgcaggacgtgctggatctgcgagggagcaattgggtgccacgccgaggggatcagggtcccaagaccattgaccagatccataaggaggctgagatggaagaacatcgagagcacatcaaagtgcagcagctcatggccaagggcagtgacaagcgtcggggcggtcctccaggccctcccatcagccgtggacttccccttgtggatgatggtggctggaacacagttcccatcagcaaaggtagccgccccattgacacctcacgactcaccaagatcaccaagcctggctccatcgattctaacaaccagctctttgcacctggagggcgactgagctggggcaagggcagcagcggaggctcaggagccaagccctcagacgcagcatcagaagctgctcgcccagctactagtactttgaatcgcttctcagcccttcaacaagcggtacccacagaaagcacagataatagacgtgtggtgcagaggagtagcttgagccgagaacgaggcgagaaagctggagaccgaggagaccgcctagagcggagtgaacggggaggggaccgtggggaccggcttgatcgtgcgcggacacctgctaccaagcggagcttcagcaaggaagtggaggagcggagtagagaacggccctcccagcctgaggggctgcgcaaggcagctagcctcacggaggatcgggaccgtgggcgggatgccgtgaagcgagaagctgccctacccccagtgagccccctgaaggcggctctctctgaggaggagttagagaagaaatccaaggctatcattgaggaatatctccatctcaatgacatgaaagaggcagtccagtgcgtgcaggagctggcctcaccctccttgctcttcatctttgtacggcatggtgtcgagtctacgctggagcgcagtgccattgctcgtgagcatatggggcagctgctgcaccagctgctctgtgctgggcatctgtctactgctcagtactaccaagggttgtatgaaatcttggaattggctgaggacatggaaattgacatcccccacgtgtggctctacctagcggaactggtaacacccattctgcaggaaggtggggtgcccatgggggagctgttcagggagattacaaagcctctgagaccgttgggcaaagctgcttccctgttgctggagatcctgggcctcctgtgcaaaagcatgggtcctaaaaaggtggggacgctgtggcgagaagccgggcttagctggaaggaatttctacctgaaggccaggacattggtgcattcgtcgctgaacagaaggtggagtataccctgggagaggagtcggaagcccctggccagagggcactcccctccgaggagctgaacaggcagctggagaagctgctgaaggagggcagcagtaaccagcgggtgttcgactggatagaggccaacctgagtgagcagcagatagtatccaacacgttagttcgagccctcatgacggctgtctgctattctgcaattatttttgagactcccctccgagtggacgttgcagtgctgaaagcgcgagcgaagctgctgcagaaatacctgtgtgacgagcagaaggagctacaggcgctctacgccctccaggcccttgtagtgaccttagaacagcctcccaacctgctgcggatgttctttgacgcactgtatgacgaggacgtggtgaaggaggatgccttctacagttgggagagtagcaaggaccccgctgagcagcagggcaagggtgtggcccttaaatctgtcacagccttcttcaagtggctccgtgaagcagaggaggagtctgaccacaactgagggctggtggggccggggacctggagccccatggacacacagatggcccggctagccgcctggactgcaggggggcggcagcagcggcggtggcagtgggtgcctgtagtgtgatgtgtctgaactaataaagtggctgaagaggcaggatggcttggggctgcctgggcccccctccaggatgccgccaggtgtccctctcctccccctggggcacagagatatattatatataaagtcttgaaatttggtgtgtcttggggtggggaggggcaccaacgcctgcccctggggtccttttttttattttctgaaaatcactctcgggactgccgtcctcgctgctgggggcatatgccccagcccctgtaccacccctgctgttgcctgggcagggggaagggggggcacggtgcctgtaattattaaacatgaattcaattaagctca

SEQ ID NO: 1545 - DNA, 5516 bp, Homo sapiens
  source 1..5516: mol_type = genomic DNA
cggcggcgcagatcgcccggcgcggctccgccccctgcgccggtcacgtgggggcgccggctgcgcctgcggagaagcggtggccgccgagcgggatctgtgcggggagccggaaatggttgtggactacgtctgtgcggctgcgtggggctcggccgcgcggactgaaggagactgaaggccctcggatgcccagaacctgtaggccgcaccgtggacttgttcttaatcgagggggtgctggggggaccctgatgtggcaccaaatgaaatgaacaaagctccacagtccacaggccccccacccgccccatcccccggactcccacagccagcgtttcccccggggcagacagcgccggtggtgttcagtacgccacaagcgacacaaatgaacacgccttctcagccccgccagcacttctaccctagccgggcccagcccccgagcagtgcagcctcccgagtgcagagtgcagcccctgcccgccctggcccagctgcccatgtctaccctgctggatcccaagtaatgatgatcccttcccagatctcctacccagcctcccagggggcctactacatccctggacaggggcgttccacatacgttgtcccgacacagcagtaccctgtgcagccaggagccccaggcttctatccaggtgcaagccctacagaatttgggacctacgctggcgcctactatccagcccaaggggtgcagcagtttcccactggcgtggcccccaccccagttttgatgaaccagccaccccagattgctcccaagagggagcgtaagacgatccgaattcgagatccaaaccaaggaggaaaggatatcacagaggagatcatgtctggggcccgcactgcctccacacccacccctccccagacgggaggcggtctggagcctcaagctaatggggagacgccccaggttgctgtcattgtccggccagatgaccggtcacagggagcaatcattgctgaccggccagggctgcctggcccagagcatagcccttcagaatcccagccttcgtcgccttctccgaccccatcaccatccccagtcttggaaccggggtctgagcctaatctcgcagtcctctctattcctggggacactatgacaactatacaaatgtctgtagaagaatcaacccccatctcccgtgaaactggggagccatatcgcctctctccagaacccactcctctcgccgaacccatactggaagtagaagtgacacttagcaaaccggttccagaatctgagttttcttccagtcctctccaggctcccacccctttggcatctcacacagtggaaattcatgagcctaatggcatggtcccatctgaagatctggaaccagaggtggagtcaagcccagagcttgctcctcccccagcttgcccctccgaatcccctgtgcccattgctccaactgcccaacctgaggaactgctcaacggagccccctcgccaccagctgtggacttaagcccagtcagtgagccagaggagcaggccaaggaggtgacagcatcaatggcgccccccaccatcccctctgctactccagctacggctccttcagctacttccccagctcaggaggaggaaatggaagaagaagaagaagaggaagaaggagaagcaggagaagcaggagaagctgagagtgagaaaggaggagaggaactgctccccccagagagtacccctattccagccaacttgtctcagaatttggaggcagcagcagccactcaagtggcagtatctgtgccaaagaggagacggaaaattaaggagctaaataagaaggaggctgttggagaccttctggatgccttcaaggaggcgaacccggcagtaccagaggtggaaaatcagcctcctgcaggcagcaatccaggcccagagtctgagggcagtggtgtgcccccacgtcctgaggaagcagatgagacctgggactcaaaggaagacaaaattcacaatgctgagaacatccagcccggggaacagaagtatgaatataagtcagatcagtggaagcctctaaacctagaggagaaaaaacgttacgaccgtgagttcctgcttggttttcagttcatctttgccagtatgcagaagccagagggattgccacatatcagtgacgtggtgctggacaaggccaataaaacaccactgcggccactggatcccactagactacaaggcataaattgtggcccagacttcactccatcctttgccaaccttggccggacaacccttagcacccgtgggcccccaaggggtgggccaggtggggagctgccccgtgggccggctggcctgggaccccggcgctctcagcagggaccccgaaaagaaccacgcaagatcattgccacagtgttaatgaccgaagatataaaactgaacaaagcagagaaagcctggaaacccagcagcaagcggacggcggctgataaggatcgaggggaagaagatgctgatggcagcaaaacccaggacctattccgcagggtgcgctccatcctgaataaactgacaccccagatgttccagcagctgatgaagcaagtgacgcagctggccatcgacaccgaggaacgcctcaaaggggtcattgacctcatttttgagaaggccatttcagagcccaacttctctgtggcctatgccaacatgtgccgctgcctcatggcgctgaaagtgcccactacggaaaagccaacagtgactgtgaacttccgaaagctgttgttgaatcgatgtcagaaggagtttgagaaagacaaagatgatgatgaggtttttgagaagaagcaaaaagagatggatgaagctgctacggcagaggaacgaggacgcctgaaggaagagctggaagaggctcgggacatagcccggcggcgctctttagggaatatcaagtttattggagagttgttcaaactgaagatgttaacagaggcaataatgcatgactgtgtggtcaaactgcttaagaaccatgatgaagagtcccttgagtgcctttgtcgtctgctcaccaccattggcaaagacctggactttgaaaaagccaagccccgaatggatcagtatttcaaccagatggaaaaaatcattaaagaaaagaagacgtcatcccgcatccgctttatgctgcaggacgtgctggatctgcgagggagcaattgggtgccacgccgaggggatcagggtcccaagaccattgaccagatccataaggaggctgagatggaagaacatcgagagcacatcaaagtgcagcagctcatggccaagggcagtgacaagcgtcggggcggtcctccaggccctcccatcagccgtggacttccccttgtggatgatggtggctggaacacagttcccatcagcaaaggtagccgccccattgacacctcacgactcaccaagatcaccaagcctggctccatcgattctaacaaccagctctttgcacctggagggcgactgagctggggcaagggcagcagcggaggctcaggagccaagccctcagacgcagcatcagaagctgctcgcccagctactagtactttgaatcgcttctcagcccttcaacaagcggtacccacagaaagcacagataatagacgtgtggtgcagaggagtagcttgagccgagaacgaggcgagaaagctggagaccgaggagaccgcctagagcggagtgaacggggaggggaccgtggggaccggcttgatcgtgcgcggacacctgctaccaagcggagcttcagcaaggaagtggaggagcggagtagagaacggccctcccagcctgaggggctgcgcaaggcagctagcctcacggaggatcgggaccgtgggcgggatgccgtgaagcgagaagctgccctacccccagtgagccccctgaaggcggctctctctgaggaggagttagagaagaaatccaaggctatcattgaggaatatctccatctcaatgacatgaaagaggcagtccagtgcgtgcaggagctggcctcaccctccttgctcttcatctttgtacggcatggtgtcgagtctacgctggagcgcagtgccattgctcgtgagcatatggggcagctgctgcaccagctgctctgtgctgggcatctgtctactgctcagtactaccaagggttgtatgaaatcttggaattggctgaggacatggaaattgacatcccccacgtgtggctctacctagcggaactggtaacacccattctgcaggaaggtggggtgcccatgggggagctgttcagggagattacaaagcctctgagaccgttgggcaaagctgcttccctgttgctggagatcctgggcctcctgtgcaaaagcatgggtcctaaaaaggtggggacgctgtggcgagaagccgggcttagctggaaggaatttctacctgaaggccaggacattggtgcattcgtcgctgaacagaaggtggagtataccctgggagaggagtcggaagcccctggccagagggcactcccctccgaggagctgaacaggcagctggagaagctgctgaaggagggcagcagtaaccagcgggtgttcgactggatagaggccaacctgagtgagcagcagatagtatccaacacgttagttcgagccctcatgacggctgtctgctattctgcaattatttttgagactcccctccgagtggacgttgcagtgctgaaagcgcgagcgaagctgctgcagaaatacctgtgtgacgagcagaaggagctacaggcgctctacgccctccaggcccttgtagtgaccttagaacagcctcccaacctgctgcggatgttctttgacgcactgtatgacgaggacgtggtgaaggaggatgccttctacagttgggagagtagcaaggaccccgctgagcagcagggcaagggtgtggcccttaaatctgtcacagccttcttcaagtggctccgtgaagcagaggaggagtctgaccacaactgagggctggtggggccggggacctggagccccatggacacacagatggcccggctagccgcctggactgcaggggggcggcagcagcggcggtggcagtgggtgcctgtagtgtgatgtgtctgaactaataaagtggctgaagaggcaggatggcttggggctgcctgggcccccctccaggatgccgccaggtgtccctctcctccccctggggcacagagatatattatatataaagtcttgaaatttggtgtgtcttggggtggggaggggcaccaacgcctgcccctggggtccttttttttattttctgaaaatcactctcgggactgccgtcctcgctgctgggggcatatgccccagcccctgtaccacccctgctgttgcctgggcagggggaagggggggcacggtgcctgtaattattaaacatgaattcaattaa

SEQ ID NO: 1546 - DNA, 4990 bp, Homo sapiens
  source 1..4990: mol_type = genomic DNA
ggaaatggttgtggactacgtctgtgcggctgcgtggggctcggccgcgcggactgaaggagactgaaggggcgttccacatacgttgtcccgacacagcagtaccctgtgcagccaggagccccaggcttctatccaggtgcaagccctacagaatttgggacctacgctggcgcctactatccagcccaaggggtgcagcagtttcccactggcgtggcccccaccccagttttgatgaaccagccaccccagattgctcccaagagggagcgtaagacgatccgaattcgagatccaaaccaaggaggaaaggatatcacagaggagatcatgtctggggcccgcactgcctccacacccacccctccccagacgggaggcggtctggagcctcaagctaatggggagacgccccaggttgctgtcattgtccggccagatgaccggtcacagggagcaatcattgctgaccggccagggctgcctggcccagagcatagcccttcagaatcccagccttcgtcgccttctccgaccccatcaccatccccagtcttggaaccggggtctgagcctaatctcgcagtcctctctattcctggggacactatgacaactatacaaatgtctgtagaagaatcaacccccatctcccgtgaaactggggagccatatcgcctctctccagaacccactcctctcgccgaacccatactggaagtagaagtgacacttagcaaaccggttccagaatctgagttttcttccagtcctctccaggctcccacccctttggcatctcacacagtggaaattcatgagcctaatggcatggtcccatctgaagatctggaaccagaggtggagtcaagcccagagcttgctcctcccccagcttgcccctccgaatcccctgtgcccattgctccaactgcccaacctgaggaactgctcaacggagccccctcgccaccagctgtggacttaagcccagtcagtgagccagaggagcaggccaaggaggtgacagcatcaatggcgccccccaccatcccctctgctactccagctacggctccttcagctacttccccagctcaggaggaggaaatggaagaagaagaagaagaggaagaaggagaagcaggagaagcaggagaagctgagagtgagaaaggaggagaggaactgctccccccagagagtacccctattccagccaacttgtctcagaatttggaggcagcagcagccactcaagtggcagtatctgtgccaaagaggagacggaaaattaaggagctaaataagaaggaggctgttggagaccttctggatgccttcaaggaggcgaacccggcagtaccagaggtggaaaatcagcctcctgcaggcagcaatccaggcccagagtctgagggcagtggtgtgcccccacgtcctgaggaagcagatgagacctgggactcaaaggaagacaaaattcacaatgctgagaacatccagcccggggaacagaagtatgaatataagtcagatcagtggaagcctctaaacctagaggagaaaaaacgttacgaccgtgagttcctgcttggttttcagttcatctttgccagtatgcagaagccagagggattgccacatatcagtgacgtggtgctggacaaggccaataaaacaccactgcggccactggatcccactagactacaaggcataaattgtggcccagacttcactccatcctttgccaaccttggccggacaacccttagcacccgtgggcccccaaggggtgggccaggtggggagctgccccgtgggccggctggcctgggaccccggcgctctcagcagggaccccgaaaagaaccacgcaagatcattgccacagtgttaatgaccgaagatataaaactgaacaaagcagagaaagcctggaaacccagcagcaagcggacggcggctgataaggatcgaggggaagaagatgctgatggcagcaaaacccaggacctattccgcagggtgcgctccatcctgaataaactgacaccccagatgttccagcagctgatgaagcaagtgacgcagctggccatcgacaccgaggaacgcctcaaaggggtcattgacctcatttttgagaaggccatttcagagcccaacttctctgtggcctatgccaacatgtgccgctgcctcatggcgctgaaagtgcccactacggaaaagccaacagtgactgtgaacttccgaaagctgttgttgaatcgatgtcagaaggagtttgagaaagacaaagatgatgatgaggtttttgagaagaagcaaaaagagatggatgaagctgctacggcagaggaacgaggacgcctgaaggaagagctggaagaggctcgggacatagcccggcggcgctctttagggaatatcaagtttattggagagttgttcaaactgaagatgttaacagaggcaataatgcatgactgtgtggtcaaactgcttaagaaccatgatgaagagtcccttgagtgcctttgtcgtctgctcaccaccattggcaaagacctggactttgaaaaagccaagccccgaatggatcagtatttcaaccagatggaaaaaatcattaaagaaaagaagacgtcatcccgcatccgctttatgctgcaggacgtgctggatctgcgagggagcaattgggtgccacgccgaggggatcagggtcccaagaccattgaccagatccataaggaggctgagatggaagaacatcgagagcacatcaaagtgcagcagctcatggccaagggcagtgacaagcgtcggggcggtcctccaggccctcccatcagccgtggacttccccttgtggatgatggtggctggaacacagttcccatcagcaaaggtagccgccccattgacacctcacgactcaccaagatcaccaagcctggctccatcgattctaacaaccagctctttgcacctggagggcgactgagctggggcaagggcagcagcggaggctcaggagccaagccctcagacgcagcatcagaagctgctcgcccagctactagtactttgaatcgcttctcagcccttcaacaagcggtacccacagaaagcacagataatagacgtgtggtgcagaggagtagcttgagccgagaacgaggcgagaaagctggagaccgaggagaccgcctagagcggagtgaacggggaggggaccgtggggaccggcttgatcgtgcgcggacacctgctaccaagcggagcttcagcaaggaagtggaggagcggagtagagaacggccctcccagcctgaggggctgcgcaaggcagctagcctcacggaggatcgggaccgtgggcgggatgccgtgaagcgagaagctgccctacccccagtgagccccctgaaggcggctctctctgaggaggagttagagaagaaatccaaggctatcattgaggaatatctccatctcaatgacatgaaagaggcagtccagtgcgtgcaggagctggcctcaccctccttgctcttcatctttgtacggcatggtgtcgagtctacgctggagcgcagtgccattgctcgtgagcatatggggcagctgctgcaccagctgctctgtgctgggcatctgtctactgctcagtactaccaagggttgtatgaaatcttggaattggctgaggacatggaaattgacatcccccacgtgtggctctacctagcggaactggtaacacccattctgcaggaaggtggggtgcccatgggggagctgttcagggagattacaaagcctctgagaccgttgggcaaagctgcttccctgttgctggagatcctgggcctcctgtgcaaaagcatgggtcctaaaaaggtggggacgctgtggcgagaagccgggcttagctggaaggaatttctacctgaaggccaggacattggtgcattcgtcgctgaacagaaggtggagtataccctgggagaggagtcggaagcccctggccagagggcactcccctccgaggagctgaacaggcagctggagaagctgctgaaggagggcagcagtaaccagcgggtgttcgactggatagaggccaacctgagtgagcagcagatagtatccaacacgttagttcgagccctcatgacggctgtctgctattctgcaattatttttgagactcccctccgagtggacgttgcagtgctgaaagcgcgagcgaagctgctgcagaaatacctgtgtgacgagcagaaggagctacaggcgctctacgccctccaggcccttgtagtgaccttagaacagcctcccaacctgctgcggatgttctttgacgcactgtatgacgaggacgtggtgaaggaggatgccttctacagttgggagagtagcaaggaccccgctgagcagcagggcaagggtgtggcccttaaatctgtcacagccttcttcaagtggctccgtgaagcagaggaggagtctgaccacaactgagggctggtggggccggggacctggagccccatggacacacagatggcccggctagccgcctggactgcaggggggcggcagcagcggcggtggcagtgggtgcctgtagtgtgatgtgtctgaactaataaagtggctgaagaggcaggatggcttggggctgcctgggcccccctccaggatgccgccaggtgtccctctcctccccctggggcacagagatatattatatataaagtcttgaaatttggtgtgtcttggggtggggaggggcaccaacgcctgcccctggggtccttttttttattttctgaaaatcactctcgggactgccgtcctcgctgctgggggcatatgccccagcccctgtaccacccctgctgttgcctgggcagggggaagggggggcacggtgcctgtaattattaaacatgaattcaattaa

SEQ ID NO: 1547 - DNA, 4986 bp, Homo sapiens
  source 1..4986: mol_type = genomic DNA
cgcggactgaaggagactgaaggtgctggggggaccctgatgtggcaccaaatgaaatgaacaaagctccacagtccacaggccccccacccgccccatcccccggactcccacagccagcgtttcccccggggcagacagcgccggtggtgttcagtacgccacaagcgacacaaatgaacacgccttctcagccccgccagggaggattcaggtctctgcagcacttctaccctagccgggcccagcccccgagcagtgcagcctcccgagtgcagagtgcagcccctgcccgccctggcccagctgcccatgtctaccctgctggatcccaagtaatgatgatcccttcccagatctcctacccagcctcccagggggcctactacatccctggacaggggcgttccacatacgttgtcccgacacagcagtaccctgtgcagccaggagccccaggcttctatccaggtgcaagccctacagaatttgggacctacgctggcgcctactatccagcccaaggggtgcagcagtttcccactggcgtggcccccaccccagttttgatgaaccagccaccccagattgctcccaagagggagcgtaagacgatccgaattcgagatccaaaccaaggaggaaaggatatcacagaggagatcatgtctggggcccgcactgcctccacacccacccctccccagacgggaggcggtctggagcctcaagctaatggggagacgccccaggttgctgtcattgtccggccagatgaccggtcacagggagcaatcattgctgaccggccagggctgcctggcccagagcatagcccttcagaatcccagccttcgtcgccttctccgaccccatcaccatccccagtcttggaaccggggtctgagcctaatctcgcagtcctctctattcctggggacactatgacaactatacaaatgtctgtagaagaatcaacccccatctcccgtgaaactggggagccatatcgcctctctccagaacccactcctctcgccgaacccatactggaagtagaagtgacacttagcaaaccggttccagaatctgagttttcttccagtcctctccaggctcccacccctttggcatctcacacagtggaaattcatgagcctaatggcatggtcccatctgaagatctggaaccagaggtggagtcaagcccagagcttgctcctcccccagcttgcccctccgaatcccctgtgcccattgctccaactgcccaacctgaggaactgctcaacggagccccctcgccaccagctgtggacttaagcccagtcagtgagccagaggagcaggccaaggaggtgacagcatcaatggcgccccccaccatcccctctgctactccagctacggctccttcagctacttccccagctcaggaggaggaaatggaagaagaagaagaagaggaagaaggagaagcaggagaagcaggagaagctgagagtgagaaaggaggagaggaactgctccccccagagagtacccctattccagccaacttgtctcagaatttggaggcagcagcagccactcaagtggcagtatctgtgccaaagaggagacggaaaattaaggagctaaataagaaggaggctgttggagaccttctggatgccttcaaggaggcgaacccggcagtaccagaggtggaaaatcagcctcctgcaggcagcaatccaggcccagagtctgagggcagtggtgtgcccccacgtcctgaggaagcagatgagacctgggactcaaaggaagacaaaattcacaatgctgagaacatccagcccggggaacagaagtatgaatataagtcagatcagtggaagcctctaaacctagaggagaaaaaacgttacgaccgtgagttcctgcttggttttcagttcatctttgccagtatgcagaagccagagggattgccacatatcagtgacgtggtgctggacaaggccaataaaacaccactgcggccactggatcccactagactacaaggcataaattgtggcccagacttcactccatcctttgccaaccttggccggacaacccttagcacccgtgggcccccaaggggtgggccaggtggggagctgccccgtgggccggctggcctgggaccccggcgctctcagcagggaccccgaaaagaaccacgcaagatcattgccacagtgttaatgaccgaagatataaaactgaacaaagcagagaaagcctggaaacccagcagcaagcggacggcggctgataaggatcgaggggaagaagatgctgatggcagcaaaacccaggacctattccgcagggtgcgctccatcctgaataaactgacaccccagatgttccagcagctgatgaagcaagtgacgcagctggccatcgacaccgaggaacgcctcaaaggggtcattgacctcatttttgagaaggccatttcagagcccaacttctctgtggcctatgccaacatgtgccgctgcctcatggcgctgaaagtgcccactacggaaaagccaacagtgactgtgaacttccgaaagctgttgttgaatcgatgtcagaaggagtttgagaaagacaaagatgatgatgaggtttttgagaagaagcaaaaagagatggatgaagctgctacggcagaggaacgaggacgcctgaaggaagagctggaagaggctcgggacatagcccggcggcgctctttagggaatatcaagtttattggagagttgttcaaactgaagatgttaacagaggcaataatgcatgactgtgtggtcaaactgcttaagaaccatgatgaagagtcccttgagtgcctttgtcgtctgctcaccaccattggcaaagacctggactttgaaaaagccaagccccgaatggatcagtatttcaaccagatggaaaaaatcattaaagaaaagaagacgtcatcccgcatccgctttatgctgcaggacgtgctggatctgcgagggagcaattgggtgccacgccgaggggatcagggtcccaagaccattgaccagatccataaggaggctgagatggaagaacatcgagagcacatcaaagtgcagcagctcatggccaagggcagtgacaagcgtcggggcggtcctccaggccctcccatcagccgtggacttccccttgtggatgatggtggctggaacacagttcccatcagcaaaggtagccgccccattgacacctcacgactcaccaagatcaccaagcctggctccatcgattctaacaaccagctctttgcacctggagggcgactgagctggggcaagggcagcagcggaggctcaggagccaagccctcagacgcagcatcagaagctgctcgcccagctactagtactttgaatcgcttctcagcccttcaacaagcggtacccacagaaagcacagataatagacgtgtggtgcagaggagtagcttgagccgagaacgaggcgagaaagctggagaccgaggagaccgcctagagcggagtgaacggggaggggaccgtggggaccggcttgatcgtgcgcggacacctgctaccaagcggagcttcagcaaggaagtggaggagcggagtagagaacggccctcccagcctgaggggctgcgcaaggcagctagcctcacggaggatcgggaccgtgggcgggatgccgtgaagcgagaagctgccctacccccagtgagccccctgaaggcggctctctctgaggaggagttagagaagaaatccaaggctatcattgaggaatatctccatctcaatgacatgaaagaggcagtccagtgcgtgcaggagctggcctcaccctccttgctcttcatctttgtacggcatggtgtcgagtctacgctggagcgcagtgccattgctcgtgagcatatggggcagctgctgcaccagctgctctgtgctgggcatctgtctactgctcagtactaccaagggttgtatgaaatcttggaattggctgaggacatggaaattgacatcccccacgtgtggctctacctagcggaactggtaacacccattctgcaggaaggtggggtgcccatgggggagctgttcagggagattacaaagcctctgagaccgttgggcaaagctgcttccctgttgctggagatcctgggcctcctgtgcaaaagcatgggtcctaaaaaggtggggacgctgtggcgagaagccgggcttagctggaaggaatttctacctgaaggccaggacattggtgcattcgtcgctgaacagaaggtggagtataccctgggagaggagtcggaagcccctggccagagggcactcccctccgaggagctgaacaggcagctggagaagctgctgaaggagggcagcagtaaccagcgggtgttcgactggatagaggccaacctgagtgagcagcagatagtatccaacacgttagttcgagccctcatgacggctgtctgctattctgcaattatttttgagactcccctccgagtggacgttgcagtgctgaaagcgcgagcgaagctgctgcagaaatacctgtgtgacgagcagaaggagctacaggcgctctacgccctccaggcccttgtagtgaccttagaacagcctcccaacctgctgcggatgttctttgacgcactgtatgacgaggacgtggtgaaggaggatgccttctacagttgggagagtagcaaggaccccgctgagcagcagggcaagggtgtggcccttaaatctgtcacagccttcttcaagtggctccgtgaagcagaggaggagtctgaccacaactgagggctggtggggccggggacctggagccccatggacacacagatggcccggctagccgcctggactgcaggggggcggcagcagcggcggtggcagtgggtgcctgtag

SEQ ID NO: 1548 - DNA, 5129 bp, Homo sapiens
  source 1..5129: mol_type = genomic DNA
agaagcggtggccgccgagcgggatctgtgcggggagccggaaatggttgtggactacgtctgtgcggctgcgtggggctcggccgcgcggactgaaggagactgaaggccctcggatgcccagaacctgtaggccgcaccgtggacttgttcttaatcgagggggtgctggggggaccctgatgtggcaccaaatgaaatgaacaaagctccacagtccacaggccccccacccgccccatcccccggactcccacagccagcgtttcccccggggcagacagcgccggtggtgttcagtacgccacaagcgacacaaatgaacacgccttctcagccccgccagggaggattcaggtctctgcagcacttctaccctagccgggcccagcccccgagcagtgcagcctcccgagtgcagagtgcagcccctgcccgccctggcccagctgcccatgtctaccctgctggatcccaagtaatgatgatcccttcccagatctcctacccagcctcccagggggcctactacatccctggacaggggcgttccacatacgttgtcccgacacagcagtaccctgtgcagccaggagccccaggcttctatccaggtgcaagccctacagaatttgggacctacgctggcgcctactatccagcccaaggggtgcagcagtttcccactggcgtggcccccaccccagttttgatgaaccagccaccccagattgctcccaagagggagcgtaagacgatccgaattcgagatccaaaccaaggaggaaaggatatcacagaggagatcatgtctggggcccgcactgcctccacacccacccctccccagacgggaggcggtctggagcctcaagctaatggggagacgccccaggttgctgtcattgtccggccagatgaccggtcacagggagcaatcattgctgaccggccagggctgcctggcccagagcatagcccttcagaatcccagccttcgtcgccttctccgaccccatcaccatccccagtcttggaaccggggtctgagcctaatctcgcagtcctctctattcctggggacactatgacaactatacaaatgtctgtagaagaatcaacccccatctcccgtgaaactggggagccatatcgcctctctccagaacccactcctctcgccgaacccatactggaagtagaagtgacacttagcaaaccggttccagaatctgagttttcttccagtcctctccaggctcccacccctttggcatctcacacagtggaaattcatgagcctaatggcatggtcccatctgaagatctggaaccagaggtggagtcaagcccagagcttgctcctcccccagcttgcccctccgaatcccctgtgcccattgctccaactgcccaacctgaggaactgctcaacggagccccctcgccaccagctgtggacttaagcccagtcagtgagccagaggagcaggccaaggaggtgacagcatcaatggcgccccccaccatcccctctgctactccagctacggctccttcagctacttccccagctcaggaggaggaaatggaagaagaagaagaagaggaagaaggagaagcaggagaagcaggagaagctgagagtgagaaaggaggagaggaactgctccccccagagagtacccctattccagccaacttgtctcagaatttggaggcagcagcagccactcaagtggcagtatctgtgccaaagaggagacggaaaattaaggagctaaataagaaggaggctgttggagaccttctggatgccttcaaggaggcgaacccggcagtaccagaggtggaaaatcagcctcctgcaggcagcaatccaggcccagagtctgagggcagtggtgtgcccccacgtcctgaggaagcagatgagacctgggactcaaaggaagacaaaattcacaatgctgagaacatccagcccggggaacagaagtatgaatataagtcagatcagtggaagcctctaaacctagaggagaaaaaacgttacgaccgtgagttcctgcttggttttcagttcatctttgccagtatgcagaagccagagggattgccacatatcagtgacgtggtgctggacaaggccaataaaacaccactgcggccactggatcccactagactacaaggcataaattgtggcccagacttcactccatcctttgccaaccttggccggacaacccttagcacccgtgggcccccaaggggtgggccaggtggggagctgccccgtgggccggctggcctgggaccccggcgctctcagcagggaccccgaaaagaaccacgcaagatcattgccacagtgttaatgaccgaagatataaaactgaacaaagcagagaaagcctggaaacccagcagcaagcggacggcggctgataaggatcgaggggaagaagatgctgatggcagcaaaacccaggacctattccgcagggtgcgctccatcctgaataaactgacaccccagatgttccagcagctgatgaagcaagtgacgcagctggccatcgacaccgaggaacgcctcaaaggggtcattgacctcatttttgagaaggccatttcagagcccaacttctctgtggcctatgccaacatgtgccgctgcctcatggcgctgaaagtgcccactacggaaaagccaacagtgactgtgaacttccgaaagctgttgttgaatcgatgtcagaaggagtttgagaaagacaaagatgatgatgaggtttttgagaagaagcaaaaagagatggatgaagctgctacggcagaggaacgaggacgcctgaaggaagagctggaagaggctcgggacatagcccggcggcgctctttagggaatatcaagtttattggagagttgttcaaactgaagatgttaacagaggcaataatgcatgactgtgtggtcaaactgcttaagaaccatgatgaagagtcccttgagtgcctttgtcgtctgctcaccaccattggcaaagacctggactttgaaaaagccaagccccgaatggatcagtatttcaaccagatggaaaaaatcattaaagaaaagaagacgtcatcccgcatccgctttatgctgcaggacgtgctggatctgcgagggagcaattgggtgccacgccgaggggatcagggtcccaagaccattgaccagatccataaggaggctgagatggaagaacatcgagagcacatcaaagtgcagcagctcatggccaagggcagtgacaagcgtcggggcggtcctccaggccctcccatcagccgtggacttccccttgtggatgatggtggctggaacacagttcccatcagcaaaggtagccgccccattgacacctcacgactcaccaagatcaccaagcctggctccatcgattctaacaaccagctctttgcacctggagggcgactgagctggggcaagggcagcagcggaggctcaggagccaagccctcagacgcagcatcagaagctgctcgcccagctactagtactttgaatcgcttctcagcccttcaacaagcggtacccacagaaagcacagataatagacgtgtggtgcagaggagtagcttgagccgagaacgaggcgagaaagctggagaccgaggagaccgcctagagcggagtgaacggggaggggaccgtggggaccggcttgatcgtgcgcggacacctgctaccaagcggagcttcagcaaggaagtggaggagcggagtagagaacggccctcccagcctgaggggctgcgcaaggcagctagcctcacggaggatcgggaccgtgggcgggatgccgtgaagcgagaagctgccctacccccagtgagccccctgaaggcggctctctctgaggaggagttagagaagaaatccaaggctatcattgaggaatatctccatctcaatgacatgaaagaggcagtccagtgcgtgcaggagctggcctcaccctccttgctcttcatctttgtacggcatggtgtcgagtctacgctggagcgcagtgccattgctcgtgagcatatggggcagctgctgcaccagctgctctgtgctgggcatctgtctactgctcagtactaccaagggttgtatgaaatcttggaattggctgaggacatggaaattgacatcccccacgtgtggctctacctagcggaactggtaacacccattctgcaggaaggtggggtgcccatgggggagctgttcagggagattacaaagcctctgagaccgttgggcaaagctgcttccctgttgctggagatcctgggcctcctgtgcaaaagcatgggtcctaaaaaggtggggacgctgtggcgagaagccgggcttagctggaaggaatttctacctgaaggccaggacattggtgcattcgtcgctgaacagaaggtggagtataccctgggagaggagtcggaagcccctggccagagggcactcccctccgaggagctgaacaggcagctggagaagctgctgaaggagggcagcagtaaccagcgggtgttcgactggatagaggccaacctgagtgagcagcagatagtatccaacacgttagttcgagccctcatgacggctgtctgctattctgcaattatttttgagactcccctccgagtggacgttgcagtgctgaaagcgcgagcgaagctgctgcagaaatacctgtgtgacgagcagaaggagctacaggcgctctacgccctccaggcccttgtagtgaccttagaacagcctcccaacctgctgcggatgttctttgacgcactgtatgacgaggacgtggtgaaggaggatgccttctacagttgggagagtagcaaggaccccgctgagcagcagggcaagggtgtggcccttaaatctgtcacagccttcttcaagtggctccgtgaagcagaggaggagtctgaccacaactgagggctggtggggccggggacctggagccccatggacacacagatggcccggctagccgcctggactgcaggggggcggcagcagcggcggtggcagtgggtgcctgtag

SEQ ID NO: 1549 - DNA, 5229 bp, Homo sapiens
  source 1..5229: mol_type = genomic DNA
gtgggggcgccggctgcgcctgcggagaagcggtggccgccgagcgggatctgtgcggggagccggaaatggttgtggactacgtctgtgcggctgcgtggggctcggccgcgcggactgaaggagactgaagcacttctaccctagccgggcccagcccccgagcagtgcagcctcccgagtgcagagtgcagcccctgcccgccctggcccagctgcccatgtctaccctgctggatcccaagtaatgatgatcccttcccagatctcctacccagcctcccagggggcctactacatccctggacaggggcgttccacatacgttgtcccgacacagcagtaccctgtgcagccaggagccccaggcttctatccaggtgcaagccctacagaatttgggacctacgctggcgcctactatccagcccaaggggtgcagcagtttcccactggcgtggcccccaccccagttttgatgaaccagccaccccagattgctcccaagagggagcgtaagacgatccgaattcgagatccaaaccaaggaggaaaggatatcacagaggagatcatgtctggggcccgcactgcctccacacccacccctccccagacgggaggcggtctggagcctcaagctaatggggagacgccccaggttgctgtcattgtccggccagatgaccggtcacagggagcaatcattgctgaccggccagggctgcctggcccagagcatagcccttcagaatcccagccttcgtcgccttctccgaccccatcaccatccccagtcttggaaccggggtctgagcctaatctcgcagtcctctctattcctggggacactatgacaactatacaaatgtctgtagaagaatcaacccccatctcccgtgaaactggggagccatatcgcctctctccagaacccactcctctcgccgaacccatactggaagtagaagtgacacttagcaaaccggttccagaatctgagttttcttccagtcctctccaggctcccacccctttggcatctcacacagtggaaattcatgagcctaatggcatggtcccatctgaagatctggaaccagaggtggagtcaagcccagagcttgctcctcccccagcttgcccctccgaatcccctgtgcccattgctccaactgcccaacctgaggaactgctcaacggagccccctcgccaccagctgtggacttaagcccagtcagtgagccagaggagcaggccaaggaggtgacagcatcaatggcgccccccaccatcccctctgctactccagctacggctccttcagctacttccccagctcaggaggaggaaatggaagaagaagaagaagaggaagaaggagaagcaggagaagcaggagaagctgagagtgagaaaggaggagaggaactgctccccccagagagtacccctattccagccaacttgtctcagaatttggaggcagcagcagccactcaagtggcagtatctgtgccaaagaggagacggaaaattaaggagctaaataagaaggaggctgttggagaccttctggatgccttcaaggaggcgaacccggcagtaccagaggtggaaaatcagcctcctgcaggcagcaatccaggcccagagtctgagggcagtggtgtgcccccacgtcctgaggaagcagatgagacctgggactcaaaggaagacaaaattcacaatgctgagaacatccagcccggggaacagaagtatgaatataagtcagatcagtggaagcctctaaacctagaggagaaaaaacgttacgaccgtgagttcctgcttggttttcagttcatctttgccagtatgcagaagccagagggattgccacatatcagtgacgtggtgctggacaaggccaataaaacaccactgcggccactggatcccactagactacaaggcataaattgtggcccagacttcactccatcctttgccaaccttggccggacaacccttagcacccgtgggcccccaaggggtgggccaggtggggagctgccccgtgggccggctggcctgggaccccggcgctctcagcagggaccccgaaaagaaccacgcaagatcattgccacagtgttaatgaccgaagatataaaactgaacaaagcagagaaagcctggaaacccagcagcaagcggacggcggctgataaggatcgaggggaagaagatgctgatggcagcaaaacccaggacctattccgcagggtgcgctccatcctgaataaactgacaccccagatgttccagcagctgatgaagcaagtgacgcagctggccatcgacaccgaggaacgcctcaaaggggtcattgacctcatttttgagaaggccatttcagagcccaacttctctgtggcctatgccaacatgtgccgctgcctcatggcgctgaaagtgcccactacggaaaagccaacagtgactgtgaacttccgaaagctgttgttgaatcgatgtcagaaggagtttgagaaagacaaagatgatgatgaggtttttgagaagaagcaaaaagagatggatgaagctgctacggcagaggaacgaggacgcctgaaggaagagctggaagaggctcgggacatagcccggcggcgctctttagggaatatcaagtttattggagagttgttcaaactgaagatgttaacagaggcaataatgcatgactgtgtggtcaaactgcttaagaaccatgatgaagagtcccttgagtgcctttgtcgtctgctcaccaccattggcaaagacctggactttgaaaaagccaagccccgaatggatcagtatttcaaccagatggaaaaaatcattaaagaaaagaagacgtcatcccgcatccgctttatgctgcaggacgtgctggatctgcgagggagcaattgggtgccacgccgaggggatcagggtcccaagaccattgaccagatccataaggaggctgagatggaagaacatcgagagcacatcaaagtgcagcagctcatggccaagggcagtgacaagcgtcggggcggtcctccaggccctcccatcagccgtggacttccccttgtggatgatggtggctggaacacagttcccatcagcaaaggtagccgccccattgacacctcacgactcaccaagatcaccaagcctggctccatcgattctaacaaccagctctttgcacctggagggcgactgagctggggcaagggcagcagcggaggctcaggagccaagccctcagacgcagcatcagaagctgctcgcccagctactagtactttgaatcgcttctcagcccttcaacaagcggtacccacagaaagcacagataatagacgtgtggtgcagaggagtagcttgagccgagaacgaggcgagaaagctggagaccgaggagaccgcctagagcggagtgaacggggaggggaccgtggggaccggcttgatcgtgcgcggacacctgctaccaagcggagcttcagcaaggaagtggaggagcggagtagagaacggccctcccagcctgaggggctgcgcaaggcagctagcctcacggaggatcgggaccgtgggcgggatgccgtgaagcgagaagctgccctacccccagtgagccccctgaaggcggctctctctgaggaggagttagagaagaaatccaaggctatcattgaggaatatctccatctcaatgacatgaaagaggcagtccagtgcgtgcaggagctggcctcaccctccttgctcttcatctttgtacggcatggtgtcgagtctacgctggagcgcagtgccattgctcgtgagcatatggggcagctgctgcaccagctgctctgtgctgggcatctgtctactgctcagtactaccaagggttgtatgaaatcttggaattggctgaggacatggaaattgacatcccccacgtgtggctctacctagcggaactggtaacacccattctgcaggaaggtggggtgcccatgggggagctgttcagggagattacaaagcctctgagaccgttgggcaaagctgcttccctgttgctggagatcctgggcctcctgtgcaaaagcatgggtcctaaaaaggtggggacgctgtggcgagaagccgggcttagctggaaggaatttctacctgaaggccaggacattggtgcattcgtcgctgaacagaaggtggagtataccctgggagaggagtcggaagcccctggccagagggcactcccctccgaggagctgaacaggcagctggagaagctgctgaaggagggcagcagtaaccagcgggtgttcgactggatagaggccaacctgagtgagcagcagatagtatccaacacgttagttcgagccctcatgacggctgtctgctattctgcaattatttttgagactcccctccgagtggacgttgcagtgctgaaagcgcgagcgaagctgctgcagaaatacctgtgtgacgagcagaaggagctacaggcgctctacgccctccaggcccttgtagtgaccttagaacagcctcccaacctgctgcggatgttctttgacgcactgtatgacgaggacgtggtgaaggaggatgccttctacagttgggagagtagcaaggaccccgctgagcagcagggcaagggtgtggcccttaaatctgtcacagccttcttcaagtggctccgtgaagcagaggaggagtctgaccacaactgagggctggtggggccggggacctggagccccatggacacacagatggcccggctagccgcctggactgcaggggggcggcagcagcggcggtggcagtgggtgcctgtagtgtgatgtgtctgaactaataaagtggctgaagaggcaggatggcttggggctgcctgggcccccctccaggatgccgccaggtgtccctctcctccccctggggcacagagatatattatatataaagtcttgaaatttggtgtgtcttggggtggggaggggcaccaacgcctgcccctggggtccttttttttattttctgaaaatcactctcgggactgccgtcctcgctgctgggggcatatgccccagcccctgtaccacccctgctgttgcctgggcagggggaagggggggcacggtgcctgtaattattaaacatgaattcaatt

SEQ ID NO: 1550 - DNA, 5229 bp, Homo sapiens; identical to SEQ ID NO: 1549
  source 1..5229: mol_type = genomic DNA

SEQ ID NO: 1551 - DNA, 4683 bp, Homo sapiens
  source 1..4683: mol_type = genomic DNA
atgaacacgccttctcagccccgccagcacttctaccctagccgggcccagcccccgagcagtgcagcctcccgagtgcagagtgcagcccctgcccgccctggcccagctgcccatgtctaccctgctggatcccaagtaatgatgatcccttcccagatctcctacccagcctcccagggggcctactacatccctggacaggggcgttccacatacgttgtcccgacacagcagtaccctgtgcagccaggagccccaggcttctatccaggtgcaagccctacagaatttgggacctacgctggcgcctactatccagcccaaggggtgcagcagtttcccactggcgtggcccccaccccagttttgatgaaccagccaccccagattgctcccaagagggagcgtaagacgatccgaattcgagatccaaaccaaggaggaaaggatatcacagaggagatcatgtctggggcccgcactgcctccacacccacccctccccagacgggaggcggtctggagcctcaagctaatggggagacgccccaggttgctgtcattgtccggccagatgaccggtcacagggagcaatcattgctgaccggccagggctgcctggcccagagcatagcccttcagaatcccagccttcgtcgccttctccgaccccatcaccatccccagtcttggaaccggggtctgagcctaatctcgcagtcctctctattcctggggacactatgacaactatacaaatgtctgtagaagaatcaacccccatctcccgtgaaactggggagccatatcgcctctctccagaacccactcctctcgccgaacccatactggaagtagaagtgacacttagcaaaccggttccagaatctgagttttcttccagtcctctccaggctcccacccctttggcatctcacacagtggaaattcatgagcctaatggcatggtcccatctgaagatctggaaccagaggtggagtcaagcccagagcttgctcctcccccagcttgcccctccgaatcccctgtgcccattgctccaactgcccaacctgaggaactgctcaacggagccccctcgccaccagctgtggacttaagcccagtcagtgagccagaggagcaggccaaggaggtgacagcatcaatggcgccccccaccatcccctctgctactccagctacggctccttcagctacttccccagctcaggaggaggaaatggaagaagaagaagaagaggaagaaggagaagcaggagaagcaggagaagctgagagtgagaaaggaggagaggaactgctccccccagagagtacccctattccagccaacttgtctcagaatttggaggcagcagcagccactcaagtggcagtatctgtgccaaagaggagacggaaaattaaggagctaaataagaaggaggctgttggagaccttctggatgccttcaaggaggcgaacccggcagtaccagaggtggaaaatcagcctcctgcaggcagcaatccaggcccagagtctgagggcagtggtgtgcccccacgtcctgaggaagcagatgagacctgggactcaaaggaagacaaaattcacaatgctgagaacatccagcccggggaacagaagtatgaatataagtcagatcagtggaagcctctaaacctagaggagaaaaaacgttacgaccgtgagttcctgcttggttttcagttcatctttgccagtatgcagaagccagagggattgccacatatcagtgacgtggtgctggacaaggccaataaaacaccactgcggccactggatcccactagactacaaggcataaattgtggcccagacttcactccatcctttgccaaccttggccggacaacccttagcacccgtgggcccccaaggggtgggccaggtggggagctgccccgtgggccgcaggctggcctgggaccccggcgctctcagcagggaccccgaaaagaaccacgcaagatcattgccacagtgttaatgaccgaagatataaaactgaacaaagcagagaaagcctggaaacccagcagcaagcggacggcggctgataaggatcgaggggaagaagatgctgatggcagcaaaacccaggacctattccgcagggtgcgctccatcctgaataaactgacaccccagatgttccagcagctgatgaagcaagtgacgcagctggccatcgacaccgaggaacgcctcaaaggggtcattgacctcatttttgagaaggccatttcagagcccaacttctctgtggcctatgccaacatgtgccgctgcctcatggcgctgaaagtgcccactacggaaaagccaacagtgactgtgaacttccgaaagctgttgttgaatcgatgtcagaaggagtttgagaaagacaaagatgatgatgaggtttttgagaagaagcaaaaagagatggatgaagctgctacggcagaggaacgaggacgcctgaaggaagagctggaagaggctcgggacatagcccggcggcgctctttagggaatatcaagtttattggagagttgttcaaactgaagatgttaacagaggcaataatgcatgactgtgtggtcaaactgcttaagaaccatgatgaagagtcccttgagtgcctttgtcgtctgctcaccaccattggcaaagacctggactttgaaaaagccaagccccgaatggatcagtatttcaaccagatggaaaaaatcattaaagaaaagaagacgtcatcccgcatccgctttatgctgcaggacgtgctggatctgcgagggagcaattgggtgccacgccgaggggatcagggtcccaagaccattgaccagatccataaggaggctgagatggaagaacatcgagagcacatcaaagtgcagcagctcatggccaagggcagtgacaagcgtcggggcggtcctccaggccctcccatcagccgtggacttccccttgtggatgatggtggctggaacacagttcccatcagcaaaggtagccgccccattgacacctcacgactcaccaagatcaccaagcctggctccatcgattctaacaaccagctctttgcacctggagggcgactgagctggggcaagggcagcagcggaggctcaggagccaagccctcagacgcagcatcagaagctgctcgcccagctactagtactttgaatcgcttctcagcccttcaacaagcggtacccacagaaagcacagataatagacgtgtggtgcagaggagtagcttgagccgagaacgaggcgagaaagctggagaccgaggagaccgcctagagcggagtgaacggggaggggaccgtggggaccggcttgatcgtgcgcggacacctgctaccaagcggagcttcagcaaggaagtggaggagcggagtagagaacggccctcccagcctgaggggctgcgcaaggcagctagcctcacggaggatcgggaccgtgggcgggatgccgtgaagcgagaagctgccctacccccagtgagccccctgaaggcggctctctctgaggaggagttagagaagaaatccaaggctatcattgaggaatatctccatctcaatgacatgaaagaggcagtccagtgcgtgcaggagctggcctcaccctccttgctcttcatctttgtacggcatggtgtcgagtctacgctggagcgcagtgccattgctcgtgagcatatggggcagctgctgcaccagctgctctgtgctgggcatctgtctactgctcagtactaccaagggttgtatgaaatcttggaattggctgaggacatggaaattgacatcccccacgtgtggctctacctagcggaactggtaacacccattctgcaggaaggtggggtgcccatgggggagctgttcagggagattacaaagcctctgagaccgttgggcaaagctgcttccctgttgctggagatcctgggcctcctgtgcaaaagcatgggtcctaaaaaggtggggacgctgtggcgagaagccgggcttagctggaaggaatttctacctgaaggccaggacattggtgcattcgtcgctgaacagaaggtggagtataccctgggagaggagtcggaagcccctggccagagggcactcccctccgaggagctgaacaggcagctggagaagctgctgaaggagggcagcagtaaccagcgggtgttcgactggatagaggccaacctgagtgagcagcagatagtatccaacacgttagttcgagccctcatgacggctgtctgctattctgcaattatttttgagactcccctccgagtggacgttgcagtgctgaaagcgcgagcgaagctgctgcagaaatacctgtgtgacgagcagaaggagctacaggcgctctacgccctccaggcccttgtagtgaccttagaacagcctcccaacctgctgcggatgttctttgacgcactgtatgacgaggacgtggtgaaggaggatgccttctacagttgggagagtagcaaggaccccgctgagcagcagggcaagggtgtggcccttaaatctgtcacagccttcttcaagtggctccgtgaagcagaggaggagtctgaccacaactga

SEQ ID NO: 1552 - DNA, 5569 bp, Homo sapiens
  source 1..5569: mol_type = genomic DNA
gcagatcgcccggcgcggctccgccccctgcgccggtcacgtgggggcgccggctgcgcctgcggagaagcggtggccgccgagcgggatctgtgcggggagccggaaatggttgtggactacgtctgtgcggctgcgtggggctcggccgcgcggactgaaggagactgaaggccctcggatgcccagaacctgtaggccgcaccgtggacttgttcttaatcgagggggtgctggggggaccctgatgtggcaccaaatgaaatgaacaaagctccacagtccacaggccccccacccgccccatcccccggactcccacagcttgggtttctgccccacctgggcttcccctcttgctgaactctggtctcccctcttcagccagcgtttcccccggggcagacagcgccggtggtgttcagtacgccacaagcgacacaaatgaacacgccttctcagccccgccagcacttctaccctagccgggcccagcccccgagcagtgcagcctcccgagtgcagagtgcagcccctgcccgccctggcccagctgcccatgtctaccctgctggatcccaagtaatgatgatcccttcccagatctcctacccagcctcccagggggcctactacatccctggacaggggcgttccacatacgttgtcccgacacagcagtaccctgtgcagccaggagccccaggcttctatccaggtgcaagccctacagaatttgggacctacgctggcgcctactatccagcccaaggggtgcagcagtttcccactggcgtggcccccaccccagttttgatgaaccagccaccccagattgctcccaagagggagcgtaagacgatccgaattcgagatccaaaccaaggaggaaaggatatcacagaggagatcatgtctggggcccgcactgcctccacacccacccctccccagacgggaggcggtctggagcctcaagctaatggggagacgccccaggttgctgtcattgtccggccagatgaccggtcacagggagcaatcattgctgaccggccagggctgcctggcccagagcatagcccttcagaatcccagccttcgtcgccttctccgaccccatcaccatccccagtcttggaaccggggtctgagcctaatctcgcagtcctctctattcctggggacactatgacaactatacaaatgtctgtagaagaatcaacccccatctcccgtgaaactggggagccatatcgcctctctccagaacccactcctctcgccgaacccatactggaagtagaagtgacacttagcaaaccggttccagaatctgagttttcttccagtcctctccaggctcccacccctttggcatctcacacagtggaaattcatgagcctaatggcatggtcccatctgaagatctggaaccagaggtggagtcaagcccagagcttgctcctcccccagcttgcccctccgaatcccctgtgcccattgctccaactgcccaacctgaggaactgctcaacggagccccctcgccaccagctgtggacttaagcccagtcagtgagccagaggagcaggccaaggaggtgacagcatcaatggcgccccccaccatcccctctgctactccagctacggctccttcagctacttccccagctcaggaggaggaaatggaagaagaagaagaagaggaagaaggagaagcaggagaagcaggagaagctgagagtgagaaaggaggagaggaactgctccccccagagagtacccctattccagccaacttgtctcagaatttggaggcagcagcagccactcaagtggcagtatctgtgccaaagaggagacggaaaattaaggagctaaataagaaggaggctgttggagaccttctggatgccttcaaggaggcgaacccggcagtaccagaggtggaaaatcagcctcctgcaggcagcaatccaggcccagagtctgagggcagtggtgtgcccccacgtcctgaggaagcagatgagacctgggactcaaaggaagacaaaattcacaatgctgagaacatccagcccggggaacagaagtatgaatataagtcagatcagtggaagcctctaaacctagaggagaaaaaacgttacgaccgtgagttcctgcttggttttcagttcatctttgccagtatgcagaagccagagggattgccacatatcagtgacgtggtgctggacaaggccaataaaacaccactgcggccactggatcccactagactacaaggcataaattgtggcccagacttcactccatcctttgccaaccttggccggacaacccttagcacccgtgggcccccaaggggtgggccaggtggggagctgccccgtgggccggctggcctgggaccccggcgctctcagcagggaccccgaaaagaaccacgcaagatcattgccacagtgttaatgaccgaagatataaaactgaacaaagcagagaaagcctggaaacccagcagcaagcggacggcggctgataaggatcgaggggaagaagatgctgatggcagcaaaacccaggacctattccgcagggtgcgctccatcctgaataaactgacaccccagatgttccagcagctgatgaagcaagtgacgcagctggccatcgacaccgaggaacgcctcaaaggggtcattgacctcatttttgagaaggccatttcagagcccaacttctctgtggcctatgccaacatgtgccgctgcctcatggcgctgaaagtgcccactacggaaaagccaacagtgactgtgaacttccgaaagctgttgttgaatcgatgtcagaaggagtttgagaaagacaaagatgatgatgaggtttttgagaagaagcaaaaagagatggatgaagctgctacggcagaggaacgaggacgcctgaaggaagagctggaagaggctcgggacatagcccggcggcgctctttagggaatatcaagtttattggagagttgttcaaactgaagatgttaacagaggcaataatgcatgactgtgtggtcaaactgcttaagaaccatgatgaagagtcccttgagtgcctttgtcgtctgctcaccaccattggcaaagacctggactttgaaaaagccaagccccgaatggatcagtatttcaaccagatggaaaaaatcattaaagaaaagaagacgtcatcccgcatccgctttatgctgcaggacgtgctggatctgcgagggagcaattgggtgccacgccgaggggatcagggtcccaagaccattgaccagatccataaggaggctgagatggaagaacatcgagagcacatcaaagtgcagcagctcatggccaagggcagtgacaagcgtcggggcggtcctccaggccctcccatcagccgtggacttccccttgtggatgatggtggctggaacacagttcccatcagcaaaggtagccgccccattgacacctcacgactcaccaagatcaccaagcctggctccatcgattctaacaaccagctctttgcacctggagggcgactgagctggggcaagggcagcagcggaggctcaggagccaagccctcagacgcagcatcagaagctgctcgcccagctactagtactttgaatcgcttctcagcccttcaacaagcggtacccacagaaagcacagataatagacgtgtggtgcagaggagtagcttgagccgagaacgaggcgagaaagctggagaccgaggagaccgcctagagcggagtgaacggggaggggaccgtggggaccggcttgatcgtgcgcggacacctgctaccaagcggagcttcagcaaggaagtggaggagcggagtagagaacggccctcccagcctgaggggctgcgcaaggcagctagcctcacggaggatcgggaccgtgggcgggatgccgtgaagcgagaagctgccctacccccagtgagccccctgaaggcggctctctctgaggaggagttagagaagaaatccaaggctatcattgaggaatatctccatctcaatgacatgaaagaggcagtccagtgcgtgcaggagctggcctcaccctccttgctcttcatctttgtacggcatggtgtcgagtctacgctggagcgcagtgccattgctcgtgagcatatggggcagctgctgcaccagctgctctgtgctgggcatctgtctactgctcagtactaccaagggttgtatgaaatcttggaattggctgaggacatggaaattgacatcccccacgtgtggctctacctagcggaactggtaacacccattctgcaggaaggtggggtgcccatgggggagctgttcagggagattacaaagcctctgagaccgttgggcaaagctgcttccctgttgctggagatcctgggcctcctgtgcaaaagcatgggtcctaaaaaggtggggacgctgtggcgagaagccgggcttagctggaaggaatttctacctgaaggccaggacattggtgcattcgtcgctgaacagaaggtggagtataccctgggagaggagtcggaagcccctggccagagggcactcccctccgaggagctgaacaggcagctggagaagctgctgaaggagggcagcagtaaccagcgggtgttcgactggatagaggccaacctgagtgagcagcagatagtatccaacacgttagttcgagccctcatgacggctgtctgctattctgcaattatttttgagactcccctccgagtggacgttgcagtgctgaaagcgcgagcgaagctgctgcagaaatacctgtgtgacgagcagaaggagctacaggcgctctacgccctccaggcccttgtagtgaccttagaacagcctcccaacctgctgcggatgttctttgacgcactgtatgacgaggacgtggtgaaggaggatgccttctacagttgggagagtagcaaggaccccgctgagcagcagggcaagggtgtggcccttaaatctgtcacagccttcttcaagtggctccgtgaagcagaggaggagtctgaccacaactgagggctggtggggccggggacctggagccccatggacacacagatggcccggctagccgcctggactgcaggggggcggcagcagcggcggtggcagtgggtgcctgtagtgtgatgtgtctgaactaataaagtggctgaagaggcaggatggcttggggctgcctgggcccccctccaggatgccgccaggtgtccctctcctccccctggggcacagagatatattatatataaagtcttgaaatttggtgtgtcttggggtggggaggggcaccaacgcctgcccctggggtccttttttttattttctgaaaatcactctcgggactgccgtcctcgctgctgggggcatatgccccagcccctgtaccacccctgctgttgcctgggcagggggaagggggggcacggtgcctgtaattattaaacatgaattcaattaa

SEQ ID NO: 1553 - DNA, 5653 bp, Homo sapiens
  source 1..5653: mol_type = genomic DNA
gccagcgagacctggaatttccggtctggttggtctggggccccgcggagccaggttgataccctcacctcccaaccccaggccctcggatgcccagaacctgtaggccgcaccgtggacttgttcttaatcgagggggtgagtgaggggtctgtttcagtaggtcaggggttggttggaagtgatgcgggtttgacagcatgttggtggggacaggctgtatcttttctgcttcaccctcttggcatctctgggactccgtatgggacccagcccttgcatcaaccctttcaccgccccatttgccttaagcttgggtcccttcctcttcctgagcgccactctttcccaacaggtgctggggggaccctgatgtggcaccaaatgaaatgaacaaagctccacagtccacaggccccccacccgccccatcccccggactcccacagccagcgtttcccccggggcagacagcgccggtggtgttcagtacgccacaagcgacacaaatgaacacgccttctcagccccgccagggaggattcaggtctctgcagcacttctaccctagccgggcccagcccccgagcagtgcagcctcccgagtgcagagtgcagcccctgcccgccctggcccagctgcccatgtctaccctgctggatcccaagtaatgatgatcccttcccagatctcctacccagcctcccagggggcctactacatccctggacaggggcgttccacatacgttgtcccgacacagcagtaccctgtgcagccaggagccccaggcttctatccaggtgcaagccctacagaatttgggacctacgctggcgcctactatccagcccaaggggtgcagcagtttcccactggcgtggcccccaccccagttttgatgaaccagccaccccagattgctcccaagagggagcgtaagacgatccgaattcgagatccaaaccaaggaggaaaggatatcacagaggagatcatgtctggggcccgcactgcctccacacccacccctccccagacgggaggcggtctggagcctcaagctaatggggagacgccccaggttgctgtcattgtccggccagatgaccggtcacagggagcaatcattgctgaccggccagggctgcctggcccagagcatagcccttcagaatcccagccttcgtcgccttctccgaccccatcaccatccccagtcttggaaccggggtctgagcctaatctcgcagtcctctctattcctggggacactatgacaactatacaaatgtctgtagaagaatcaacccccatctcccgtgaaactggggagccatatcgcctctctccagaacccactcctctcgccgaacccatactggaagtagaagtgacacttagcaaaccggttccagaatctgagttttcttccagtcctctccaggctcccacccctttggcatctcacacagtggaaattcatgagcctaatggcatggtcccatctgaagatctggaaccagaggtggagtcaagcccagagcttgctcctcccccagcttgcccctccgaatcccctgtgcccattgctccaactgcccaacctgaggaactgctcaacggagccccctcgccaccagctgtggacttaagcccagtcagtgagccagaggagcaggccaaggaggtgacagcatcaatggcgccccccaccatcccctctgctactccagctacggctccttcagctacttccccagctcaggaggaggaaatggaagaagaagaagaagaggaagaaggagaagcaggagaagcaggagaagctgagagtgagaaaggaggagaggaactgctccccccagagagtacccctattccagccaacttgtctcagaatttggaggcagcagcagccactcaagtggcagtatctgtgccaaagaggagacggaaaattaaggagctaaataagaaggaggctgttggagaccttctggatgccttcaaggaggcgaacccggcagtaccagaggtggaaaatcagcctcctgcaggcagcaatccaggcccagagtctgagggcagtggtgtgcccccacgtcctgaggaagcagatgagacctgggactcaaaggaagacaaaattcacaatgctgagaacatccagcccggggaacagaagtatgaatataagtcagatcagtggaagcctctaaacctagaggagaaaaaacgttacgaccgtgagttcctgcttggttttcagttcatctttgccagtatgcagaagccagagggattgccacatatcagtgacgtggtgctggacaaggccaataaaacaccactgcggccactggatcccactagactacaaggcataaattgtggcccagacttcactccatcctttgccaaccttggccggacaacccttagcacccgtgggcccccaaggggtgggccaggtggggagctgccccgtgggccggctggcctgggaccccggcgctctcagcagggaccccgaaaagaaccacgcaagatcattgccacagtgttaatgaccgaagatataaaactgaacaaagcagagaaagcctggaaacccagcagcaagcggacggcggctgataaggatcgaggggaagaagatgctgatggcagcaaaacccaggacctattccgcagggtgcgctccatcctgaataaactgacaccccagatgttccagcagctgatgaagcaagtgacgcagctggccatcgacaccgaggaacgcctcaaaggggtcattgacctcatttttgagaaggccatttcagagcccaacttctctgtggcctatgccaacatgtgccgctgcctcatggcgctgaaagtgcccactacggaaaagccaacagtgactgtgaacttccgaaagctgttgttgaatcgatgtcagaaggagtttgagaaagacaaagatgatgatgaggtttttgagaagaagcaaaaagagatggatgaagctgctacggcagaggaacgaggacgcctgaaggaagagctggaagaggctcgggacatagcccggcggcgctctttagggaatatcaagtttattggagagttgttcaaactgaagatgttaacagaggcaataatgcatgactgtgtggtcaaactgcttaagaaccatgatgaagagtcccttgagtgcctttgtcgtctgctcaccaccattggcaaagacctggactttgaaaaagccaagccccgaatggatcagtatttcaaccagatggaaaaaatcattaaagaaaagaagacgtcatcccgcatccgctttatgctgcaggacgtgctggatctgcgagggagcaattgggtgccacgccgaggggatcagggtcccaagaccattgaccagatccataaggaggctgagatggaagaacatcgagagcacatcaaagtgcagcagctcatggccaagggcagtgacaagcgtcggggcggtcctccaggccctcccatcagccgtggacttccccttgtggatgatggtggctggaacacagttcccatcagcaaaggtagccgccccattgacacctcacgactcaccaagatcaccaagcctggctccatcgattctaacaaccagctctttgcacctggagggcgactgagctggggcaagggcagcagcggaggctcaggagccaagccctcagacgcagcatcagaagctgctcgcccagctactagtactttgaatcgcttctcagcccttcaacaagcggtacccacagaaagcacagataatagacgtgtggtgcagaggagtagcttgagccgagaacgaggcgagaaagctggagaccgaggagaccgcctagagcggagtgaacggggaggggaccgtggggaccggcttgatcgtgcgcggacacctgctaccaagcggagcttcagcaaggaagtggaggagcggagtagagaacggccctcccagcctgaggggctgcgcaaggcagctagcctcacggaggatcgggaccgtgggcgggatgccgtgaagcgagaagctgccctacccccagtgagccccctgaaggcggctctctctgaggaggagttagagaagaaatccaaggctatcattgaggaatatctccatctcaatgacatgaaagaggcagtccagtgcgtgcaggagctggcctcaccctccttgctcttcatctttgtacggcatggtgtcgagtctacgctggagcgcagtgccattgctcgtgagcatatggggcagctgctgcaccagctgctctgtgctgggcatctgtctactgctcagtactaccaagggttgtatgaaatcttggaattggctgaggacatggaaattgacatcccccacgtgtggctctacctagcggaactggtaacacccattctgcaggaaggtggggtgcccatgggggagctgttcagggagattacaaagcctctgagaccgttgggcaaagctgcttccctgttgctggagatcctgggcctcctgtgcaaaagcatgggtcctaaaaaggtggggacgctgtggcgagaagccgggcttagctggaaggaatttctacctgaaggccaggacattggtgcattcgtcgctgaacagaaggtggagtataccctgggagaggagtcggaagcccctggccagagggcactcccctccgaggagctgaacaggcagctggagaagctgctgaaggagggcagcagtaaccagcgggtgttcgactggatagaggccaacctgagtgagcagcagatagtatccaacacgttagttcgagccctcatgacggctgtctgctattctgcaattatttttgagactcccctccgagtggacgttgcagtgctgaaagcgcgagcgaagctgctgcagaaatacctgtgtgacgagcagaaggagctacaggcgctctacgccctccaggcccttgtagtgaccttagaacagcctcccaacctgctgcggatgttctttgacgcactgtatgacgaggacgtggtgaaggaggatgccttctacagttgggagagtagcaaggaccccgctgagcagcagggcaagggtgtggcccttaaatctgtcacagccttcttcaagtggctccgtgaagcagaggaggagtctgaccacaactgagggctggtggggccggggacctggagccccatggacacacagatggcccggctagccgcctggactgcaggggggcggcagcagcggcggtggcagtgggtgcctgtagtgtgatgtgtctgaactaataaagtggctgaagaggcaggatggcttggggctgcctgggcccccctccaggatgccgccaggtgtccctctcctccccctggggcacagagatatattatatataaagtcttgaaatttggtgtgtcttggggtggggaggggcaccaacgcctgcccctggggtccttttttttattttctgaaaatcactctcgggactgccgtcctcgctgctgggggcatatgccccagcccctgtaccacccctgctgttgcctgggcagggggaagggggggcacggtgcctgtaattattaaacatgaattcaatt

SEQ ID NO: 1554 - DNA, 596 bp, Homo sapiens
  source 1..596: mol_type = genomic DNA
gagctggggcagggactacgagagcagccagatgggctgaaagtggaactcaagggatccgaattcgagatccaaaccaaggaggaaaggatatcacagaggagatcatgtctggggcccgcactgcctccacacccacccctccccagacgggaggcggtctggagcctcaagctaatggggagacgccccaggttgctgtcattgtccggccagatgaccggtcacagggagcaatcattgctgaccggccagggctgcctggcccagagcatagcccttcagaatcccagccttcgtcgccttctccgaccccatcaccatccccagtcttggaaccggggtctgagcctaatctcgcagtcctctctattcctggggacactatgacaactatacaaatgtctgtagaagaatcaacccccatctcccgtgaaactggggagccatatcgcctctctccagaacccactcctctcgccgaacccatactggaagtagaagtgacacttagcaaaccggttccagaatctgagttttcttccagtcctctccaggctcccacccctttggcatctcacacagtggaaattcat

SEQ ID NO: 1555 - DNA, 5038 bp, Homo sapiens
  source 1..5038: mol_type = genomic DNA
tcacttgcctgaaaccggctcctcgacggccgccgcccgcctggccttttagggcctgactcccgcccttcctggcctacactcctgggcggcggcaggcctagcttctggcccagtgcgggttccccggcggcaggcgtatcctgtgtgcccctgggccaggcccgaacccggtgtccccgggtggggggtggggacgccacggccgaagcagctagctccgttcgtgatccgggagcctggtgccagcgagacctggaatttccggtctggttggtctggggccccgcggagccaggttgataccctcacctcccaaccccaggccctcggatgcccagaacctgtaggccgcaccgtggacttgttcttaatcgaggggcacttctaccctagccgggcccagcccccgagcagtgcagcctcccgagtgcagagtgcagcccctgcccgccctggcccagctgcccatgtctaccctgctggatcccaagtaatgatgatcccttcccagatctcctacccagcctcccagggggcctactacatccctggacaggggcgttccacatacgttgtcccgacacagcagtaccctgtgcagccaggagccccaggcttctatccaggtgcaagccctacagaatttgggacctacgctggcgcctactatccagcccaaggggtgcagcagtttcccactggcgtggcccccaccccagttttgatgaaccagccaccccagattgctcccaagagggagcgtaagacgatccgaattcgagatccaaaccaaggaggaaaggatatcacagaggagatcatgtctggggcccgcactgcctccacacccacccctccccagacgggaggcggtctggagcctcaagctaatggggagacgccccaggttgctgtcattgtccggccagatgaccggtcacagggagcaatcattgctgaccggccagggctgcctggcccagagcatagcccttcagaatcccagccttcgtcgccttctccgaccccatcaccatccccagtcttggaaccggggtctgagcctaatctcgcagtcctctctattcctggggacactatgacaactatacaaatgtctgtagaagaatcaacccccatctcccgtgaaactggggagccatatcgcctctctccagaacccactcctctcgccgaacccatactggaagtagaagtgacacttagcaaaccggttccagaatctgagttttcttccagtcctctccaggctcccacccctttggcatctcacacagtggaaattcatgagcctaatggcatggtcccatctgaagatctggaaccagaggtggagtcaagcccagagcttgctcctcccccagcttgcccctccgaatcccctgtgcccattgctccaactgcccaacctgaggaactgctcaacggagccccctcgccaccagctgtggacttaagcccagtcagtgagccagaggagcaggccaaggaggtgacagcatcaatggcgccccccaccatcccctctgctactccagctacggctccttcagctacttccccagctcaggaggaggaaatggaagaagaagaagaagaggaagaaggagaagcaggagaagcaggagaagctgagagtgagaaaggaggagaggaactgctccccccagagagtacccctattccagccaacttgtctcagaatttggaggcagcagcagccactcaagtggcagtatctgtgccaaagaggagacggaaaattaaggagctaaataagaaggaggctgttggagaccttctggatgccttcaaggaggcgaacccggcagtaccagaggtggaaaatcagcctcctgcaggcagcaatccaggcccagagtctgagggcagtggtgtgcccccacgtcctgaggaagcagatgagacctgggactcaaaggaagacaaaattcacaatgctgagaacatccagcccggggaacagaagtatgaatataagtcagatcagtggaagcctctaaacctagaggagaaaaaacgttacgaccgtgagttcctgcttggttttcagttcatctttgccagtatgcagaagccagagggattgccacatatcagtgacgtggtgctggacaaggccaataaaacaccactgcggccactggatcccactagactacaaggcataaattgtggcccagacttcactccatcctttgccaaccttggccggacaacccttagcacccgtgggcccccaaggggtgggccaggtggggagctgccccgtgggccgcaggctggcctgggaccccggcgctctcagcagggaccccgaaaagaaccacgcaagatcattgccacagtgttaatgaccgaagatataaaactgaacaaagcagagaaagcctggaaacccagcagcaagcggacggcggctgataaggatcgaggggaagaagatgctgatggcagcaaaacccaggacctattccgcagggtgcgctccatcctgaataaactgacaccccagatgttccagcagctgatgaagcaagtgacgcagctggccatcgacaccgaggaacgcctcaaaggggtcattgacctcatttttgagaaggccatttcagagcccaacttctctgtggcctatgccaacatgtgccgctgcctcatggcgctgaaagtgcccactacggaaaagccaacagtgactgtgaacttccgaaagctgttgttgaatcgatgtcagaaggagtttgagaaagacaaagatgatgatgaggtttttgagaagaagcaaaaagagatggatgaagctgctacggcagaggaacgaggacgcctgaaggaagagctggaagaggctcgggacatagcccggcggcgctctttagggaatatcaagtttattggagagttgttcaaactgaagatgttaacagaggcaataatgcatgactgtgtggtcaaactgcttaagaaccatgatgaagagtcccttgagtgcctttgtcgtctgctcaccaccattggcaaagacctggactttgaaaaagccaagccccgaatggatcagtatttcaaccagatggaaaaaatcattaaagaaaagaagacgtcatcccgcatccgctttatgctgcaggacgtgctggatctgcgagggagcaattgggtgccacgccgaggggatcagggtcccaagaccattgaccagatccataaggaggctgagatggaagaacatcgagagcacatcaaagtgcagcagctcatggccaagggcagtgacaagcgtcggggcggtcctccaggccctcccatcagccgtggacttccccttgtggatgatggtggctggaacacagttcccatcagcaaaggtagccgccccattgacacctcacgactcaccaagatcaccaagcctggctccatcgattctaacaaccagctctttgcacctggagggcgactgagctggggcaagggcagcagcggaggctcaggagccaagccctcagacgcagcatcagaagctgctcgcccagctactagtactttgaatcgcttctcagcccttcaacaagcggtacccacagaaagcacagataatagacgtgtggtgcagaggagtagcttgagccgagaacgaggcgagaaagctggagaccgaggagaccgcctagagcggagtgaacggggaggggaccgtggggaccggcttgatcgtgcgcggacacctgctaccaagcggagcttcagcaaggaagtggaggagcggagtagagaacggccctcccagcctgaggggctgcgcaaggcagctagcctcacggaggatcgggaccgtgggcgggatgccgtgaagcgagaagctgccctacccccagtgagccccctgaaggcggctctctctgaggaggagttagagaagaaatccaaggctatcattgaggaatatctccatctcaatgacatgaaagaggcagtccagtgcgtgcaggagctggcctcaccctccttgctcttcatctttgtacggcatggtgtcgagtctacgctggagcgcagtgccattgctcgtgagcatatggggcagctgctgcaccagctgctctgtgctgggcatctgtctactgctcagtactaccaagggttgtatgaaatcttggaattggctgaggacatggaaattgacatcccccacgtgtggctctacctagcggaactggtaacacccattctgcaggaaggtggggtgcccatgggggagctgttcagggagattacaaagcctctgagaccgttgggcaaagctgcttccctgttgctggagatcctgggcctcctgtgcaaaagcatgggtcctaaaaaggtggggacgctgtggcgagaagccgggcttagctggaaggaatttctacctgaaggccaggacattggtgcattcgtcgctgaacagaaggtggagtataccctgggagaggagtcggaagcccctggccagagggcactcccctccgaggagctgaacaggcagctggagaagctgctgaaggagggcagcagtaaccagcgggtgttcgactggatagaggccaacctgagtgagcagcagatagtatccaacacgttagttcgagccctcatgacggctgtctgctattctgcaattatttttgagactcccctccgagtggacgttgcagtgctgaaagcgcgagcgaagctgctgcagaaatacctgtgtgacgagcagaaggagctacaggcgctctacgccctccaggcccttgtagtgaccttagaacagcctcccaacctgctgcggatgttctttgacgcactgtatgacgaggacgtggtgaaggaggatgccttctacagttgggagagtagcaaggaccccgctgagcagcagggcaagggtgtggcccttaaatctgtcacagccttcttcaagtggctccgtgaagcagaggaggagtctgaccacaactga

SEQ ID NO: 1556 - DNA, 524 bp, Homo sapiens
  source 1..524: mol_type = genomic DNA
agtgagccgattgggttctagatgggggtcctgggccccaggatccgaattcgagatccaaaccaaggaggaaaggatatcacagaggagatcatgtctggggcccgcactgcctccacacccacccctccccagacgggaggcggtctggagcctcaagctaatggggagacgccccaggttgctgtcattgtccggccagatgaccggtcacagggagcaatcattgctgaccggccagggctgcctggcccagagcatagcccttcagaatcccagccttcgtcgccttctccgaccccatcaccatccccagtcttggaaccggggtctgagcctaatctcgcagtcctctctattcctggggacactatgacaactatacaaatgtctgtagaagaatcaacccccatctcccgtgaaactggggagccatatcgcctctctccagaacccactcctctcgccgaacccatactggaagtagaagtgacacttagcaaaccggttccagaatctgagtt

SEQ ID NO: 1557 - DNA, 5026 bp, Homo sapiens
  source 1..5026: mol_type = genomic DNA
tctagatgggggtcctgggccccagggtgtgcagccactgacttggggactgctggtggggtagggatgagggagggaggggcattgtgatgtacagggctgctctgtgagatcaagggtctcttaagggtgggagctggggcagggactacgagagcagccagatgggctgaaagtggaactcaaggggtttctggcacctacctacctgcttcccgctggggggtggggagttggcccagagtcttaagattggggcagggtggagaggtgggctcttcctgcttcccactcatcttatagctttctttccccagatccgaattcgagatccaaaccaaggaggaaaggatatcacagaggagatcatgtctggggcccgcactgcctccacacccacccctccccagacgggaggcggtctggagcctcaagctaatggggagacgccccaggttgctgtcattgtccggccagatgaccggtcacagggagcaatcattgctgaccggccagggctgcctggcccagagcatagcccttcagaatcccagccttcgtcgccttctccgaccccatcaccatccccagtcttggaaccggggtctgagcctaatctcgcagtcctctctattcctggggacactatgacaactatacaaatgtctgtagaagaatcaacccccatctcccgtgaaactggggagccatatcgcctctctccagaacccactcctctcgccgaacccatactggaagtagaagtgacacttagcaaaccggttccagaatctgagttttcttccagtcctctccaggctcccacccctttggcatctcacacagtggaaattcatgagcctaatggcatggtcccatctgaagatctggaaccagaggtggagtcaagcccagagcttgctcctcccccagcttgcccctccgaatcccctgtgcccattgctccaactgcccaacctgaggaactgctcaacggagccccctcgccaccagctgtggacttaagcccagtcagtgagccagaggagcaggccaaggaggtgacagcatcaatggcgccccccaccatcccctctgctactccagctacggctccttcagctacttccccagctcaggaggaggaaatggaagaagaagaagaagaggaagaaggagaagcaggagaagcaggagaagctgagagtgagaaaggaggagaggaactgctccccccagagagtacccctattccagccaacttgtctcagaatttggaggcagcagcagccactcaagtggcagtatctgtgccaaagaggagacggaaaattaaggagctaaataagaaggaggctgttggagaccttctggatgccttcaaggaggcgaacccggcagtaccagaggtggaaaatcagcctcctgcaggcagcaatccaggcccagagtctgagggcagtggtgtgcccccacgtcctgaggaagcagatgagacctgggactcaaaggaagacaaaattcacaatgctgagaacatccagcccggggaacagaagtatgaatataagtcagatcagtggaagcctctaaacctagaggagaaaaaacgttacgaccgtgagttcctgcttggttttcagttcatctttgccagtatgcagaagccagagggattgccacatatcagtgacgtggtgctggacaaggccaataaaacaccactgcggccactggatcccactagactacaaggcataaattgtggcccagacttcactccatcctttgccaaccttggccggacaacccttagcacccgtgggcccccaaggggtgggccaggtggggagctgccccgtgggccgcaggctggcctgggaccccggcgctctcagcagggaccccgaaaagaaccacgcaagatcattgccacagtgttaatgaccgaagatataaaactgaacaaagcagagaaagcctggaaacccagcagcaagcggacggcggctgataaggatcgaggggaagaagatgctgatggcagcaaaacccaggacctattccgcagggtgcgctccatcctgaataaactgacaccccagatgttccagcagctgatgaagcaagtgacgcagctggccatcgacaccgaggaacgcctcaaaggggtcattgacctcatttttgagaaggccatttcagagcccaacttctctgtggcctatgccaacatgtgccgctgcctcatggcgctgaaagtgcccactacggaaaagccaacagtgactgtgaacttccgaaagctgttgttgaatcgatgtcagaaggagtttgagaaagacaaagatgatgatgaggtttttgagaagaagcaaaaagagatggatgaagctgctacggcagaggaacgaggacgcctgaaggaagagctggaagaggctcgggacatagcccggcggcgctctttagggaatatcaagtttattggagagttgttcaaactgaagatgttaacagaggcaataatgcatgactgtgtggtcaaactgcttaagaaccatgatgaagagtcccttgagtgcctttgtcgtctgctcaccaccattggcaaagacctggactttgaaaaagccaagccccgaatggatcagtatttcaaccagatggaaaaaatcattaaagaaaagaagacgtcatcccgcatccgctttatgctgcaggacgtgctggatctgcgagggagcaattgggtgccacgccgaggggatcagggtcccaagaccattgaccagatccataaggaggctgagatggaagaacatcgagagcacatcaaagtgcagcagctcatggccaagggcagtgacaagcgtcggggcggtcctccaggccctcccatcagccgtggacttccccttgtggatgatggtggctggaacacagttcccatcagcaaaggtagccgccccattgacacctcacgactcaccaagatcaccaagcctggctccatcgattctaacaaccagctctttgcacctggagggcgactgagctggggcaagggcagcagcggaggctcaggagccaagccctcagacgcagcatcagaagctgctcgcccagctactagtactttgaatcgcttctcagcccttcaacaagcggtacccacagaaagcacagataatagacgtgtggtgcagaggagtagcttgagccgagaacgaggcgagaaagctggagaccgaggagaccgcctagagcggagtgaacggggaggggaccgtggggaccggcttgatcgtgcgcggacacctgctaccaagcggagcttcagcaaggaagtggaggagcggagtagagaacggccctcccagcctgaggggctgcgcaaggcagctagcctcacggaggatcgggaccgtgggcgggatgccgtgaagcgagaagctgccctacccccagtgagccccctgaaggcggctctctctgaggaggagttagagaagaaatccaaggctatcattgaggaatatctccatctcaatgacatgaaagaggcagtccagtgcgtgcaggagctggcctcaccctccttgctcttcatctttgtacggcatggtgtcgagtctacgctggagcgcagtgccattgctcgtgagcatatggggcagctgctgcaccagctgctctgtgctgggcatctgtctactgctcagtactaccaagggttgtatgaaatcttggaattggctgaggacatggaaattgacatcccccacgtgtggctctacctagcggaactggtaacacccattctgcaggaaggtggggtgcccatgggggagctgttcagggagattacaaagcctctgagaccgttgggcaaagctgcttccctgttgctggagatcctgggcctcctgtgcaaaagcatgggtcctaaaaaggtggggacgctgtggcgagaagccgggcttagctggaaggaatttctacctgaaggccaggacattggtgcattcgtcgctgaacagaaggtggagtataccctgggagaggagtcggaagcccctggccagagggcactcccctccgaggagctgaacaggcagctggagaagctgctgaaggagggcagcagtaaccagcgggtgttcgactggatagaggccaacctgagtgagcagcagatagtatccaacacgttagttcgagccctcatgacggctgtctgctattctgcaattatttttgagactcccctccgagtggacgttgcagtgctgaaagcgcgagcgaagctgctgcagaaatacctgtgtgacgagcagaaggagctacaggcgctctacgccctccaggcccttgtagtgaccttagaacagcctcccaacctgctgcggatgttctttgacgcactgtatgacgaggacgtggtgaaggaggatgccttctacagttgggagagtagcaaggaccccgctgagcagcagggcaagggtgtggcccttaaatctgtcacagccttcttcaagtggctccgtgaagcagaggaggagtctgaccacaactgagggctggtggggccggggacctggagccccatggacacacagatggcccggctagccgcctggactgcaggggggcggcagcagcggcggtggcagtgggtgcctgtagtgtgatgtgtctgaactaataaagtggctgaagaggcaggatggcttggggctgcctgggcccccctccaggatgccgccaggtgtccctctcctccccctggggcacagagatatattatatataaagtcttgaaatttggtgtgtcttggggtggggaggggcaccaacgcctgcccctggggtccttttttttattttctgaaaatcactctcgggactgccgtcctcgctgctgggggcatatgccccagcccctgtaccacccctgctgttgcctgggcagggggaagggggggcacggtgcctgtaattattaaacatgaattcaatt

SEQ ID NO: 1558 - DNA, 4668 bp, Homo sapiens
  source 1..4668: mol_type = genomic DNA
atatcacagaggagatcatgtctggggcccgcactgcctccacacccacccctccccagacgggaggcggtctggagcctcaagctaatggggagacgccccaggttgctgtcattgtccggccagatgaccggtcacagggagcaatcattgctgaccggccagggctgcctggcccagagcatagcccttcagaatcccagccttcgtcgccttctccgaccccatcaccatccccagtcttggaaccggggtctgagcctaatctcgcagtcctctctattcctggggacactatgacaactatacaaatgtctgtagaagaatcaacccccatctcccgtgaaactggggagccatatcgcctctctccagaacccactcctctcgccgaacccatactggaagtagaagtgacacttagcaaaccggttccagaatctgagttttcttccagtcctctccaggctcccacccctttggcatctcacacagtggaaattcatgagcctaatggcatggtcccatctgaagatctggaaccagaggtggagtcaagcccagagcttgctcctcccccagcttgcccctccgaatcccctgtgcccattgctccaactgcccaacctgaggaactgctcaacggagccccctcgccaccagctgtggacttaagcccagtcagtgagccagaggagcaggccaaggaggtgacagcatcaatggcgccccccaccatcccctctgctactccagctacggctccttcagctacttccccagctcaggaggaggaaatggaagaagaagaagaagaggaagaaggagaagcaggagaagcaggagaagctgagagtgagaaaggaggagaggaactgctccccccagagagtacccctattccagccaacttgtctcagaatttggaggcagcagcagccactcaagtggcagtatctgtgccaaagaggagacggaaaattaaggagctaaataagaaggaggctgttggagaccttctggatgccttcaaggaggcgaacccggcagtaccagaggtggaaaatcagcctcctgcaggcagcaatccaggcccagagtctgagggcagtggtgtgcccccacgtcctgaggaagcagatgagacctgggactcaaaggaagacaaaattcacaatgctgagaacatccagcccggggaacagaagtatgaatataagtcagatcagtggaagcctctaaacctagaggagaaaaaacgttacgaccgtgagttcctgcttggttttcagttcatctttgccagtatgcagaagccagagggattgccacatatcagtgacgtggtgctggacaaggccaataaaacaccactgcggccactggatcccactagactacaaggcataaattgtggcccagacttcactccatcctttgccaaccttggccggacaacccttagcacccgtgggcccccaaggggtgggccaggtggggagctgccccgtgggccggctggcctgggaccccggcgctctcagcagggaccccgaaaagaaccacgcaagatcattgccacagtgttaatgaccgaagatataaaactgaacaaagcagagaaagcctggaaacccagcagcaagcggacggcggctgataaggatcgaggggaagaagatgctgatggcagcaaaacccaggacctattccgcagggtgcgctccatcctgaataaactgacaccccagatgttccagcagctgatgaagcaagtgacgcagctggccatcgacaccgaggaacgcctcaaaggggtcattgacctcatttttgagaaggccatttcagagcccaacttctctgtggcctatgccaacatgtgccgctgcctcatggcgctgaaagtgcccactacggaaaagccaacagtgactgtgaacttccgaaagctgttgttgaatcgatgtcagaaggagtttgagaaagacaaagatgatgatgaggtttttgagaagaagcaaaaagagatggatgaagctgctacggcagaggaacgaggacgcctgaaggaagagctggaagaggctcgggacatagcccggcggcgctctttagggaatatcaagtttattggagagttgttcaaactgaagatgttaacagaggcaataatgcatgactgtgtggtcaaactgcttaagaaccatgatgaagagtcccttgagtgcctttgtcgtctgctcaccaccattggcaaagacctggactttgaaaaagccaagccccgaatggatcagtatttcaaccagatggaaaaaatcattaaagaaaagaagacgtcatcccgcatccgctttatgctgcaggacgtgctggatctgcgagggagcaattgggtgccacgccgaggggatcagggtcccaagaccattgaccagatccataaggaggctgagatggaagaacatcgagagcacatcaaagtgcagcagctcatggccaagggcagtgacaagcgtcggggcggtcctccaggccctcccatcagccgtggacttccccttgtggatgatggtggctggaacacagttcccatcagcaaaggtagccgccccattgacacctcacgactcaccaagatcaccaagcctggctccatcgattctaacaaccagctctttgcacctggagggcgactgagctggggcaagggcagcagcggaggctcaggagccaagccctcagacgcagcatcagaagctgctcgcccagctactagtactttgaatcgcttctcagcccttcaacaagcggtacccacagaaagcacagataatagacgtgtggtgcagaggagtagcttgagccgagaacgaggcgagaaagctggagaccgaggagaccgcctagagcggagtgaacggggaggggaccgtggggaccggcttgatcgtgcgcggacacctgctaccaagcggagcttcagcaaggaagtggaggagcggagtagagaacggccctcccagcctgaggggctgcgcaaggcagctagcctcacggaggatcgggaccgtgggcgggatgccgtgaagcgagaagctgccctacccccagtgagccccctgaaggcggctctctctgaggaggagttagagaagaaatccaaggctatcattgaggaatatctccatctcaatgacatgaaagaggcagtccagtgcgtgcaggagctggcctcaccctccttgctcttcatctttgtacggcatggtgtcgagtctacgctggagcgcagtgccattgctcgtgagcatatggggcagctgctgcaccagctgctctgtgctgggcatctgtctactgctcagtactaccaagggttgtatgaaatcttggaattggctgaggacatggaaattgacatcccccacgtgtggctctacctagcggaactggtaacacccattctgcaggaaggtggggtgcccatgggggagctgttcagggagattacaaagcctctgagaccgttgggcaaagctgcttccctgttgctggagatcctgggcctcctgtgcaaaagcatgggtcctaaaaaggtggggacgctgtggcgagaagccgggcttagctggaaggaatttctacctgaaggccaggacattggtgcattcgtcgctgaacagaaggtggagtataccctgggagaggagtcggaagcccctggccagagggcactcccctccgaggagctgaacaggcagctggagaagctgctgaaggagggcagcagtaaccagcgggtgttcgactggatagaggccaacctgagtgagcagcagatagtatccaacacgttagttcgagccctcatgacggctgtctgctattctgcaattatttttgagactcccctccgagtggacgttgcagtgctgaaagcgcgagcgaagctgctgcagaaatacctgtgtgacgagcagaaggagctacaggcgctctacgccctccaggcccttgtagtgaccttagaacagcctcccaacctgctgcggatgttctttgacgcactgtatgacgaggacgtggtgaaggaggatgccttctacagttgggagagtagcaaggaccccgctgagcagcagggcaagggtgtggcccttaaatctgtcacagccttcttcaagtggctccgtgaagcagaggaggagtctgaccacaactgagggctggtggggccggggacctggagccccatggacacacagatggcccggctagccgcctggactgcaggggggcggcagcagcggcggtggcagtgggtgcctgtagtgtgatgtgtctgaactaataaagtggctgaagaggcaggatggcttggggctgcctgggcccccctccaggatgccgccaggtgtccctctcctccccctggggcacagagatatattatatataaagtcttgaaatttggtgtgtcttggggtggggaggggcaccaacgcctgcccctggggtccttttttttattttctgaaaatcactctcgggactgccgtcctcgctgctgggggcatatgccccagcccctgtaccacccctgctgttgcctgggcagggggaagggggggcacggtgcctgtaattattaaacatgaattc

SEQ ID NO: 1559 - DNA, 4311 bp, Homo sapiens
  source 1..4311: mol_type = genomic DNA
atgaaccagccaccccagattgctcccaagagggagcgtaagacgatccgaattcgagatccaaaccaaggaggaaaggatatcacagaggagatcatgtctggggcccgcactgcctccacacccacccctccccagacgggaggcggtctggagcctcaagctaatggggagacgccccaggttgctgtcattgtccggccagatgaccggtcacagggagcaatcattgctgaccggccagggctgcctggcccagagcatagcccttcagaatcccagccttcgtcgccttctccgaccccatcaccatccccagtcttggaaccggggtctgagcctaatctcgcagtcctctctattcctggggacactatgacaactatacaaatgtctgtagaagaatcaacccccatctcccgtgaaactggggagccatatcgcctctctccagaacccactcctctcgccgaacccatactggaagtagaagtgacacttagcaaaccggttccagaatctgagttttcttccagtcctctccaggctcccacccctttggcatctcacacagtggaaattcatgagcctaatggcatggtcccatctgaagatctggaaccagaggtggagtcaagcccagagcttgctcctcccccagcttgcccctccgaatcccctgtgcccattgctccaactgcccaacctgaggaactgctcaacggagccccctcgccaccagctgtggacttaagcccagtcagtgagccagaggagcaggccaaggaggtgacagcatcaatggcgccccccaccatcccctctgctactccagctacggctccttcagctacttccccagctcaggaggaggaaatggaagaagaagaagaagaggaagaaggagaagcaggagaagcaggagaagctgagagtgagaaaggaggagaggaactgctccccccagagagtacccctattccagccaacttgtctcagaatttggaggcagcagcagccactcaagtggcagtatctgtgccaaagaggagacggaaaattaaggagctaaataagaaggaggctgttggagaccttctggatgccttcaaggaggcgaacccggcagtaccagaggtggaaaatcagcctcctgcaggcagcaatccaggcccagagtctgagggcagtggtgtgcccccacgtcctgaggaagcagatgagacctgggactcaaaggaagacaaaattcacaatgctgagaacatccagcccggggaacagaagtatgaatataagtcagatcagtggaagcctctaaacctagaggagaaaaaacgttacgaccgtgagttcctgcttggttttcagttcatctttgccagtatgcagaagccagagggattgccacatatcagtgacgtggtgctggacaaggccaataaaacaccactgcggccactggatcccactagactacaaggcataaattgtggcccagacttcactccatcctttgccaaccttggccggacaacccttagcacccgtgggcccccaaggggtgggccaggtggggagctgccccgtgggccgcaggctggcctgggaccccggcgctctcagcagggaccccgaaaagaaccacgcaagatcattgccacagtgttaatgaccgaagatataaaactgaacaaagcagagaaagcctggaaacccagcagcaagcggacggcggctgataaggatcgaggggaagaagatgctgatggcagcaaaacccaggacctattccgcagggtgcgctccatcctgaataaactgacaccccagatgttccagcagctgatgaagcaagtgacgcagctggccatcgacaccgaggaacgcctcaaaggggtcattgacctcatttttgagaaggccatttcagagcccaacttctctgtggcctatgccaacatgtgccgctgcctcatggcgctgaaagtgcccactacggaaaagccaacagtgactgtgaacttccgaaagctgttgttgaatcgatgtcagaaggagtttgagaaagacaaagatgatgatgaggtttttgagaagaagcaaaaagagatggatgaagctgctacggcagaggaacgaggacgcctgaaggaagagctggaagaggctcgggacatagcccggcggcgctctttagggaatatcaagtttattggagagttgttcaaactgaagatgttaacagaggcaataatgcatgactgtgtggtcaaactgcttaagaaccatgatgaagagtcccttgagtgcctttgtcgtctgctcaccaccattggcaaagacctggactttgaaaaagccaagccccgaatggatcagtatttcaaccagatggaaaaaatcattaaagaaaagaagacgtcatcccgcatccgctttatgctgcaggacgtgctggatctgcgagggagcaattgggtgccacgccgaggggatcagggtcccaagaccattgaccagatccataaggaggctgagatggaagaacatcgagagcacatcaaagtgcagcagctcatggccaagggcagtgacaagcgtcggggcggtcctccaggccctcccatcagccgtggacttccccttgtggatgatggtggctggaacacagttcccatcagcaaaggtagccgccccattgacacctcacgactcaccaagatcaccaagcctggctccatcgattctaacaaccagctctttgcacctggagggcgactgagctggggcaagggcagcagcggaggctcaggagccaagccctcagacgcagcatcagaagctgctcgcccagctactagtactttgaatcgcttctcagcccttcaacaagcggtacccacagaaagcacagataatagacgtgtggtgcagaggagtagcttgagccgagaacgaggcgagaaagctggagaccgaggagaccgcctagagcggagtgaacggggaggggaccgtggggaccggcttgatcgtgcgcggacacctgctaccaagcggagcttcagcaaggaagtggaggagcggagtagagaacggccctcccagcctgaggggctgcgcaaggcagctagcctcacggaggatcgggaccgtgggcgggatgccgtgaagcgagaagctgccctacccccagtgagccccctgaaggcggctctctctgaggaggagttagagaagaaatccaaggctatcattgaggaatatctccatctcaatgacatgaaagaggcagtccagtgcgtgcaggagctggcctcaccctccttgctcttcatctttgtacggcatggtgtcgagtctacgctggagcgcagtgccattgctcgtgagcatatggggcagctgctgcaccagctgctctgtgctgggcatctgtctactgctcagtactaccaagggttgtatgaaatcttggaattggctgaggacatggaaattgacatcccccacgtgtggctctacctagcggaactggtaacacccattctgcaggaaggtggggtgcccatgggggagctgttcagggagattacaaagcctctgagaccgttgggcaaagctgcttccctgttgctggagatcctgggcctcctgtgcaaaagcatgggtcctaaaaaggtggggacgctgtggcgagaagccgggcttagctggaaggaatttctacctgaaggccaggacattggtgcattcgtcgctgaacagaaggtggagtataccctgggagaggagtcggaagcccctggccagagggcactcccctccgaggagctgaacaggcagctggagaagctgctgaaggagggcagcagtaaccagcgggtgttcgactggatagaggccaacctgagtgagcagcagatagtatccaacacgttagttcgagccctcatgacggctgtctgctattctgcaattatttttgagactcccctccgagtggacgttgcagtgctgaaagcgcgagcgaagctgctgcagaaatacctgtgtgacgagcagaaggagctacaggcgctctacgccctccaggcccttgtagtgaccttagaacagcctcccaacctgctgcggatgttctttgacgcactgtatgacgaggacgtggtgaaggaggatgccttctacagttgggagagtagcaaggaccccgctgagcagcagggcaagggtgtggcccttaaatctgtcacagccttcttcaagtggctccgtgaagcagaggaggagtctgaccacaactga

SEQ ID NO: 1560 - DNA, 558 bp, Homo sapiens
  source 1..558: mol_type = genomic DNA
gccggctgcgcctgcggagaagcggtggccgccgagcgggatctgtgcggggagccggaaatggttgtggactacgtctgtgcggctgcgtggggctcggccgcgcggactgaaggagactgaagatccgaattcgagatccaaaccaaggaggaaaggatatcacagaggagatcatgtctggggcccgcactgcctccacacccacccctccccagacgggaggcggtctggagcctcaagctaatggggagacgccccaggttgctgtcattgtccggccagatgaccggtcacagggagcaatcattgctgaccggccagggctgcctggcccagagcatagcccttcagaatcccagccttcgtcgccttctccgaccccatcaccatccccagtcttggaaccggggtctgagcctaatctcgcagtcctctctattcctggggacactatgacaactatacaaatgtctgtagaagaatcaacccccatctcccgtgaaactggggagccatatcgcctctctccagaacccactcctctcgccgaaccca

SEQ ID NO: 1561 - DNA, 542 bp, Homo sapiens
  source 1..542: mol_type = genomic DNA
aaatggttgtggactacgtctgtgcggctgcgtggggctcggccgcgcggactgaaggagactgaaggtgctggggggaccctgatgtggcaccaaatgaaatgaacaaagctccacagtccacaggccccccacccgccccatcccccggactcccacagcttgggtttctgccccacctgggcttcccctcttgctgaactctggtctcccctcttcagccagcgtttcccccggggcagacagcgccggtggtgttcagtacgccacaagcgacacaaatgaacacgccttctcagccccgccagcacttctaccctagccgggcccagcccccgagcagtgcagcctcccgagtgcagagtgcagcccctgcccgccctggcccagctgcccatgtctaccctgctggatcccaagtaatgatgatcccttcccagatctcctacccagcctcccagggggcctactacatccctggacaggggcgttccacatacgttgtcccgacacagcagtaccctgtgcagccaggagcccca

SEQ ID NO: 1562 - DNA, 983 bp, Homo sapiens
  source 1..983: mol_type = genomic DNA
ctacgagagcagccagatgggctgaaagtggaactcaaggggtttctggcacctacctacctgcttcccgctgggggatccgaattcgagatccaaaccaaggaggaaaggatatcacagaggagatcatgtctggggcccgcactgcctccacacccacccctccccagacgggaggcggtctggagcctcaagctaatggggagacgccccaggttgctgtcattgtccggccagatgaccggtcacagggagcaatcattgctgaccggccagggctgcctggcccagagcatagcccttcagaatcccagccttcgtcgccttctccgaccccatcaccatccccagtcttggaaccggggtctgagcctaatctcgcagtcctctctattcctggggacactatgacaactatacaaatgtctgtagaagaatcaacccccatctcccgtgaaactggggagccatatcgcctctctccagaacccactcctctcgccgaacccatactggaagtagaagtgacacttagcaaaccggttccagaatctgagttttcttccagtcctctccaggctcccacccctttggcatctcacacagtggaaattcatgagcctaatggcatggtcccatctgaagatctggaaccagaggtggagtcaagcccagagcttgctcctcccccagcttgcccctccgaatcccctgtgcccattgctccaactgcccaacctgaggaactgctcaacggagccccctcgccaccagctgtggacttaagcccagtcagtgagccagaggagcaggccaaggaggtgacagcatcaatggcgccccccaccatcccctctgctactccagctacggctccttcagctacttccccagctcaggaggaggaaatggaagaagaagaagaagaggaagaaggagaagcaggagaagcaggagaagctgagagtgagaaaggaggagag

SEQ ID NO: 1563 - DNA, 4148 bp, Homo sapiens
  source 1..4148: mol_type = genomic DNA
tcttccggcaggaagtctgtgcgtcaggaggccggccaggactcagctccagccccgcgctcgcgtgtagccctacgtaaagcgtgaggggtttcgcgacaacccaggccccgcccctttggccacatgtcgcgcatgtcttcccgtcggacggcgtgccacctcgccgcgcagctttacgaacctagagcagcgccgccccgcctcctgtctccgtcctcacctccccgccccctcccagcttcgcgtctcctagctcgacgcgcccgctataatcacgtgattgcctcatccgggtcttttgcgttctctttccctctcccaacatggcggcctcagcaaaaaagaagaataagaaggggaagactatctccctaacagactttctggctgaggatgggggtactggtggaggaagcacctatgtttccaaaccagtcagctgggctgatgaaacggatgacctggaaggagatgtttcgaccacttggcacagtaacgatgacgatgtgtatagggcgcctccaattgaccgttccatccttcccactgctccacgggctgctcgggaacccaatatcgaccggagccgtcttcccaaatcgccaccctacactgcttttctaggaaacctaccctatgatgttacagaagagtcaattaaggaattctttcgaggattaaatatcagtgcagtgcgtttaccacgtgaacccagcaatccagagaggttgaaaggttttggttatgctgaatttgaggacctggattccctgctcagtgccctgagtctcaatgaagagtctctaggtaacaggagaattcgagtggacgttgctgatcaagcacaggataaagacagggatgatcgttcttttggccgtgatagaaatcgggattctgacaaaacagatacagactggagggctcgtcctgctacagacagctttgatgactacccacctagaagaggtgatgatagctttggagacaagtatcgagatcgttatgattcagaccggtatcgggatgggtatcgggatgggtatcgggatggcccacgccgggatatggatcgatatggtggccgggatcgctatgatgaccgaggcagcagagactatgatagaggctatgattcccggataggcagtggcagaagagcatttggcagtgggtatcgcagggatgatgactacagaggaggcggggaccgctatgaagaccgatatgacagacgggatgatcggtcgtggagctccagagatgattactctcgggatgattataggcgtgatgatagaggtcccccccaaagacccaaactgaatctaaagcctcggagtactcctaaggaagatgattcctctgctagtacctcccagtccactcgagctgcttctatctttggaggggcaaagcctgttgacacagctgctagagaaagagaagtagaagaacggctacagaaggaacaagagaagttgcagcgtcagctggatgagccaaaactagaacgacggcctcgggagagacacccaagctggcgaagtgaagaaactcaggaacgggaacggtcgaggacaggaagtgagtcatcacaaactgggacctccaccacatctagcagaaatgcacgaaggagagagagtgagaagtctctagaaaatgaaacactcaataaggaggaagattgccactctccaacttctaaacctcccaaacctgatcagcccctaaaggtaatgccagcccctccaccaaaggagaatgcttgggtgaagcgaagttctaaccctcctgctcgatctcagagctcagacacagagcagcagtcccctacaagtggtgggggaaaagtagctccagctcaaccatctgaggaaggaccaggaaggaaagatgaaaataaagtagatgggatgaatgccccaaaaggccaaactgggaactctagccgtggtccaggcgacggagggaacagagaccactggaaggagtcagataggaaagatggcaaaaaggatcaagactccagatctgcacctgagccaaagaaacctgaggaaaatccagcttccaagttcagttctgcaagcaagtatgctgctctctctgttgatggtgaagatgaaaatgagggagaagattatgccgaatagacctctacatcctgtgcttttctcctagtttctctccaccctggaacattcgagagcaaatcaaaacctctatccagacaagacaaaataaaactcaccatctcctgaagacctttcttacctttttttaaaaacaaaaaatgaaattattttgcatgctgctgcagcctttaaagtattgaagtaactggagaattgccaatacagccagagagaaagggactacagctttttagaggaaaagttgtggtgcgttatgtcaccatgcagttgccagtgtgattagtgcctaggggtctccatttagcagaaatggtaatgacagtgatataatgcctggaacctggttgggcagtaggggagggaggtagaaggaaaagtgtgagatttctaccttttagtttttatcctattgtggcatatatgaattctcaaacattatctgaataaattttccactcttggaaaggtagatttagcctcaagttgttctagtctccaggaggctgccagcccctcctcttatttaattctgagttttgggggccagcctagagggaattccttttttttttttaaccccccaggggggtagttgggagtgagactataggccataaagaatgggactgcattggaccaaaataaatgggaaaatcgtggtttgaaaagaagcttttgggaagtgatgagtcattttgcaccaggtaataggggaaaattgtgtgacctccagcaaacacatgaatggttatttcctggagccggaagcacttgggggtcgtggtaattcccagtgttttctgtgtcctagttttaccctttctaaacactgtcctttttgaaagttttgaatatatccacattctattgaaaccttgaaactaaaaatttagactcttatcatcatcttaagttcttcatgctactcttaacctcccaaaaagcagtatctaagtcacatacatgatgtcttgggcattttctcagccatggagaactctgaaaggaagaatcgctgcttttctcaagcaaatcggtttcttgatgtcttttggttctccttgcctgctcctgatgcttggaccccttttattgatcagagtgctctagaataatggatggtcttggatgatggataaatagggacagggacagttaaattgggagcctttcttacaaccttgatgggatttttccccccaagtttccttctccactgaaatgccacactaatgcttgttggattcatgaggtggccagaccaatgtgttgttttgttgttgtttttttaagcttcccttgagagaataaatggtaatggagagaactatttaacaaggtcctggtttctcttgcaacacagtagctaaacttgcctgcttttatatgcatttttgtagggatcagcttggtagacagtattagcggagaaacaccttgatcttggtttgcaagcccttctcccatcagtcctagattaggccctgttcagccatgcaggggtgttggtttatgcgtgctgcagcagtgggcataatgaatataatttacccagtggacaaaggtgtgtaccaagtgaatttaaataattggtgtggattggccagtagctaagaagtgggcttttaaagagtattgaagattgaaagggtttttctttcttttttaaaaaagaaaaacaaactattgattgtagataatgaaaagctagggtttgccctcttcatgtctactctccttccaaatagttatatccaaaactgtttttccctctcccctaccttgtcccccctattaaaatagaaacagggattgattaatgtcccgctcctgaatacatgtaaaatttgtacaaaaatatcttctatgaaaatgatttgtaatctgtagacttattacctgggagatgtcttgatgtaaaatcccatcctttgggttgtgggttttttgttttctccaaataaatctgatctttaaagttca

SEQ ID NO: 1564 - DNA, 1899 bp, Homo sapiens
  source 1..1899: mol_type = genomic DNA
cttttgcgttctctttccctctcccaacatggcggcctcagcaaaaaagaagaataagaaggggaagactatctccctaacagactttctggctgaggatgggggtactggtggaggaagcacctatgtttccaaaccagtcagctgggctgatgaaacggatgacctggaaggagatgtttcgaccacttggcacagtaacgatgacgatgtgtatagggcgcctccaattgaccgttccatccttcccactgctccacgggctgctcgggaacccaatatcgaccggagccgtcttcccaaatcgccaccctacactgcttttctaggaaacctaccctatgatgttacagaagagtcaattaaggaattctttcgaggattaaatatcagtgcagtgcgtttaccacgtgaacccagcaatccagagaggttgaaaggttttggttatgctgaatttgaggacctggattccctgctcagtgccctgagtctcaatgaagagtctctaggtaacaggagaattcgagtggacgttgctgatcaagcacaggataaagacagggatgatcgttcttttggccgtgatagaaatcgggattctgacaaaacagatacagactggagggctcgtcctgctacagacagctttgatgactacccacctagaagaggtgatgatagctttggagacaagtatcgagatcgatatggtggccgggatcgctatgatgaccgaggcagcagagactatgatagaggctatgattcccggataggcagtggcagaagagcatttggcagtgggtatcgcagggatgatgactacagaggaggcggggaccgctatgaagaccgatatgacagacgggatgatcggtcgtggagctccagagatgattactctcgggatgattataggcgtgatgatagaggtcccccccaaagacccaaactgaatctaaagcctcggagtactcctaaggaagatgattcctctgctagtacctcccagtccactcgagctgcttctatctttggaggggcaaagcctgttgacacagctgctagagaaagagaagtagaagaacggctacagaaggaacaagagaagttgcagcgtcagctggatgagccaaaactagaacgacggcctcgggagagacacccaagctggcgaagtgaagaaactcaggaacgggaacggtcgaggacaggaagtgagtcatcacaaactgggacctccaccacatctagcagaaatgcacgaaggagagagagtgagaagtctctagaaaatgaaacactcaataaggaggaagattgccactctccaacttctaaacctcccaaacctgatcagcccctaaaggtaatgccagcccctccaccaaaggagaatgcttgggtgaagcgaagttctaaccctcctgctcgatctcagagctcagacacagagcagcagtcccctacaagtggtgggggaaaagtagctccagctcaaccatctgaggaaggaccaggaaggaaagatgaaaataaagtagatgggatgaatgccccaaaaggccaaactgggaactctagccgtggtccaggcgacggagggaacagagaccactggaaggagtcagataggaaagatggcaaaaaggatcaagactccagatctgcacctgagccaaagaaacctgaggaaaatccagcttccaagttcagttctgcaagcaagtatgctgctctctctgttgatggtgaagatgaaaatgagggagaagattatgccgaatagacctctacatcctgtgcttttctcctagtttctctccaccctggaacattcgagagcaaatcaaaacctctatccagacaagacaaaataaaactcaccatctcctg

SEQ ID NO: 1565 - DNA, 1097 bp, Homo sapiens
  source 1..1097: mol_type = genomic DNA
gagtattgcctttggcccccacccccacgggtccccgcgctccgtcttccttctgactgggggactccgcgggacggcgttcccggcgcgcactgtaccccttgccgccccttccccttcatgttggacctgacctcccgcggacaagtggggacgtcccggaggatggccgaggcggcgtgtagcgcacactttctggaaaccacccctactcctaatcccccgactacagaagaggagaaaacggaatctaatcaggaggttgctaacccagaacactatattaaacatcccctacagaacagatgggcactctggttttttaaaaatgataaaagcaaaacttggcaagcaaacctgcggctgatctccaagtttgatactgttgaagacttttgggctctgtacaaccatatccagttgtctagtaatttaatgcctggctgtgactactcactttttaaggatggtattgagcctatgtgggaagatgagaaaaacaaacggggaggacgatggctaattacattgaacaaacagcagagacgaagtgacctcgatcgcttttggctagagacacttctgtgccttattggagaatcttttgatgactacagtgatgatgtatgtggcgctgttgttaatgttagagctaaaggtgataagatagcaatatggactactgaatgtgaaaacagagaagctgttacacatatagggagggtatacaaggaaaggttaggacttcctccaaagatagtgattggttatcagtcccacgcagacacagctactaagagcggctccaccactaaaaataggtttgttgtttaagaagacaccttctgagtattctcataggagactgcgtcaagcaatcgagatttgggagctgaaccaaagcctcttcaaaaagcagagtggactgcatttaaatttgatttccatcttaatgttactcagatataagagaagtctcattcgcctttgtcttgtacttctgtgttcatttttttttttttttttggctagagtttccactatcccaatcaaagaattacagtacacatccccagaatccataaatgtgttcctgg

SEQ ID NO: 1566 - DNA, 11523 bp, Homo sapiens
  source 1..11523: mol_type = genomic DNA
aggcacaggcagcctgcatacactccttttcctggtgtcaacattatttaaaagcatgggaaatagtaatgagacagtgtcttcttcattagaaccttaggagtctactagatttcttcatctctatttgttgttattagtagccaaactgtgcaaaaaacacggtcttgagaaatgacagcacagtatcttagagggaaaggaaatgtaggatgccagtgtggggacaaatttctgattgccagtgattgttgtgagcataacaataatttcatgaacattaaagcctctattgagggcagctgcagttgtaaaggaaaaaaaatggtcctgaacatttaaaactacactggtgtacatcataatcaaacaaagtaaacagaaaaaaatttaaactttgctaaaaaaaaaaagcagaagcacttgatctttaggaaggcacgcagttgcttattatgaatcatttctagagtccgatgcattttcaaagccggttacagtcattacgaagcacacccttgtgaggtaagtgtatcatcacctttggttcataaataaaaaagctgagacgccgagcgattaagtcactcgcctaaggagaatgagtcaacgtcaagagtcatagttgacccggcctaaagactccagaccatcagtccagggcttagtcagcggggcccggagtggcttccctggctggcatctggacttaggctatttccgtgcacgtaaaagcggaatattggaacggttgcacagaacttccaaataatttttaccgccacgcaagatttagccctgaggtcttaatctcaggatttgggacagtaaaagctgtcgtccctccccctcgtccagccggtggcaagcgggtactgcgggcggttccgtccgtcccctttcgcagaaatggcaacgaatgaccaccagcattagctgagccaggggacgtgggagggttgattgcctaaacgactctgcatcgccgcctctttttgaaactaagagaaaatggtgggagatcaaaagaaaactaaataaacacacaggcaacttgtcctgggacctcaactaagcaaatgaagccttattgtgtgtgctgagcctgcagttcccaaccttccggggaagatgggaggacagggcgacaaagggcacagtaggcttgcctggcagtaagtgtgaccgcagctatccaggcggaagagcagaggactgaaaccaccctccagcaagcgagtgtccgccgcgttgagaaccgcgcaccctacccatcggccacgtgaccagtcctttttaaaaaaaatttctttaccttaaaaaaaaaaaaaaaaaaaaggtgggggagagactccacttcccagaagcctctcgttactcacgcagccgcagtcttgcgcaggtgccgccagggccaaacggacatatccgtcacgtggccagaagctggccaatccggtttgaatctcatttttttcctcttacccccccttctggagcggttgtgcgatcagatcgatctaagatggcgactgtcgaaccggaaaccacccctactcctaatcccccgactacagaagaggagaaaacggaatctaatcaggaggttgctaacccagaacactatattaaacatcccctacagaacagatgggcactctggttttttaaaaatgataaaagcaaaacttggcaagcaaacctgcggctgatctccaagtttgatactgttgaagacttttgggctctgtacaaccatatccagttgtctagtaatttaatgcctggctgtgactactcactttttaaggatggtattgagcctatgtgggaagatgagaaaaacaaacggggaggacgatggctaattacattgaacaaacagcagagacgaagtgacctcgatcgcttttggctagagacacttctgtgccttattggagaatcttttgatgactacagtgatgatgtatgtggcgctgttgttaatgttagagctaaaggtgataagatagcaatatggactactgaatgtgaaaacagagaagctgttacacatatagggagggtatacaaggaaaggttaggacttcctccaaagatagtgattggttatcagtcccacgcagacacagctactaagagcggctccaccactaaaaataggtttgttgtttaagaagacaccttctgagtattctcataggagactgcgtcaagcaatcgagatttgggagctgaaccaaagcctcttcaaaaagcagagtggactgcatttaaatttgatttccatcttaatgttactcagatataagagaagtctcattcgcctttgtcttgtacttctgtgttcatttttttttttttttttggctagagtttccactatcccaatcaaagaattacagtacacatccccagaatccataaatgtgttcctggcccactctgtaatagttcagtagaattaccattaattacatacagattttacctatccacaatagtcagaaaacaacttggcatttctatactttacaggaaaaaaaattctgttgttccattttatgcagaagcatattttgctggtttgaaagattatgatgcatacagttttctagcaattttctttgtttctttttacagcattgtctttgctgtactcttgctgatggctgctagattttaatttatttgtttccctacttgataatattagtgattctgatttcagtttttcatttgttttgcttttgtttttttcctcatgtaacattggtgaaggatccaggaatatgacacaaaggtggaataaacattaattttgtgcattctttggtaattttttttgttttttgtaactacaaagctttgctacaaatttatgcatttcattcaaatcagtgatctatgtttgtgtgatttcctaaacataattgtggattataaaaaatgtaacatcataattacattcctaactagaattagtatgtctgtttttgtatctttatgctgtattttaacactttgtattacttaggttattttgctttggttaaaaatggctcaagtagaaaagcagtcccattcatattaagacagtgtacaaaactgtaaataaaatgtgtacagtgaattgtcttttagacaactagatttgtccttttatttctccatctttatagaaggaatttgtacttcttattgcaaggcagtctctatattatgtcttcttttgtggtgtcttccatgtgaacagcataagtttggagcactagtttgattattatgtttattacaatttttaataaattgaataggtagtatcatatatatggaattaaattgatgtggctatctttgtttttttataaagtaaggcacagtcattcagtcttaggtaaataatgtactctcttaatatgttaatactcatgagaattgggatctgatgcatcaccatttgattggtagcaacagtggttgtaaaacttggttgctgaattgagttgtttctatgttaagtgtcaaaatgatagtgtagggaaagtacaggtggtggggacatatgcattaagaatcttgttagtgttgcaatctaaatagaatggaataaacaggtgttaagacatatttatagtggtaaattgttgtagtatggtattctgtaaacttgaaaacttgatctactctttgtaggtatcatttgaaagcaaacttgaaaatgttttgtacatagtacatacttgtatagtcctgtgagatgaagtatggctatcagaccaaaggataagccaaactgtaggtagcagaatggaaattattattttgagaggaaaatttgtctttgaatggtgattatgacttaatcattttaaaactgataaacttgacaaaaaccctgtatgaaataaacatgaaattaatagcactgatttcattgtaaaattttaaagcagtttaaagggtaccacaggttatcacagtactctcaatgccacaaacacctcttgttcagtattctagaaatactgaatcagaattctgtgtttattataatctcagcatactgtacataatatctgctagttaaacttgggtaattggttaaggtgacttactgtctatgtcaatatgtatagttttgagtacttcaagagtttacttaaaagtgatgatgttactggtatgttggcagtgggtgggactgaagtagtgtatctattataaattgatctattttcttaattctaagatgaagtccaattttaagcatcagcttttaggtgcaaaggaggaattaacacattaaatgtatacagttctaaatttttgaaataactgatgtgtagcatttgattattggtattaccattttagaatcatgatgttattttaaacctttttcctggggacaagaaaggataataaattacgctgaatcacttttggcagttgccacttaaatagtacagtgacttgcaacttttataactttatcagcatcttctctaaatacaaaattaggctatatgttattttccaacttactgttttctctctgtttagcaggatattataaatagattaaatagatatattttctttttttttttttttttttgagacggagtctcgctttgtctcccaggctggagtgcagtggcgtgatctcccagtagctgggactacaagcacctgccaccatgcccggctaattttttttgtatttttagtagagacggggtttcactgtgttagccaagatggtctcaatctcctgactttgtgatctgcctgcttctgcctcccaaagtgctgggattacaggtgtgagccaccgtacccagcccaaatagatgtattttcataatagagaattgaaataggctttaatgggtgaatagcagtttattgtaggcatgtgacatttcatttaatgaatttaaagtttattatcccaattctacagaaggatttaatgcatactatgcaattaaataattataacactacatagtaataatttatgtgccaggcagtagttcagtcactttacatgcttattaacctgcagaataatcttttgagatgtaggtgctgttactgagaatttaacttttgcttgtaaattgcaaagggtggatttgaattctggaaatttggttccagagacaataattacataacactttctccatagggtacagcctgtctaataggctatagtaaatcacctcagcttgttataggtcgggcatgcaaacatttctccattttactccctttggtaatgaatctagtaatagatggaaattttccctagattcactgtgttagtcagttggggaagtttggaggcaaagatacaggagtttatggggaggtagtgtacataaatataatcatatgctatataaggaagttttggtcagcagcagaccatatataggatggtgggccagtaacattgtaacactgtatttttactgtatcttttccatgttttgttatgtttagatacacaaataacattatggagtattcagtatggtaacatgccatacaggtttgtagcctaggagcagtaatagactgttccctgaaacctatatttgtggtaggtttataccattcaggtttgtgtaagtacacaacgaaatcatctaatggcccatttctcaaaacatattcccatcattaatcaatgcatggtcatgttttcgtatacattttaagcttctgtattctaatctaatataaatggcaaaatattcaaactgataggcattgagattcttaaatgctaaagttgcattcaaaaggataattttaggcgttgtgacaaagcagtgttatattttaaagttagtgacaaggctatgcaccttttatctctaattgtttcttacagaatgtttttattattgagtagtaaaacaataaatgtcagatcctttatacaaattcaagattgacattgataaacaaaacttcagcatatcactcaaggtcagcgtagaaattgtgtgtctggaaacttctatagtaattttatattactgtgacattagtatgtgatcacttttctagtaatgttttaaaaaaatatatcttacaggccaggcatagtgctttatgcctgtaatcccagcactttgggaggccaaggtggcaggattgcatgagtccaggagttcaacaccagtctgggcaataaagtgagaccccatcgctacaaacaaattaaaaaatatttatgtatgtgtgtaatatatataatatataacaaaacacatatgtatgtgtatatatagtatgtctggcagagtacaatttaggggttaagactggtccctcacatatggtgtgagaaacactgttcacaggttgctttccccattagcccagggcaactcatttgcccatcatttcctagaacaaccgggtctgttacgtctacagttttcatcttcatgcagttatggatttggtgtcaaaaactttggtcctgttctctaccatcttaaaataaactcttgtgtcctgctttactatgaattgcaaagtaggcattaggtagccttcctactaccatagtttagagttcaatattcttatgaccattctactggtagaagcaaaaaatgaacttgtaggcatgtgatcacatgtgcctatggtgctgtcttttccagtacaggggaactaattttcatattttaatcttgcagctttttgtttacttcatgcattgtgatttctcatagttttgcacagaactcacttccctaccttttctgaaacaaaagtatgtatacacacatacatatgtattgagcacctctatttactgtgttccacgtgctgggcatatagcaagaacagaatggtctggggccctgctctaaagaagatttaaaagcaaacatatattaaaaatgcgtgagtctggccaggagcagtggctcatgcctgcaaccccagcactttgggaggctgaagcgggtgaatcacctgagatcaggagttgagaccagcctggccaacatggtgaaaccccgtctctactaaaaatacaaaaattagcctggcatggtggcatgcgcctgtaattccagctactttggagactgagacaggagaatcacttgagcccaggaagtggaggttgcagtgagctgagatcgcgccactgcactccagcctgggtgacagagcaagactccatctcaaaaaaaaaaaaaaaacgtgtctgttcataaggttctacaaatagctgttgttacagaaaataggactagggttttattactggggattatgcagtcgaggtaaatataaaatgaggttgtttcttcttttttttatttgagacagagtcttgtttgccaggctggagtgcagtggcgtgctcttagctccgcctcccgggatcaaacgattctcttgcctcagcctctcgagtagctgggactacaggcgcgtgccaccacacccagctgatttttgtatttttagtagagatgggatttcaccatgatggccaggatggtctcgatcttttgacctcatgatccacccacctcggcctcccaaagtgctgggattacaggcgtgagccactgcacccggccctggttctaaatactcttccagctctaaaacattgattctaaacagatcacattccaggaggactctagcaaaccagcatatgcaaattatagcttttgcaagaccgtttctacttttatattactgaactctatatgattgtccaagtaaagttttgtgtctctttgattatttgattgtactttaaaattttttcaccattcatttaacattttttaccatactgtagtatttttaatgcaattgtgtttgcattggtgtggctttagaggcttctccaaccaccttcccaaaatactgatctgtgatttttttctttaatgtttggccaaacataatacatgcttattttatttttcatccctacagaaaggtagaagatgagaattctgtctcctactgttgtttttcaaggtgccactcaaatttcttgtacgtgtctagaaacttgtgcatacaatagaagtacactgtggctgggcatggtggctcatgcctgtaatcccagcactttgtgaagctgaggtgggtggatcacctgaggtcagggagtttgagaccagcctggccaacatgatgaaaccccgtctttactaaaattagaaaaaattagccaggcgtggtggtgtgcgcctgtaatcccagctactcgggaggctgaggcatgagaatcacttgaactcgggtggcagaggctgcagtgagctgagatcatgccactgcattccagcctgcgcagctgagccagactccatctccaaaaaaaaaaaaaaaaaaaaaaaaagatgtccaatatatgtaacttttttctttggacacaaaaattccattagctttgttttctcatttttacttgtcatgatgtatgtcgaacacattatttttagtgtctggtgttccattatacagatgtctctcttgttggttgaatttttgcattcacagaccctcaagttggattcatatctttttacactaagcataaagaagacggattggggtcgggtatggtggctcacgcctgtaatcccagcacttcgggaggctgaggtgggcggatcacgaggtcaggagttcgagaccagcctggccaacatactgaaaccccgtctctaaaaatatgaaaaaaaaattagccaggcgtggtggtgcgcagctgtagccccagctacttgggaggctgaggcaggagaatcacttgaacccaggaggtggaggttgcagtgagcatattgcaccattgcattccagcctgcacgacagaggaagacgccatttcaaaaaaaaaaaaaaaaagacggattgattttcttcagcagtatcaagtggcacttaccatccacccctttaacacccaaaccattctaatccatgtatacagaccatcatctgtttcgttattgtgttctataatgcagctttgcgagttatgcagttttggtcctcatgatatttttctgattggtttttaatgtattttgttctaacgagccaacattgttatacatgtaatttgtttatttgctagattgtactctttcccaaagatgggctatgaactagcatctactttcattttacctatttacctgtaaacattgaaaaaactgaatcaaatgcagtgatatcggacctagttttattgttatgccttataatgaatttaacttcacagttttctaaatgagagcatttcccaaagacatctttatggtcataaccagtttcccttggcatttgatttatttttatttttatttatttatctttttgagaaggagtttcgctcttgttgcccaggctagagtgcaatggcgtgatctcgggtcactgcaacctctgcctcccgggttcaagcgattctcctgcctcagcctccaagtagctgggattacaggcatgcaccaccacgcccgactaatttgtatttttagagacggggtttctccgtgttggtcaggctggtctcaaacttccaacctcaggtgatccgcccgccgtggcctcccaaagtgttgggattacaggcgtgagccacagtgtctggcctgatttgtttttaagagcattatttttctgctttattttgtgacttcaacatttgacacaattttgggtgaatggtttgtgcatggtgcctgacatcgtgttttgatgtgtagtatatgccataggacatgtgagacaagatatgtcccaacttgaccttgttttgtattgtttatgtcaaggtgttgagtgtattagatatactgttggggctctgtgttctagctctgccttttagataataaccatggttaaatattgcaatgtcctgcatgtctccacacatgggttttgtaactgagtcagaatgataagtgattagtaagcacattttttctcctttcaggaaaccactattttccttttctacatgctgttttgtaagtagtacttttatgaaggttgtcttcaaatgttcgcatcttccatttctactgcccttgggttatccatcctgtcattttgtgccaatcacttttttttttaacttttaagttcagggatgaaagtgtagatttgttacataggtaaacttgtgtcatggggttgttgtacagattatttcatcacccaggtgttaagcctagtatgcactagttgtttttcctgatcctctccctgctcccaccctccaccctctgataggccccagtgtgtgttgttcccctctgtgtgtccatgtgttctcatcatttagctcccacttacaagtgagaatgtggtgtttggttttctgttcctgcattagtttgctaaggataatggcctcgagctccatccaagtccctgtaaaggacatgatcttgtacttttttatggctgcatagtattctgtggtgtatatgtaccacattttctttatccagtctatcattaggcatttaggttgattccatgtttttgctattgtgaatagtgctgcaatgaacatacatgtgcatgtctttttataatagaatgatttatattctgttgtgtatatacccagtaatgggattgctgagttgaatgctatttctgcctttaggtctttgatgaattgccacactgtcttccacaatggttgaactaatttacactcccaccaacggtgaataagtgttcacttttctccacaaccttgtcagcatctattattttttgactttttagtaatagccattctgactgctcacatctattttgtaaataaagttttattgaaacatggccttacccatttgtttacatatattcatggctgtttttgtgccacaatgtcagagttgtcttaaagtagacagagactatctggctgtaaagcctgagatatatactaactggttctttatgtaaaaagtttgctgaccacctactctaaacgttttgcagtgatggtagtgttggcaaaaaaccaaatagcttaccctctttaaatttcccttttacttcttacaaactcctaacaccatttacgactttgtcatcaatatggtcaactaagcttggtttgcatggctctacttcctttcaccttccacttaggcagtgtctccaagtccactgcagtttctatttgtctcctgactgttactgtatcagttcttacctaaataacataacaactgatctccctactttttgcctatgccctcaaatgtgctcattgttgatctatctccctgttaggtgttctttttctcctctttagaaagcagccaaggaaaccagggttctctcaaagtggaaaatactggaacttatgtactgttatcataatgatagttggtgttttgaattataagaatgattccaggtggtttctaaatcatccaataaagctgtattcactctgta

SEQ ID NO: 1567 - DNA, 898 bp, Homo sapiens
  source 1..898: mol_type = genomic DNA
gtgcgatcagatcgatctaagatggcgactgtcgaaccggaaaccacccctactcctaatcccccgactacagaagaggagaaaacggaatctaatcaggaggttgctaacccagaacactatattaaacatcccctacagaacagatgggcactctggttttttaaaaatgataaaagcaaaacttggcaagcaaacctgcggctgatctccaagtttgatactgttgaagacttttgggctctgtacaaccatatccagttgtctagtaatttaatgcctggctgtgactactcactttttaaggatggtattgagcctatgtgggaagatgagaaaaacaaacggggaggacgatggctaattacattgaacaaacagcagagacgaagtgacctcgatcgcttttggctagagacaagatgggatcttgctatgttgcccaggttggtctcaaacttctggcctcaagtgatcctcccacttcagcctcccaaagtgctggaattacagcttctgtgccttattggagaatcttttgatgactacagtgatgatgtatgtggcgctgttgttaatgttagagctaaaggtgataagatagcaatatggactactgaatgtgaaaacagagaagctgttacacatatagggagggtatacaaggaaaggttaggacttcctccaaagatagtgattggttatcagtcccacgcagacacagctactaagagcggctccaccactaaaaataggtttgttgtttaagaagacaccttctgagtattctcataggagactgcgtcaagcaatcgagatttgggagctgaaccaaagcctcttcaaaaagcagagtggactgcatttaaatttgatttccatcttaatgttactcaga

SEQ ID NO: 1568 - DNA, 1020 bp, Homo sapiens
  source 1..1020: mol_type = genomic DNA
gtgcggaagagcccgtgagcagacgggagtgggtcggggggcggcgggggatcccacgtggaagcagcgtcctggagctgggtggggctgcggcgcggactacaaatcccaggggcgtggggcgggagaggcggaaggggcgtcctggggcggggcggcacggggcgaggcggagcgaggctggaggcgcgggagggcagcgagaggttcgcgggtgcagcgcacaggagaccatgtccgggggcagcagctgcagccagaccccaagccgggccatccccgccactcgccgggtggtgctcggcgacggcgtgcagctcccgcccggggactacagcacgacccccggcggcacgctcttcagcaccaccccgggaggtaccaggatcatctatgaccggaaattcctgatggagtgtcggaactcacctgtgaccaaaacacccccaagggatctgcccaccattccgggggtcaccagcccttccagtgatgagccccccatggaagccagccagagccacctgcgcaatagcccagaagataagcgggcgggcggtgaagagtcacagtttgagatggacatttaaagcaccagccatcgtgtggagcactaccaaggggcccctcagggccttcctgggaggagtcccaccagccaggccttatgaaagtgatcatactgggcaggcgttggcgtggggtcggacaccccagccctttctccctcactcagggcacctgccccctcctcttcgtgaacaccagcagatacctccttgtgcctccactgatgcaggagctgccaccccaaggggagtgacccctgccagcacaccctgcagccaagggccaggaagtggacaagaacgaacccttccttccgaatgatcagcagttccagcccctcgctgctgggggcgcaaccaccccttccttaggttgatgtgcttgggaaagctccctccccctccttccccaagagaggaaataaaagccaccttcgccctagggccaaga

SEQ ID NO: 1569 - DNA, 2267 bp, Homo sapiens
  source 1..2267: mol_type = genomic DNA
gcgagagggagacggacgttgagagaacgaggaggaaggagagaaaatggcgtccacggattacagtacctatagccaagctgcagcgcagcagggctacagtgcttacaccgcccagcccactcaaggatatgcacagaccacccaggcatatgggcaacaaagctatggaacctatggacagcccactgatgtcagctatacccaggctcagaccactgcaacctatgggcagaccgcctatgcaacttcttatggacagcctcccactggttatactactccaactgccccccaggcatacagccagcctgtccaggggtatggcactggtgcttatgataccaccactgctacagtcaccaccacccaggcctcctatgcagctcagtctgcatatggcactcagcctgcttatccagcctatgggcagcagccagcagccactgcacctacaagaccgcaggatggaaacaagcccactgagactagtcaacctcaatctagcacagggggttacaaccagcccagcctaggatatggacagagtaactacagttatccccaggtacctgggagctaccccatgcagccagtcactgcacctccatcctaccctcctaccagctattcctctacacagccgactagttatgatcagagcagttactctcagcagaacacctatgggcaaccgagcagctatggacagcagagtagctatggtcaacaaagcagctatgggcagcagcctcccactagttacccaccccaaactggatcctacagccaagctccaagtcaatatagccaacagagcagcagctacgggcagcagagttcattccgacaggaccaccccagtagcatgggtgtttatgggcaggagtctggaggattttccggaccaggagagaaccggagcatgagtggccctgataaccggggcaggggaagagggggatttgatcgtggaggcatgagcagagatccagatgaagactctgacaacagtgcaatttatgtacaaggattaaatgacagtgtgactctagatgatctggcagacttctttaagcagtgtggggttgttaagatgaacaagagaactgggcaacccatgatccacatctacctggacaaggaaacaggaaagcccaaaggcgatgccacagtgtcctatgaagacccacccactgccaaggctgccgtggaatggtttgatgggaaagattttcaagggagcaaacttaaagtctcccttgctcggaagaagcctccaatgaacagtatgcggggtggtctgccaccccgtgagggcagaggcatgccaccaccactccgtggaggtccaggaggcccaggaggtcctgggggacccatgggtcgcatgggaggccgtggaggagatagaggaggcttccctccaagaggaccccggggttcccgagggaacccctctggaggaggaaacgtccagcaccgagctggagactggcagtgtcccaatccgggttgtggaaaccagaacttcgcctggagaacagagtgcaaccagtgtaaggccccaaagcctgaaggcttcctcccgccaccctttccgcccccgggtggtgatcgtggcagaggtggccctggtggcatgcggggaggaagaggtggcctcatggatcgtggtggtcccggtggaatgttcagaggtggccgtggtggagacagaggtggcttccgtggtggccggggcatggaccgaggtggctttggtggaggaagacgaggtggccctggggggccccctggacctttgatggaacagatgggaggaagaagaggaggacgtggaggacctggaaaaatggataaaggcgagcaccgtcaggagcgcagagatcggccctactagatgcagagaccccgcagagctgcattgactaccagatttattttttaaaccagaaaatgttttaaatttataattccatatttataatgttggccacaacattatgattattccttgtctgtactttagtatttttcaccatttgtgaagaaacattaaaacaagttaaatggtagtgtgcggagtttttttttcttccttcttttaaaaatggttgtttaagactttaacaatgggaaccccttgtgagcatgctcagtatcattgtggagaaccaagagggcctcttaactgtaacaatgttcatggttgtgatgttttttttttttttttaaataaaattccaaatgtttataaagagtca

SEQ ID NO: 1570 - DNA, 1989 bp, Homo sapiens
  source 1..1989: mol_type = genomic DNA
aaggagagaaaatggcgtccacggattacagtacctatagccaagctgcagcgcagcagggctacagtgcttacaccgcccagcccactcaaggatatgcacagaccacccaggcatatgggcaacaaagctatggaacctatggacagcccactgatgtcagctatacccaggctcagaccactgcaacctatgggcagaccgcctatgcaacttcttatggacagcctcccactggttatactactccaactgccccccaggcatacagccagcctgtccaggggtatggcactggtgcttatgataccaccactgctacagtcaccaccacccaggcctcctatgcagctcagtctgcatatggcactcagcctgcttatccagcctatgggcagcagccagcagccactgcacctacaagctattcctctacacagccgactagttatgatcagagcagttactctcagcagaacacctatgggcaaccgagcagctatggacagcagagtagctatggtcaacaaagcagctatgggcagcagcctcccactagttacccaccccaaactggatcctacagccaagctccaagtcaatatagccaacagagcagcagctacgggcagcagagttcattccgacaggaccaccccagtagcatgggtgtttatgggcaggagtctggaggattttccggaccaggagagaaccggagcatgagtggccctgataaccggggcaggggaagagggggatttgatcgtggaggcatgagcagaggtgggcggggaggaggacgcggtggaatgggcagcgctggagagcgaggtggcttcaataagcctggtggacccatggatgaaggaccagatcttgatctaggcccacctgtagatccagatgaagactctgacaacagtgcaatttatgtacaaggattaaatgacagtgtgactctagatgatctggcagacttctttaagcagtgtggggttgttaagatgaacaagagaactgggcaacccatgatccacatctacctggacaaggaaacaggaaagcccaaaggcgatgccacagtgtcctatgaagacccacccactgccaaggctgccgtggaatggtttgatgggaaagattttcaagggagcaaacttaaagtctcccttgctcggaagaagcctccaatgaacagtatgcggggtggtctgccaccccgtgagggcagaggcatgccaccaccactccgtggaggtccaggaggcccaggaggtcctgggggacccatgggtcgcatgggaggccgtggaggagatagaggaggcttccctccaagaggaccccggggttcccgagggaacccctctggaggaggaaacgtccagcaccgagctggagactggcagtgtcccaatccgggttgtggaaaccagaacttcgcctggagaacagagtgcaaccagtgtaaggccccaaagcctgaaggcttcctcccgccaccctttccgcccccgggtggtgatcgtggcagaggtggccctggtggcatgcggggaggaagaggtggcctcatggatcgtggtggtcccggtggaatgttcagaggtggccgtggtggagacagaggtggcttccgtggtggccggggcatggaccgaggtggctttggtggaggaagacgaggtggccctggggggccccctggacctttgatggaacagatgggaggaagaagaggaggacgtggaggacctggaaaaatggataaaggcgagcaccgtcaggagcgcagagatcggccctactagatgcagagaccccgcagagctgcattgactaccagatttattttttaaaccagaaaatgttttaaatttataattccatatttataatgttggccacaacattatgattattccttgtctgtactttagtatttttcaccatttgtgaagaaacattaaaacaagttaaatggta

SEQ ID NO: 1571 - DNA, 2443 bp, Homo sapiens
  source 1..2443: mol_type = genomic DNA
agagccagcggacggaaccattccaaacagcctagtctcgtgctgagagcctctccggtttcacgctgagacccgctcacccccgctctggccccttagatgctattttggcccgagtgtcacgtcgggcgctctttagagaggactgggacaagagttgcggacgcgaagaacgagtaagcggtggttcatccctcctgaccccacccccgtggcctggcccgatggtcgcgcccggggttgcgagatttgcgcctgcgcagtgcggcgcctagagggaaagcgagagggagacggacgttgagagaacgaggaggaaggagagaaaatggcgtccacggattacagtacctatagccaagctgcagcgcagcagggctacagtgcttacaccgcccagcccactcaaggatatgcacagaccacccaggcatatgggcaacaaagctatggaacctatggacagcccactgatgtcagctatacccaggctcagaccactgcaacctatgggcagaccgcctatgcaacttcttatggacagcctcccactggttatactactccaactgccccccaggcatacagccagcctgtccaggggtatggcactggtgcttatgataccaccactgctacagtcaccaccacccaggcctcctatgcagctcagtctgcatatggcactcagcctgcttatccagcctatgggcagcagccagcagccactgcacctacaagaccgcaggatggaaacaagcccactgagactagtcaacctcaatctagcacagggggttacaaccagcccagcctaggatatggacagagtaactacagttatccccaggtacctgggagctaccccatgcagccagtcactgcacctccatcctaccctcctaccagctattcctctacacagccgactagttatgatcagagcagttactctcagcagaacacctatgggcaaccgagcagctatggacagcagagtagctatggtcaacaaagcagctatgggcagcagcctcccactagttacccaccccaaactggatcctacagccaagctccaagtcaatatagccaacagagcagcagctacgggcagcagagacccatggatgaaggaccagatcttgatctaggcccacctgtagatccagatgaagactctgacaacagtgcaatttatgtacaaggattaaatgacagtgtgactctagatgatctggcagacttctttaagcagtgtggggttgttaagatgaacaagagaactgggcaacccatgatccacatctacctggacaaggaaacaggaaagcccaaaggcgatgccacagtgtcctatgaagacccacccactgccaaggctgccgtggaatggtttgatgggaaagattttcaagggagcaaacttaaagtctcccttgctcggaagaagcctccaatgaacagtatgcggggtggtctgccaccccgtgagggcagaggcatgccaccaccactccgtggaggtccaggaggcccaggaggtcctgggggacccatgggtcgcatgggaggccgtggaggagatagaggaggcttccctccaagaggaccccggggttcccgagggaacccctctggaggaggaaacgtccagcaccgagctggagactggcagtgtcccaatccgggttgtggaaaccagaacttcgcctggagaacagagtgcaaccagtgtaaggccccaaagcctgaaggcttcctcccgccaccctttccgcccccgggtggtgatcgtggcagaggtggccctggtggcatgcggggaggaagaggtggcctcatggatcgtggtggtcccggtggaatgttcagaggtggccgtggtggagacagaggtggcttccgtggtggccggggcatggaccgaggtggctttggtggaggaagacgaggtggccctggggggccccctggacctttgatggaacagatgggaggaagaagaggaggacgtggaggacctggaaaaatggataaaggcgagcaccgtcaggagcgcagagatcggccctactagatgcagagaccccgcagagctgcattgactaccagatttattttttaaaccagaaaatgttttaaatttataattccatatttataatgttggccacaacattatgattattccttgtctgtactttagtatttttcaccatttgtgaagaaacattaaaacaagttaaatggtagtgtgcggagtttttttttcttccttcttttaaaaatggttgtttaagactttaacaatgggaaccccttgtgagcatgctcagtatcattgtggagaaccaagagggcctcttaactgtaacaatgttcatggttgtgatgttttttttttttttttaaataaaattccaaatgtttataaagagtc

SEQ ID NO: 1572 - DNA, 2654 bp, Homo sapiens
  source 1..2654: mol_type = genomic DNA
ggacggaaccattccaaacagcctagtctcgtgctgagagcctctccggtttcacgctgagacccgctcacccccgctctggccccttagatgctattttggcccgagtgtcacgtcgggcgctctttagagaggactgggacaagagttgcggacgcgaagaacgagtaagcggtggttcatccctcctgaccccacccccgtggcctggcccgatggtcgcgcccggggttgcgagatttgcgcctgcgcagtgcggcgcctagagggaaagcgagagggagacggacgttgagagaacgaggaggaaggagagaaaatggcgtccacggattacagtacctatagccaagctgcagcgcagcagggctacagtgcttacaccgcccagcccactcaaggatatgcacagaccacccaggcatatgggcaacaaagctatggaacctatggacagcccactgatgtcagctatacccaggctcagaccactgcaacctatgggcagaccgcctatgcaacttcttatggacagcctcccactggttatactactccaactgccccccaggcatacagccagcctgtccaggggtatggcactggtgcttatgataccaccactgctacagtcaccaccacccaggcctcctatgcagctcagtctgcatatggcactcagcctgcttatccagcctatgggcagcagccagcagccactgcacctacaagaccgcaggatggaaacaagcccactgagactagtcaacctcaatctagcacagggggttacaaccagcccagcctaggatatggacagagtaactacagttatccccaggtacctgggagctaccccatgcagccagtcactgcacctccatcctaccctcctaccagctattcctctacacagccgactagttatgatcagagcagttactctcagcagaacacctatgggcaaccgagcagctatggacagcagagtagctatggtcaacaaagcagctatgggcagcagcctcccactagttacccaccccaaactggatcctacagccaagctccaagtcaatatagccaacagagcagcagctacgggcagcagagttcattccgacaggaccaccccagtagcatgggtgtttatgggcaggagtctggaggattttccggaccaggagagaaccggagcatgagtggccctgataaccggggcaggggaagagggggatttgatcgtggaggcatgagcagaggtgggcggggaggaggacgcggtggaatgggcagcgctggagagcgaggtggcttcaataagcctggtggacccatggatgaaggaccagatcttgatctaggcccacctgtagatccagatgaagactctgacaacagtgcaatttatgtacaaggattaaatgacagtgtgactctagatgatctggcagacttctttaagcagtgtggggttgttaagatgaacaagagaactgggcaacccatgatccacatctacctggacaaggaaacaggaaagcccaaaggcgatgccacagtgtcctatgaagacccacccactgccaaggctgccgtggaatggtttgatgggaaagattttcaagggagcaaacttaaagtctcccttgctcggaagaagcctccaatgaacagtatgcggggtggtctgccaccccgtgagggcagaggcatgccaccaccactccgtggaggtccaggaggcccaggaggtcctgggggacccatgggtcgcatgggaggccgtggaggagatagaggaggcttccctccaagaggaccccggggttcccgagggaacccctctggaggaggaaacgtccagcaccgagctggagactggcagtgtcccaatccgggttgtggaaaccagaacttcgcctggagaacagagtgcaaccagtgtaaggccccaaagcctgaaggcttcctcccgccaccctttccgcccccgggtggtgatcgtggcagaggtggccctggtggcatgcggggaggaagaggtggcctcatggatcgtggtggtcccggtggaatgttcagaggtggccgtggtggagacagaggtggcttccgtggtggccggggcatggaccgaggtggctttggtggaggaagacgaggtggccctggggggccccctggacctttgatggaacagatgggaggaagaagaggaggacgtggaggacctggaaaaatggataaaggcgagcaccgtcaggagcgcagagatcggccctactagatgcagagaccccgcagagctgcattgactaccagatttattttttaaaccagaaaatgttttaaatttataattccatatttataatgttggccacaacattatgattattccttgtctgtactttagtatttttcaccatttgtgaagaaacattaaaacaagttaaatggtagtgtgcggagtttttttttcttccttcttttaaaaatggttgtttaagactttaacaatgggaaccccttgtgagcatgctcagtatcattgtggagaaccaagagggcctcttaactgtaacaatgttcatggttgtgatgttttttttttttttttaaataaaattccaaatgtttataaagagtca

SEQ ID NO: 1573 - DNA, 2207 bp, Homo sapiens
  source 1..2207: mol_type = genomic DNA
gcggcgcctagagggaaagcgagagggagacggacgttgagagaacgaggaggaaggagagaaaatggcgtccacggattacagtacctatagccaagctgcagcgcagcagggctacagtgcttacaccgcccagcccactcaaggatatgcacagaccacccaggcatatgggcaacaaagctatggaacctatggacagcccactgatgtcagctatacccaggctcagaccactgcaacctatgggcagaccgcctatgcaacttcttatggacagcctcccactggttatactactccaactgccccccaggcatacagccagcctgtccaggggtatggcactggtgcttatgataccaccactgctacagtcaccaccacccaggcctcctatgcagctcagtctgcatatggcactcagcctgcttatccagcctatgggcagcagccagcagccactgcacctacaagaccgcaggatggaaacaagcccactgagactagtcaacctcaatctagcacagggggttacaaccagcccagcctaggatatggacagagtaactacagttatccccaggtacctgggagctaccccatgcagccagtcactgcacctccatcctaccctcctaccagctattcctctacacagccgactagttatgatcagagcagttactctcagcagaacacctatgggcaaccgagcagctatggacagcagagtagctatggtcaacaaagcagctatgggcagcagcctcccactagttacccaccccaaactggatcctacagccaagctccaagtcaatatagccaacagagcagcagctacgggcagcagagttcattccgacaggaccaccccagtagcatgggtgtttatgggcaggagtctggaggattttccggaccaggagagaaccggagcatgagtggccctgataaccggggcaggggaagagggggatttgatcgtggaggcatgagcagaggtgggcggggaggaggacgcggtggaatgggcgctggagagcgaggtggcttcaataagcctggtggacccatggatgaaggaccagatcttgatctaggcccacctgtagatccagatgaagactctgacaacagtgcaatttatgtacaaggattaaatgacagtgtgactctagatgatctggcagacttctttaagcagtgtggggttgttaagatgaacaagagaactgggcaacccatgatccacatctacctggacaaggaaacaggaaagcccaaaggcgatgccacagtgtcctatgaagacccacccactgccaaggctgccgtggaatggtttgatgggaaagattttcaagggagcaaacttaaagtctcccttgctcggaagaagcctccaatgaacagtatgcggggtggtctgccaccccgtgagggcagaggcatgccaccaccactccgtggaggtccaggaggcccaggaggtcctgggggacccatgggtcgcatgggaggccgtggaggagatagaggaggcttccctccaagaggaccccggggttcccgagggaacccctctggaggaggaaacgtccagcaccgagctggagactggcagtgtcccaatccgggttgtggaaaccagaacttcgcctggagaacagagtgcaaccagtgtaaggccccaaagcctgaaggcttcctcccgccaccctttccgcccccgggtggtgatcgtggcagaggtggccctggtggcatgcggggaggaagaggtggcctcatggatcgtggtggtcccggtggaatgttcagaggtggccgtggtggagacagaggtggcttccgtggtggccggggcatggaccgaggtggctttggtggaggaagacgaggtggccctggggggccccctggacctttgatggaacagatgggaggaagaagaggaggacgtggaggacctggaaaaatggataaaggcgagcaccgtcaggagcgcagagatcggccctactagatgcagagaccccgcagagctgcattgactaccagatttattttttaaaccagaaaatgttttaaatttataattccatatttataatgttggccacaacattatgattattccttgtctgtactttagtatttttcaccatttgtgaagaaacattaaaacaagttaaatggta

SEQ ID NO: 1574 - DNA, 2189 bp, Homo sapiens
  source 1..2189: mol_type = genomic DNA
aacgaggaggaaggagagaaaatggcgtccacggattacagtacctatagccaagctgcagcgcagcagggctacagtgcttacaccgcccagcccactcaaggatatgcacagaccacccaggcatatgggcaacaaagctatggaacctatggacagcccactgatgtcagctatacccaggctcagaccactgcaacctatgggcagaccgcctatgcaacttcttatggacagcctcccactgtagaagggaccagtacaggttatactactccaactgccccccaggcatacagccagcctgtccaggggtatggcactggtgcttatgataccaccactgctacagtcaccaccacccaggcctcctatgcagctcagtctgcatatggcactcagcctgcttatccagcctatgggcagcagccagcagccactgcacctacaagaccgcaggatggaaacaagcccactgagactagtcaacctcaatctagcacagggggttacaaccagcccagcctaggatatggacagagtaactacagttatccccaggtacctgggagctaccccatgcagccagtcactgcacctccatcctaccctcctaccagctattcctctacacagccgactagttatgatcagagcagttactctcagcagaacacctatgggcaaccgagcagctatggacagcagagtagctatggtcaacaaagcagctatgggcagcagcctcccactagttacccaccccaaactggatcctacagccaagctccaagtcaatatagccaacagagcagcagctacgggcagcagagttcattccgacaggaccaccccagtagcatgggtgtttatgggcaggagtctggaggattttccggaccaggagagaaccggagcatgagtggccctgataaccggggcaggggaagagggggatttgatcgtggaggcatgagcagaggtgggcggggaggaggacgcggtggaatgggcgctggagagcgaggtggcttcaataagcctggtggacccatggatgaaggaccagatcttgatctaggcccacctgtagatccagatgaagactctgacaacagtgcaatttatgtacaaggattaaatgacagtgtgactctagatgatctggcagacttctttaagcagtgtggggttgttaagatgaacaagagaactgggcaacccatgatccacatctacctggacaaggaaacaggaaagcccaaaggcgatgccacagtgtcctatgaagacccacccactgccaaggctgccgtggaatggtttgatgggaaagattttcaagggagcaaacttaaagtctcccttgctcggaagaagcctccaatgaacagtatgcggggtggtctgccaccccgtgagggcagaggcatgccaccaccactccgtggaggtccaggaggcccaggaggtcctgggggacccatgggtcgcatgggaggccgtggaggagatagaggaggcttccctccaagaggaccccggggttcccgagggaacccctctggaggaggaaacgtccagcaccgagctggagactggcagtgtcccaatccgggttgtggaaaccagaacttcgcctggagaacagagtgcaaccagtgtaaggccccaaagcctgaaggcttcctcccgccaccctttccgcccccgggtggtgatcgtggcagaggtggccctggtggcatgcggggaggaagaggtggcctcatggatcgtggtggtcccggtggaatgttcagaggtggccgtggtggagacagaggtggcttccgtggtggccggggcatggaccgaggtggctttggtggaggaagacgaggtggccctggggggccccctggacctttgatggaacagatgggaggaagaagaggaggacgtggaggacctggaaaaatggataaaggcgagcaccgtcaggagcgcagagatcggccctactagatgcagagaccccgcagagctgcattgactaccagatttattttttaaaccagaaaatgttttaaatttataattccatatttataatgttggccacaacattatgattattccttgtctgtactttagtatttttcaccatttgtgaagaaacattaaaacaagttaaatggtagtgtgcg

SEQ ID NO: 1575 - DNA, 587 bp, Homo sapiens
  source 1..587: mol_type = genomic DNA
agcgagagggagacggacgttgagagaacgaggaggaaggagagaaaatggcgtccacggattacagtacctatagccaagctgcagcgcagcagggctacagtgcttacaccgcccagcccactcaaggatatgcacagaccacccaggcctcctatgcagctcagtctgcatatggcactcagcctgcttatccagcctatgggcagcagccagcagccactgcacctacaagaccgcaggatggaaacaagcccactgagactagtcaacctcaatctagcacagggggttacaaccagcccagcctaggatatggacagagtaactacagttatccccaggtacctgggagctaccccatgcagccagtcactgcacctccatcctaccctcctaccagctattcctctacacagccgactagttatgatcagagcagttactctcagcagaacacctatgggcaaccgagcagctatggacagcagagtagctatggtcaacaaagcagctatgggcagcagcctcccactagttacccaccccaaactggatcctacagccaagctccaagtcaatatagc

SEQ ID NO: 1576 - DNA, 1265 bp, Homo sapiens
  source 1..1265: mol_type = genomic DNA
cgaggaggaaggagagaaaatggcgtccacggattacagtacctatagccaagctgcagcgcagcagggctacagtgcttacaccgcccagcccactcaaggatatgcacagaccacccaggcatatgggcaacaaagctatggaacctatggacagcccactgatgtcagctatacccaggctcagaccactgcaacctatgggcagaccgcctatgcaacttcttatggacagcctcccactggttatactactccaactgccccccaggcatacagccagcctgtccaggggtatggcactggtgcttatgataccaccactgctacagtcaccaccacccaggcctcctatgcagctcagtctgcatatggcactcagcctgcttatccagcctatgggcagcagccagcagccactgcacctacaagaccgcaggatggaaacaagcccactgagactagtcaacctcaatctagcacagggggttacaaccagcccagcctaggatatggacagagtaactacagttatccccaggtacctgggagctaccccatgcagccagtcactgcacctccatcctaccctcctaccagctattcctctacacagccgactagttatgatcagagcagttactctcagcagaacacctatgggcaaccgagcagctatggacagcagagtagctatggtcaacaaagcagctatgggcagcagcctcccactagttacccaccccaaactggatcctacagccaagctccaagtcaatatagccaacagagcagcagctacgggcagcagagttcattccgacaggaccaccccagtagcatgggtgtttatgggcaggagtctggaggattttccggaccaggagagaaccggagcatgagtggccctgataaccggggcaggggaagagggggatttgatcgtggaggcatgagcagaggtgggcggggaggaggacgcggtggaatggggttacaaagtgagagccttgtatacacttcaatacttaaaaagtacccgtactcagtactcagccggcagcataatgaaaagtgggactagacacggtgtccatatggagaggaaaaatatacatagaatatttttaacaaaatgtattcattgtataaatggaatccttctgtaactttggtaactgcatacttgttgtttggtaatgaaccagaggaggtataatactctagaattgtgtaacattaaagtgtaaacttttgtgtttaaa

SEQ ID NO: 1577 - DNA, 1273 bp, Homo sapiens
  source 1..1273: mol_type = genomic DNA
gagccgaaggtggaggtcaaaggggcgtggcgttacagagcctctagcgctgggtgttggggacctgacgctatggagctctcggagttttgtgggggacggctgtgagtggggggttcctgctgcgggatgagaacgtagacgccagtggctcactcgctcctggcaccttccctttcaggctccagatggaccctgggaaggacaaagagggggtgccccagccctcagggccgccagcaaggaagaaatttgtgatacccctcgacgaggatgaggtccctcctggagtggccaagcccttattccgatctacacagagccttcccactgtggacacctcggcccaggcggcccctcagacctacgccgaatatgccatctcacagcctctggaaggggctggggccacgtgccccacagggtcagagcccctggcaggagagacgcccaaccaggccctgaaacccggggcaaaatccaacagcatcattgtgagccctcggcagaggggcaatcccgtactgaagttcgtgcgcaatgtgccctgggaatttggcgacgtaattcccgactatgtgctgggccagagcacctgtgccctgttcctcagcctccgctaccacaacctgcacccagactacatccatgggcggctgcagagcctggggaagaacttcgccttgcgggtcctgcttgtccaggtggatgtgaaagatccccagcaggccctcaaggagctggctaagatgtgtatcctggccgactgcacattgatcctcgcctggagccccgaggaagctgggcggtacctggagacctacaaggcctatgagcagaaaccagcggacctcctgatggagaagctagagcaggacttcgtctcccgggtgactgaatgtctgaccaccgtgaagtcagtcaacaaaacggacagtcagaccctcctgaccacatttggatctctggaacagctcatcgccgcatcaagagaagatctggccttatgcccaggcctgggccctcagaaagtaagagctctgggaaagaacccaaggagttgggggaaggagagagccccaaataaacacaacctgagaccccaaagttttaaggtgaaaaaagaaccaaagaccagacacagtggcttccgcctgtaatcccaacattttgggaggccaaggcgggaggactgcttgaggccagaagttggagaccagcctgggcaagtggacacctcatttttactaaaaataaaaaaaactagctgggc

SEQ ID NO: 1578 - DNA, 3382 bp, Homo sapiens
  source 1..3382: mol_type = genomic DNA
ccggaagtgctgcgagccctgggccacgctggccgtgctggcagtgggccgcctcgatccctctgcagtctttcccttgaggctccaagaccagcaggtgaggcctcgcggcgctgaaaccgtgaggcccggaccacaggctccagatggaccctgggaaggacaaagagggggtgccccagccctcagggccgccagcaaggaagaaatttgtgatacccctcgacgaggatgaggtccctcctggagtggccaagcccttattccgatctacacagagccttcccactgtggacacctcggcccaggcggcccctcagacctacgccgaatatgccatctcacagcctctggaaggggctggggccacgtgccccacagggtcagagcccctggcaggagagacgcccaaccaggccctgaaacccggggcaaaatccaacagcatcattgtgagccctcggcagaggggcaatcccgtactgaagttcgtgcgcaatgtgccctgggaatttggcgacgtaattcccgactatgtgctgggccagagcacctgtgccctgttcctcagcctccgctaccacaacctgcacccagactacatccatgggcggctgcagagcctggggaagaacttcgccttgcgggtcctgcttgtccaggtggatgtgaaagatccccagcaggccctcaaggagctggctaagatgtgtatcctggccgactgcacattgatcctcgcctggagccccgaggaagctgggcggtacctggagacctacaaggcctatgagcagaaaccagcggacctcctgatggagaagctagagcaggacttcgtctcccgggtgactgaatgtctgaccaccgtgaagtcagtcaacaaaacggacagtcagaccctcctgaccacatttggatctctggaacagctcatcgccgcatcaagagaagatctggccttatgcccaggcctgggccctcagaaagcccggaggctgtttgatgtcctgcacgagcccttcttgaaagtaccctgatgaccccagctgccaaggaaacccccagtgtaataataaatcgtcctcccaggccaggctcctgctggctgcgctggtgcagtctctggggagggattctgggggtgtcaccttctggtggcccaggtgggcaccttcagctttctttagttcctcagtttcccgggggcagactacacaggctgctgctgctgctgcttccgcttcttgtcccggcctgtgggagcctcctccccagactctgaattcagtggcggccctggcatctcctcttggggcactgtctctggcatccggctttcctgactctgcttcttcctcttcttggtggatcccggagttgccctggcttcaggctgtccctcccctggcagttcaggctctagtggctgaattggctcagtcactgtgtgacctctctctttcttcttcttcttcttcttggtggatgtgggagctgcctgaggctcaaggtcatccggcagctcaggccccaccacctctgtctctggctccactgtggcatcttgctgtttttctttcttcgtcttctttttgggagctgccagagctgcctgggcctgaggcttcgctccttctggctgttgaggcgccatggtcccccctggggactccagaggcttcatctccggctccactggctccatcgcctccgtccctggctccatcattgccatctgtcccttttcttttttcctcttcttcgtagggggcagagggatggcttcctccagtggctccaccttcacctgtggctgagactcaactgtcaccccctcctctggctccatcccttccgtccccttttgcctctttctctttttggtcggggacaggactgtgtcttctagaggctcagtgttaatctgttcctgcttcactgtcttgtcttctggctcgaaggtttctttccctttgggcttcttcctcttcttggtggtggacgggaacagcactcccagaggctccagtgtctccactgtgggctctgtccccacaggccctgctgcctctggttctttcagctgctgattttttttcttcttcttcttccgcacatccatttctggcgaccccaaagccatgtccacctccagggccccgtgcccattcactgcctcctgagtgactggggcctctgtcacctgcatctcctttttcttcttccctgaggtgagcaggttgggggccaaggctgacctaggccctgtgactggtgggttgcccccaaaggcacagaaccgaggcctcaggccaggagggatctgtggtgggggacttgctgggatgggctgcagagggctccctgacagggattgctggggaccctcaaggatccttagggtgccctggggggctgaggcacaggtgagtccacctcctgcctccgttgagggggccagcagggtcgcttctccagcttggggacagctgctgaggactcgatagcggtgccgcttgcctgccaatttgcccttgacgatctgggagccagagagaggcacatgccgcccattgaagctacagagagaaacagggagggcagaggcttaagtggaacaggagagggaaggttttttgattttttttttgtttttttttgagagagtcttgctctgttgcctaggctggagtgcagtggcatgatctcggctcactgcaatgtccacctcctgggttcaagcgattctcctgcctcagcctctcaagtagctgggattacaggcacctgccaccacgcccagccaatttttgtatttttagtagagacaatttcactatgttggccaggctggtcttgaactcctgacctcaagtgatctgctcgcctcggcctcccaaaggatgggattacaggcaccagccactgcgcctggctggcctctggtttttaataaaacatgactagagtgactccatcttaaagtgagtagctaggcacttacaaggttcatgcttatggcctgaaaataaccacatcccaggctgaccaccaattataattacagaatatttatggccatacagaacatgttccaccaagcctgcagaatgtccaaatgtcctaagaatgcagcccccattacttaaatataacataaatgagcaagcttaggttgcaggattaatggtcgtggataacaccaatagcccctacctttagtgagcttatctgcacactccaagtttaactatagttccttatagtttcttataagtagaaatactaacaaagggctgtgggtttctccccctgctttctgaggacactctactctgtaaaggagtagtttccaataaacttgtttctttcactgtgc

SEQ ID NO: 1579 - DNA, 3310 bp, Homo sapiens
  source 1..3310: mol_type = genomic DNA
ccggaagtgctgcgagccctgggccacgctggccgtgctggcagtgggccgcctcgatccctctgcagtctttcccttgaggctccaagaccagcaggtgaggcctcgcggcgctgaaaccgtgaggcccggaccacaggctccagatggaccctgggaaggacaaagagggggtgccccagccctcagggccgccagcaaggaagaaatttgtgatacccctcgacgaggatgaggtccctcctggagtggccaagcccttattccgatctacacagagccttcccactgtggacacctcggcccaggcggcccctcagacctacgccgaatatgccatctcacagcctctggaaggggctggggccacgtgccccacagggtcagagcccctggcaggagagacgcccaaccaggccctgaaacccggggcaaaatccaacagcatcattgtgagccctcggcagaggggcaatcccgtactgaagttcgtgcgcaatgtgccctgggaatttggcgacgtaattcccgactatgtgctgggccagagcacctgtgccctgttcctcagcctccgctaccacaacctgcacccagactacatccatgggcggctgcagagcctggggaagaacttcgccttgcgggtcctgcttgtccaggtggatgtgaaagatccccagcaggccctcaaggagctggctaagatgtgtatcctggccgactgcacattgatcctcgcctggagccccgaggaagctgggcggtacctggagacctacaaggcctatgagcagaaaccagcggacctcctgatggagaagctagagcaggacttcgtctcccggtctctggaacagctcatcgccgcatcaagagaagatctggccttatgcccaggcctgggccctcagaaagcccggaggctgtttgatgtcctgcacgagcccttcttgaaagtaccctgatgaccccagctgccaaggaaacccccagtgtaataataaatcgtcctcccaggccaggctcctgctggctgcgctggtgcagtctctggggagggattctgggggtgtcaccttctggtggcccaggtgggcaccttcagctttctttagttcctcagtttcccgggggcagactacacaggctgctgctgctgctgcttccgcttcttgtcccggcctgtgggagcctcctccccagactctgaattcagtggcggccctggcatctcctcttggggcactgtctctggcatccggctttcctgactctgcttcttcctcttcttggtggatcccggagttgccctggcttcaggctgtccctcccctggcagttcaggctctagtggctgaattggctcagtcactgtgtgacctctctctttcttcttcttcttcttcttggtggatgtgggagctgcctgaggctcaaggtcatccggcagctcaggccccaccacctctgtctctggctccactgtggcatcttgctgtttttctttcttcgtcttctttttgggagctgccagagctgcctgggcctgaggcttcgctccttctggctgttgaggcgccatggtcccccctggggactccagaggcttcatctccggctccactggctccatcgcctccgtccctggctccatcattgccatctgtcccttttcttttttcctcttcttcgtagggggcagagggatggcttcctccagtggctccaccttcacctgtggctgagactcaactgtcaccccctcctctggctccatcccttccgtccccttttgcctctttctctttttggtcggggacaggactgtgtcttctagaggctcagtgttaatctgttcctgcttcactgtcttgtcttctggctcgaaggtttctttccctttgggcttcttcctcttcttggtggtggacgggaacagcactcccagaggctccagtgtctccactgtgggctctgtccccacaggccctgctgcctctggttctttcagctgctgattttttttcttcttcttcttccgcacatccatttctggcgaccccaaagccatgtccacctccagggccccgtgcccattcactgcctcctgagtgactggggcctctgtcacctgcatctcctttttcttcttccctgaggtgagcaggttgggggccaaggctgacctaggccctgtgactggtgggttgcccccaaaggcacagaaccgaggcctcaggccaggagggatctgtggtgggggacttgctgggatgggctgcagagggctccctgacagggattgctggggaccctcaaggatccttagggtgccctggggggctgaggcacaggtgagtccacctcctgcctccgttgagggggccagcagggtcgcttctccagcttggggacagctgctgaggactcgatagcggtgccgcttgcctgccaatttgcccttgacgatctgggagccagagagaggcacatgccgcccattgaagctacagagagaaacagggagggcagaggcttaagtggaacaggagagggaaggttttttgattttttttttgtttttttttgagagagtcttgctctgttgcctaggctggagtgcagtggcatgatctcggctcactgcaatgtccacctcctgggttcaagcgattctcctgcctcagcctctcaagtagctgggattacaggcacctgccaccacgcccagccaatttttgtatttttagtagagacaatttcactatgttggccaggctggtcttgaactcctgacctcaagtgatctgctcgcctcggcctcccaaaggatgggattacaggcaccagccactgcgcctggctggcctctggtttttaataaaacatgactagagtgactccatcttaaagtgagtagctaggcacttacaaggttcatgcttatggcctgaaaataaccacatcccaggctgaccaccaattataattacagaatatttatggccatacagaacatgttccaccaagcctgcagaatgtccaaatgtcctaagaatgcagcccccattacttaaatataacataaatgagcaagcttaggttgcaggattaatggtcgtggataacaccaatagcccctacctttagtgagcttatctgcacactccaagtttaactatagttccttatagtttcttataagtagaaatactaacaaagggctgtgggtttctccccctgctttctgaggacactctactctgtaaaggagtagtttccaataaacttgtttctttcactgtgc

SEQ ID NO: 1580 - DNA, 3119 bp, Homo sapiens
  source 1..3119: mol_type = genomic DNA
acatctctcacgataaatgagtggggagaacttatagcccttgaagtcaaccatctcacacctttccaaaggacgcgaccataactctaaaaggctccagatggaccctgggaaggacaaagagggggtgccccagccctcagggccgccagcaaggaagaaatttgtgatacccctcgacgaggatgaggtccctcctggagtgaggggcaatcccgtactgaagttcgtgcgcaatgtgccctgggaatttggcgacgtaattcccgactatgtgctgggccagagcacctgtgccctgttcctcagcctccgctaccacaacctgcacccagactacatccatgggcggctgcagagcctggggaagaacttcgccttgcgggtcctgcttgtccaggtggatgtgaaagatccccagcaggccctcaaggagctggctaagatgtgtatcctggccgactgcacattgatcctcgcctggagccccgaggaagctgggcggtacctggagacctacaaggcctatgagcagaaaccagcggacctcctgatggagaagctagagcaggacttcgtctcccgggtgactgaatgtctgaccaccgtgaagtcagtcaacaaaacggacagtcagaccctcctgaccacatttggatctctggaacagctcatcgccgcatcaagagaagatctggccttatgcccaggcctgggccctcagaaagcccggaggctgtttgatgtcctgcacgagcccttcttgaaagtaccctgatgaccccagctgccaaggaaacccccagtgtaataataaatcgtcctcccaggccaggctcctgctggctgcgctggtgcagtctctggggagggattctgggggtgtcaccttctggtggcccaggtgggcaccttcagctttctttagttcctcagtttcccgggggcagactacacaggctgctgctgctgctgcttccgcttcttgtcccggcctgtgggagcctcctccccagactctgaattcagtggcggccctggcatctcctcttggggcactgtctctggcatccggctttcctgactctgcttcttcctcttcttggtggatcccggagttgccctggcttcaggctgtccctcccctggcagttcaggctctagtggctgaattggctcagtcactgtgtgacctctctctttcttcttcttcttcttcttggtggatgtgggagctgcctgaggctcaaggtcatccggcagctcaggccccaccacctctgtctctggctccactgtggcatcttgctgtttttctttcttcgtcttctttttgggagctgccagagctgcctgggcctgaggcttcgctccttctggctgttgaggcgccatggtcccccctggggactccagaggcttcatctccggctccactggctccatcgcctccgtccctggctccatcattgccatctgtcccttttcttttttcctcttcttcgtagggggcagagggatggcttcctccagtggctccaccttcacctgtggctgagactcaactgtcaccccctcctctggctccatcccttccgtccccttttgcctctttctctttttggtcggggacaggactgtgtcttctagaggctcagtgttaatctgttcctgcttcactgtcttgtcttctggctcgaaggtttctttccctttgggcttcttcctcttcttggtggtggacgggaacagcactcccagaggctccagtgtctccactgtgggctctgtccccacaggccctgctgcctctggttctttcagctgctgattttttttcttcttcttcttccgcacatccatttctggcgaccccaaagccatgtccacctccagggccccgtgcccattcactgcctcctgagtgactggggcctctgtcacctgcatctcctttttcttcttccctgaggtgagcaggttgggggccaaggctgacctaggccctgtgactggtgggttgcccccaaaggcacagaaccgaggcctcaggccaggagggatctgtggtgggggacttgctgggatgggctgcagagggctccctgacagggattgctggggaccctcaaggatccttagggtgccctggggggctgaggcacaggtgagtccacctcctgcctccgttgagggggccagcagggtcgcttctccagcttggggacagctgctgaggactcgatagcggtgccgcttgcctgccaatttgcccttgacgatctgggagccagagagaggcacatgccgcccattgaagctacagagagaaacagggagggcagaggcttaagtggaacaggagagggaaggttttttgattttttttttgtttttttttgagagagtcttgctctgttgcctaggctggagtgcagtggcatgatctcggctcactgcaatgtccacctcctgggttcaagcgattctcctgcctcagcctctcaagtagctgggattacaggcacctgccaccacgcccagccaatttttgtatttttagtagagacaatttcactatgttggccaggctggtcttgaactcctgacctcaagtgatctgctcgcctcggcctcccaaaggatgggattacaggcaccagccactgcgcctggctggcctctggtttttaataaaacatgactagagtgactccatcttaaagtgagtagctaggcacttacaaggttcatgcttatggcctgaaaataaccacatcccaggctgaccaccaattataattacagaatatttatggccatacagaacatgttccaccaagcctgcagaatgtccaaatgtcctaagaatgcagcccccattacttaaatataacataaatgagcaagcttaggttgcaggattaatggtcgtggataacaccaatagcccctacctttagtgagcttatctgcacactccaagtttaactatagttccttatagtttcttataagtagaaatactaacaaagggctgtgggtttctccccctgctttctgaggacactctactctgtaaaggagtagtttccaataaacttgtttctttcactgtg

SEQ ID NO: 1581 - DNA, 259 bp, Homo sapiens
  source 1..259: mol_type = genomic DNA
aagtgctgcgagccctgggccacgctggccgtgctggcagtgggccgcctcgatccctctgcagtctttcccttgaggctccaagaccagcaggtgaggcctcgcggcgctgaaaccgtgaggcccggaccacaggctccagatggaccctgggaaggacaaagagggggtgccccagccctcagggccgccagcaaggaagaaatttgtgatacccctcgacgaggatgaggtccctcctggagtgagcaaaccactg

SEQ ID NO: 1582 - DNA, 745 bp, Homo sapiens
  source 1..745: mol_type = genomic DNA
acagtccggccggcgccatgaagctcaacgtggacgggctcctggtctacttcccgtacgactacatctaccccgagcagttctcctacatgcgggagctcaaacgcacgctggacgccaagggtcatggagtcctggagatgccctcaggcaccgggaagacagtatccctgttggccctgatcatggcataccagagagcatatccgctggaggtgaccaaactcatctactgctcaagaactgtgccagagattgagaaggtgattgaagagcttcgaaagttgctcaacttctatgagaagcaggagggcgagaagctgccgtttctgggactggctctgagctcccgcaaaaacttgtgtattcaccctgagacaacgtctgcatcgactccatgagcgtcaacctcacccgccggacccttgaccggtgccagggcaacctggagaccctgcagaagacggtgctcaggatcaaagagacagacgagcagcgcctgcgggacgagtaccggcgtctggtggaggggctgcgggaggccagcgccgcccgggagacggacgcccacctggccaaccccgtgctgcccgacgaagtgctgcaggaggcagtgcctggctccatccgcacggccgagcatttcctgggcttcctgaggcggctgctggagtacgtgaagtggcggctgcgtgtgcagcatgtggtgcaggagagcccgcccgccttcctgagcggcctggcc

SEQ ID NO: 1583 - DNA, 1300 bp, Homo sapiens
  source 1..1300: mol_type = genomic DNA
ggccggcgccatgaagctcaacgtggacgggctcctggtctacttcccgtacgactacatctaccccgagcagttctcctacatgcgggagctcaaacgcacgctggacgccaagggtcatggagtcctggagatgccctcaggcaccgggaagacagtatccctgttggccctgatcatggcataccagagagcatatccgctggaggtgaccaaactcatctactgctcaagaactgtgccagagattgagaaggtgattgaagagcttcgaaagttgctcaacttctatgagaagcaggagggcgagaagctgccgtttctgggactggctctgagctcccgcaaaaacttgtgtattcaccctgaggtgacacccctgcgctttgggaaggacgtcgatgggaaatgccacagcctcacagcctcctatgtgcgggcgcagtaccagcatgacaccagcctgccccactgccgattctatgaggaatttgatgcccatgggcgtgaggtgcccctccccgctggcatctacaacctggatgacctgaaggccctggggcggcgccagggctggtgcccatacttccttgctcgatactcaatcctgcatgccaatgtggtggtttatagctaccactacctcctggaccccaagattgcagacctggtgtccaaggaactggcccgcaaggccgtcgtggtcttcgacgaggcccacaacattgacaacgtctgcatcgactccatgagcgtcaacctcacccgccggacccttgaccggtgccagggcaacctggagaccctgcagaagacggtgctcaggatcaaagagacagacgagcagcgcctgcgggacgagtaccggcgtctggtggaggggctgcgggaggccagcgccgcccgggagacggacgcccacctggccaaccccgtgctgcccgacgaagtgctgcaggaggcagtgcctggctccatccgcacggccgagcatttcctgggcttcctgaggcggctgctggagtacgtgaagtggcggctgcgtgtgcagcatgtggtgcaggagagcccgcccgccttcctgagcggcctggcccagcgcgtgtgcatccagcgcaagcccctcagattctgtgctgaacgcctccggtccctgctgcatactctggagatcaccgaccttgctgacttctccccgctcaccctccttgctaactttgccacccttgtcagcacctacgccaaaggccaggctcagcactgtggaagcagcaggaaccaaaaaagatctcatccctaa

SEQ ID NO: 1584 - DNA, 3137 bp, Homo sapiens
  source 1..3137: mol_type = genomic DNA
gggggctgggggtcgcgctcgctagcgggcgcggggggtcttgaagatggggtcatcggtgggcgcgcctgggtccccaagggggcgaggggagggtgaaggggtgggacgggggcagccgcagggagcagcagtgatagcgaggagacactgagggggccccgaggctcctgaggacctgagggttaccgggggcgccgggcccgtcacccttctctgggctcgacgaccgggcactgtggaggcgggagaggggctgaggggacgggaactgacccagcagcccctgccgccaggctcaacgtggacgggctcctggtctacttcccgtacgactacatctaccccgagcagttctcctacatgcgggagctcaaacgcacgctggacgccaaggcatatccgctggaggtgaccaaactcatctactgctcaagaactgtgccagagattgagaaggtgattgaagagcttcgaaagttgctcaacttctatgagaagcaggagggcgagaagctgccgtttctgggactggctctgagctcccgcaaaaacttgtgtattcaccctgaggtgacacccctgcgctttgggaaggacgtcgatgggaaatgccacagcctcacagcctcctatgtgcgggcgcagtaccagcatgacaccagcctgccccactgccgattctatgaggaatttgatgcccatgggcgtgaggtgcccctccccgctggcatctacaacctggatgacctgaaggccctggggcggcgccagggctggtgcccatacttccttgctcgatactcaatcctgcatgccaatgtggtggtttatagctaccactacctcctggaccccaagattgcagacctggtgtccaaggaactggcccgcaaggccgtcgtggtcttcgacgaggcccacaacattgacaacgtctgcatcgactccatgagcgtcaacctcacccgccggacccttgaccggtgccagggcaacctggagaccctgcagaagacggtgctcaggatcaaagagacagacgagcagcgcctgcgggacgagtaccggcgtctggtggaggggctgcgggaggccagcgccgcccgggagacggacgcccacctggccaaccccgtgctgcccgacgaagtgctgcaggaggcagtgcctggctccatccgcacggccgagcatttcctgggcttcctgaggcggctgctggagtacgtgaagtggcggctgcgtgtgcagcatgtggtgcaggagagcccgcccgccttcctgagcggcctggcccagcgcgtgtgcatccagcgcaagcccctcagattctgtgctgaacgcctccggtccctgctgcatactctggagatcaccgaccttgctgacttctccccgctcaccctccttgctaactttgccacccttgtcagcacctacgccaaaggcttcaccatcatcatcgagccctttgacgacagaaccccgaccattgccaaccccatcctgcacttcagctgcatggacgcctcgctggccatcaaacccgtatttgagcgtttccagtctgtcatcatcacatctgggacactgtccccgctggacatctaccccaagatcctggacttccaccccgtcaccatggcaaccttcaccatgacgctggcacgggtctgcctctgccctatgatcatcggccgtggcaatgaccaggtggccatcagctccaaatttgagacccgggaggatattgctgtgatccggaactatgggaacctcctgctggagatgtccgctgtggtccctgatggcatcgtggccttcttcaccagctaccagtacatggagagcaccgtggcctcctggtatgagcaggggatccttgagaacatccagaggaacaagctgctctttattgagacccaggatggtgccgaaaccagtgtcgccctggagaagtaccaggaggcctgcgagaatggccgcggggccatcctgctgtcagtggcccggggcaaagtgtccgagggaatcgactttgtgcaccactacgggcgggccgtcatcatgtttggcgtcccctacgtctacacacagagccgcattctcaaggcgcggctggaatacctgcgggaccagttccagattcgtgagaatgactttcttaccttcgatgccatgcgccacgcggcccagtgtgtgggtcgggccatcaggggcaagacggactacggcctcatggtctttgccgacaagcggtttgcccgtggggacaagcgggggaagctgccccgctggatccaggagcacctcacagatgccaacctcaacctgaccgtggacgagggtgtccaggtggccaagtacttcctgcggcagatggcacagcccttccaccgggaggatcagctgggcctgtccctgctcagcctggagcagctagaatcagaggagacgctgaagaggatagagcagattgctcagcagctctgagtggggcgggtggggccataaacggttcctggtgactcctgagtcttgcctggccctggttcccagcggcggtggtgctagaaggtcttatgaagtcaggtgacatttctcactgtcacgtccacagcctttaatcgcaggagaaggcagctatccaccaggtacccagaggcaagggggggccaggagatgatagaccccctctcaccccaccagcccatccctcctgcactgttcccaagaagctgcggccagcgcagttcactggacgttagtgggggctcaggtcctgggtgctggcgctgagggtccgaggggccttgtccaggtgccagctgggaaactggagacaggcacaggggatggttggaggggaggtgaggggcaagtgttacatccaccctccagctccaggtccagcctggcagccaactatccaaccccctcgcctctaccccaagtaaaacccatctttgctcctgtcctgggtctcttctgacaccaacccaccacctgctgactccaccactggcccgaccgccctgcctttgcctcatctctgcacctacccacatggcctcctctatttttgacccagatgtccccctcacctgagtcccaggagcccttggagcatccac

SEQ ID NO: 1585 - DNA, 2982 bp, Homo sapiens
  source 1..2982: mol_type = genomic DNA
gagaagggggctgggggtcgcgctcgctagcgggcgcggggggtcttgaagatggggtcatcggctcaacgtggacgggctcctggtctacttcccgtacgactacatctaccccgagcagttctcctacatgcgggagctcaaacgcacgctggacgccaagggtcatggagtcctggagatgccctcaggcaccgggaagacagtatccctgttggccctgatcatggcataccagagagcatatccgctggaggtgaccaaactcatctactgctcaagaactgtgccagagattgagaaggtgattgaagagcttcgaaagttgctcaacttctatgagaagcaggagggcgagaagctgccgtttctgggactggctctgagctcccgcaaaaacttgtgtattcaccctgaggtgacacccctgcgctttgggaaggacgtcgatgggaaatgccacagcctcacagcctcctatgtgcgggcgcagtaccagcatgacaccagcctgccccactgccgattctatgaggaatttgatgcccatgggcgtgaggtgcccctccccgctggcatctacaacctggatgacctgaaggccctggggcggcgccagggctggtgcccatacttccttgctcgatactcaatcctgcatgccaatgtggtggtttatagctaccactacctcctggaccccaagattgcagacctggtgtccaaggaactggcccgcaaggccgtcgtggtcttcgacgaggcccacaacattgacaacgtctgcatcgactccatgagcgtcaacctcacccgccggacccttgaccggtgccagggcaacctggagaccctgcagaagacggtgctcaggatcaaagagacagacgagcagcgcctgcgggacgagtaccggcgtctggtggaggggctgcgggaggccagcgccgcccgggagacggacgcccacctggccaaccccgtgctgcccgacgaagtgctgcaggaggcagtgcctggctccatccgcacggccgagcatttcctgggcttcctgaggcggctgctggagtacgtgaagtggcggctgcgtgtgcagcatgtggtgcaggagagcccgcccgccttcctgagcggcctggcccagcgcgtgtgcatccagcgcaagcccctcagattctgtgctgaacgcctccggtccctgctgcatactctggagatcaccgaccttgctgacttctccccgctcaccctccttgctaactttgccacccttgtcagcacctacgccaaaggcttcaccatcatcatcgagccctttgacgacagaaccccgaccattgccaaccccatcctgcacttcagctgcatggacgcctcgctggccatcaaacccgtatttgagcgtttccagtctgtcatcatcacatctgggacactgtccccgctggacatctaccccaagatcctggacttccaccccgtcaccatggcaaccttcaccatgacgctggcacgggtctgcctctgccctatgatcatcggccgtggcaatgaccaggtggccatcagctccaaatttgagacccgggaggatattgctgtgatccggaactatgggaacctcctgctggagatgtccgctgtggtccctgatggcatcgtggccttcttcaccagctaccagtacatggagagcaccgtggcctcctggtatgagcaggggatccttgagaacatccagaggaacaagctgctctttattgagacccaggatggtgccgaaaccagtgtcgccctggagaagtaccaggaggcctgcgagaatggccgcggggccatcctgctgtcagtggcccggggcaaagtgtccgagggaatcgactttgtgcaccactacgggcgggccgtcatcatgtttggcgtcccctacgtctacacacagagccgcattctcaaggcgcggctggaatacctgcgggaccagttccagattcgtgagaatgactttcttaccttcgatgccatgcgccacgcggcccagtgtgtgggtcgggccatcaggggcaagacggactacggcctcatggtctttgccgacaagcggtttgcccgtggggacaagcgggggaagctgccccgctggatccaggagcacctcacagatgccaacctcaacctgaccgtggacgagggtgtccaggtggccaagtacttcctgcggcagatggcacagcccttccaccgggaggatcagctgggcctgtccctgctcagcctggagcagctagaatcagaggagacgctgaagaggatagagcagattgctcagcagctctgagtggggcgggtggggccataaacggttcctggtgactcctgagtcttgcctggccctggttcccagcggcggtggtgctagaaggtcttatgaagtcaggtgacatttctcactgtcacgtccacagcctttaatcgcaggagaaggcagctatccaccaggtacccagaggcaagggggggccaggagatgatagaccccctctcaccccaccagcccatccctcctgcactgttcccaagaagctgcggccagcgcagttcactggacgttagtgggggctcaggtcctgggtgctggcgctgagggtccgaggggccttgtccaggtgccagctgggaaactggagacaggcacaggggatggttggaggggaggtgaggggcaagtgttacatccaccctccagctccaggtccagcctggcagccaactatccaaccccctcgcctctaccccaagtaaaacccatctttgctcctgtcctgggtctcttctgacaccaacccaccacctgctgactccaccactggcccgaccgccctgcctttgcctcatctctgcacctacccacatggcctcctctatttttgacccagatgtccccctcacctgagtcccaggagcccttggagcatccac

SEQ ID NO: 1586 - DNA, 2103 bp, Homo sapiens
  source 1..2103: mol_type = genomic DNA
gaccccgctgcacagtccggccggcgccatgaagctcaacgtggacgggctcctggtctacttcccgtacgactacatctaccccgagcagttctcctacatgcgggagctcaaacgcacgctggacgccaagggtcatggagtcctggagatgccctcaggcaccgggaagacagtatccctgttggccctgatcatggcataccagagagcatatccgctggaggtgaccaaactcatctactgctcaagaactgtgccagagattgagaaggtgattgaagagcttcgaaagttgctcaacttctatgagaagcaggagggcgagaagctgccgtttctgggactggctctgagctcccgcaaaaacttgtgtattcaccctgagatcctgcatgccaatgtggtggtttatagctaccactacctcctggaccccaagattgcagacctggtgtccaaggaactggcccgcaaggccgtcgtggtcttcgacgaggcccacaacattgacaacgtctgcatcgactccatgagcgtcaacctcacccgccggacccttgaccggtgccagggcaacctggagaccctgcagaagacggtgctcaggatcaaagagacagacgagcagcgcctgcgggacgagtaccggcgtctggtggaggggctgcgggaggccagcgccgcccgggagacggacgcccacctggccaaccccgtgctgcccgacgaagtgctgcaggaggcagtgcctggctccatccgcacggccgagcatttcctgggcttcctgaggcggctgctggagtacgtgaagtggcggctgcgtgtgcagcatgtggtgcaggagagcccgcccgccttcctgagcggcctggcccagcgcgtgtgcatccagcgcaagcccctcagattctgtgctgaacgcctccggtccctgctgcatactctggagatcaccgaccttgctgacttctccccgctcaccctccttgctaactttgccacccttgtcagcacctacgccaaaggcttcaccatcatcatcgagccctttgacgacagaaccccgaccattgccaaccccatcctgcacttcagctgcatggacgcctcgctggccatcaaacccgtatttgagcgtttccagtctgtcatcatcacatctgggacactgtccccgctggacatctaccccaagatcctggacttccaccccgtcaccatggcaaccttcaccatgacgctggcacgggtctgcctctgccctatgatcatcggccgtggcaatgaccaggtggccatcagctccaaatttgagacccgggaggatattgctgtgatccggaactatgggaacctcctgctggagatgtccgctgtggtccctgatggcatcgtggccttcttcaccagctaccagtacatggagagcaccgtggcctcctggtatgagcaggggatccttgagaacatccagaggaacaagctgctctttattgagacccaggatggtgccgaaaccagtgtcgccctggagaagtaccaggaggcctgcgagaatggccgcggggccatcctgctgtcagtggcccggggcaaagtgtccgagggaatcgactttgtgcaccactacgggcgggccgtcatcatgtttggcgtcccctacgtctacacacagagccgcattctcaaggcgcggctggaatacctgcgggaccagttccagattcgtgagaatgactttcttaccttcgatgccatgcgccacgcggcccagtgtgtgggtcgggccatcaggggcaagacggactacggcctcatggtctttgccgacaagcggtttgcccgtggggacaagcgggggaagctgccccgctggatccaggagcacctcacagatgccaacctcaacctgaccgtggacgagggtgtccaggtggccaagtacttcctgcggcagatggcacagcccttccaccgggaggatcagctgggcctgtccctgctcagcctggagcagctagaatcagaggagacgctgaagaggatagagcagattgctcagcagctctgagtggggcgggtggggccataaacggt

SEQ ID NO: 1587 - DNA, 3002 bp, Homo sapiens
  source 1..3002: mol_type = genomic DNA
ggatgtccacgacccggcctctcgctgaatattcatgagggaggcgggtcgaccccgctgcacagtccggccggcgccatgaagctcaacgtggacgggctcctggtctacttcccgtacgactacatctaccccgagcagttctcctacatgcgggagctcaaacgcacgctggacgccaagggtcatggagtcctggagatgccctcaggcaccgggaagacagtatccctgttggccctgatcatggcataccagagagcatatccgctggaggtgaccaaactcatctactgctcaagaactgtgccagagattgagaaggtgattgaagagcttcgaaagttgctcaacttctatgagaagcaggagggcgagaagctgccgtttctgggactggctctgagctcccgcaaaaacttgtgtattcaccctgaggtgacacccctgcgctttgggaaggacgtcgatgggaaatgccacagcctcacagcctcctatgtgcgggcgcagtaccagcatgacaccagcctgccccactgccgattctatgaggaatttgatgcccatgggcgtgaggtgcccctccccgctggcatctacaacctggatgacctgaaggccctggggcggcgccagggctggtgcccatacttccttgctcgatactcaatcctgcatgccaatgtggtggtttatagctaccactacctcctggaccccaagattgcagacctggtgtccaaggaactggcccgcaaggccgtcgtggtcttcgacgaggcccacaacattgacaacgtctgcatcgactccatgagcgtcaacctcacccgccggacccttgaccggtgccagggcaacctggagaccctgcagaagacggtgctcaggatcaaagagacagacgagcagcgcctgcgggacgagtaccggcgtctggtggaggggctgcgggaggccagcgccgcccgggagacggacgcccacctggccaaccccgtgctgcccgacgaagtgctgcaggaggcagtgcctggctccatccgcacggccgagcatttcctgggcttcctgaggcggctgctggagtacgtgaagtggcggctgcgtgtgcagcatgtggtgcaggagagcccgcccgccttcctgagcggcctggcccagcgcgtgtgcatccagcgcaagcccctcagattctgtgctgaacgcctccggtccctgctgcatactctggagatcaccgaccttgctgacttctccccgctcaccctccttgctaactttgccacccttgtcagcacctacgccaaaggcttcaccatcatcatcgagccctttgacgacagaaccccgaccattgccaaccccatcctgcacttcagctgcatggacgcctcgctggccatcaaacccgtatttgagcgtttccagtctgtcatcatcacatctgggacactgtccccgctggacatctaccccaagatcctggacttccaccccgtcaccatggcaaccttcaccatgacgctggcacgggtctgcctctgccctatgatcatcggccgtggcaatgaccaggtggccatcagctccaaatttgagacccgggaggatattgctgtgatccggaactatgggaacctcctgctggagatgtccgctgtggtccctgatggcatcgtggccttcttcaccagctaccagtacatggagagcaccgtggcctcctggtatgagcaggggatccttgagaacatccagaggaacaagctgctctttattgagacccaggatggtgccgaaaccagtgtcgccctggagaagtaccaggaggcctgcgagaatggccgcggggccatcctgctgtcagtggcccggggcaaagtgtccgagggaatcgactttgtgcaccactacgggcgggccgtcatcatgtttggcgtcccctacgtctacacacagagccgcattctcaaggcgcggctggaatacctgcgggaccagttccagattcgtgagaatgactttcttaccttcgatgccatgcgccacgcggcccagtgtgtgggtcgggccatcaggggcaagacggactacggcctcatggtctttgccgacaagcggtttgcccgtggggacaagcgggggaagctgccccgctggatccaggagcacctcacagatgccaacctcaacctgaccgtggacgagggtgtccaggtggccaagtacttcctgcggcagatggcacagcccttccaccgggaggatcagctgggcctgtccctgctcagcctggagcagctagaatcagaggagacgctgaagaggatagagcagattgctcagcagctctgagtggggcgggtggggccataaacggttcctggtgactcctgagtcttgcctggccctggttcccagcggcggtggtgctagaaggtcttatgaagtcaggtgacatttctcactgtcacgtccacagcctttaatcgcaggagaaggcagctatccaccaggtacccagaggcaagggggggccaggagatgatagaccccctctcaccccaccagcccatccctcctgcactgttcccaagaagctgcggccagcgcagttcactggacgttagtgggggctcaggtcctgggtgctggcgctgagggtccgaggggccttgtccaggtgccagctgggaaactggagacaggcacaggggatggttggaggggaggtgaggggcaagtgttacatccaccctccagctccaggtccagcctggcagccaactatccaaccccctcgcctctaccccaagtaaaacccatctttgctcctgtcctgggtctcttctgacaccaacccaccacctgctgactccaccactggcccgaccgccctgcctttgcctcatctctgcacctacccacatggcctcctctatttttgacccagatgtccccctcacctgagtcccaggagcccttggagcatccac

SEQ ID NO: 1588 - DNA, 6761 bp, Homo sapiens
  source 1..6761: mol_type = genomic DNA
agagcttccatggagtcagggcagccggctcgacggattgccatggcgccgctgctggagtacgagcgacagctggtgctggaactgctcgacactgacgggctagtagtgtgcgcccgcgggctcggcgcggaccggctcctctaccactttctccagctgcactgccacccagcctgcctggtgctggtgctcaacacgcagccggccgaggaggagtattttatcaatcagctgaagatagaaggagttgaacacctccctcgccgtgtaacaaatgaaatcacaagcaacagtcgctatgaagtttacacacaaggtggtgttatatttgcgacaagtaggatacttgtggttgacttcttgactgatagaataccttcagatttaattactggcatcttggtgtatagagcccacagaataatcgagtcttgtcaagaagcattcatcttgcgcctctttcgccagaaaaacaaacgtggttttattaaagctttcacagacaatgctgttgcctttgatactggtttttgtcatgtggaaagagtgatgagaaatctttttgtgaggaaactgtatctgtggccaaggttccatgtagcagtaaactcatttttagaacagcacaaacctgaagttgtagaaatccatgtttctatgacacctaccatgcttgctatacagactgctatactggacattttaaatgcatgtctaaaggaactaaaatgccataacccatcgcttgaagtggaagatttatctttagaaaatgctattggaaaaccttttgacaagacaatccgccattatctggatcctttgtggcaccagcttggagccaagactaaatccttagttcaggatttgaagatattacgaactttgctgcagtatctctctcagtatgattgtgtcacatttcttaatcttctggaatctctgagagcaacggaaaaagcttttggtcagaattcaggttggctgtttcttgactccagcacctcgatgtttataaatgctcgagcaagggtttatcatcttccagatgccaaaatgagtaaaaaagaaaaaatatctgaaaaaatggaaattaaagaaggggaagaaacaaaaaaggaactggtcctagaaagcaacccaaagtgggaggcactgactgaagtattaaaagaaattgaggcagaaaataaggagagtgaagctcttggtggtccaggtcaagtactgatttgtgcaagtgatgaccgaacatgttcccagctgagagactatatcactcttggagcggaggccttcttattgaggctctacaggaaaacctttgagaaggatagcaaagctgaagaagtctggatgaaatttaggaaggaagacagttcaaagagaattaggaaatctcacaaaagacctaaagacccccaaaacaaagaacgggcttctaccaaagaaagaaccctcaaaaagaaaaaacggaagttgaccttaactcaaatggtaggaaaacctgaagaactggaagaggaaggagatgtcgaggaaggatatcgtcgagaaataagcagtagcccagaaagctgcccggaagaaattaagcatgaagaatttgatgtaaatttgtcatcggatgctgctttcggaatcctgaaagaacccctcactatcatccatccgcttctgggttgcagcgacccctatgctctgacaagggtactacatgaagtggagccaagatacgtggttctttatgacgcagagctaacctttgttcggcagcttgaaatttacagggcgagtaggcctgggaaacctctgagggtttactttcttatatacggaggttcaactgaggaacaacgctatctcactgctttgcggaaagaaaaggaagcttttgaaaaactcataagggaaaaagcaagcatggttgtccctgaagaaagagaaggcagagatgaaacaaacttagacctagtaagaggcacagcatctgcagatgtttccactgacactcggaaagccggtggccaggaacagaatggtacacagcaaagcatagttgtggatatgcgtgaatttcgaagtgagcttccatctctgatccatcgtcggggcattgacattgaacccgtgactttagaggttggagattacatcctcactccagaaatgtgcgtggagcgcaagagtatcagtgatttaatcggctctttaaataacggccgcctctacagccagtgcatctccatgtcccgctactacaagcgtcccgtgcttctgattgagtttgaccctagcaagcctttctctctcacttcccgaggtgccttgtttcaggagatctccagcaatgacattagttccaaactcactcttcttacacttcacttccccagactacggattctctggtgcccctctcctcatgcaacggcggagttgtttgaggagctgaaacaaagcaagccacagcctgatgcggcgacagcactggccattacagcagattctgaaacccttcccgagtcagagaagtataatcctggtccccaagacttcttgttaaaaatgccaggggtgaatgccaaaaactgccgctccttgatgcaccacgttaagaacatcgcagaattagcagccctgtcacaagacgagctcacgagtattctggggaatgctgcaaatgccaaacagctttatgatttcattcacacctcttttgcagaagtcgtatcaaaaggaaaagggaaaaagtgaacagtgatggctgttttcttatcccatgcctgtacttttcagcggctccttgccagacatcataggtcattattaattattggtttgctatttcattcttttccaatgctcttaatgattgtacggtggaccagaagccaggattcctctctgaactctgcagttaggcatcacttgaacttgcctgtgcctgctctttttcctccctgcaccgtctatgccgggcttagcatgtttctttttaaatgaggtttgtcaggatcaggtaaagttcctacaagtgattacagaaggtagaaactttacctgatcctaacagatctcatttagaaaggaatatgctaagcctggcatggacggtgcagggagggaaaagagcaggcacaagaaagctaccatttttaacagtccttgttatctagtgcaacataaataacagtcttaattgcacttatacccatgtcctgtggctctccaaatctggtctttgctgttgtgtctgctggacgcttgaactgatgtttgtgtaggaaatcatgttctgaccctttgtctacaaaggagccttctggaacactgagaagaaacatctctttgccattcctgaccagttctctctaccacattttcttcagctccatacttctgcctgtctgctctaaggaaatttcatggagccttcctactactaattcaagacagtctcctcaaaaactggttgactagtcttctaatgaccctaacatatgtagcatatactataatttcattgttccaaattagtatttttaaagcaaaatgaattacctgtttgcaaaagttaatgatgaaggagctcttagaattctcaatttttgcacatattcagtctcctaatatcagagatccctaagtccagctggctagttacagagttttttcagacttcctcgtttctcagctcttatatcctaagacaccagcatcatatcctctagaaatacaacctaattggcagtgagccgagatcgcaccactgcacccctgcctgggcgacagagtgagactttgtctctattacaaaaagaaaagaaaagaaatacaacctaagctcacctgcctgtgattcctcatttctcaccatcctgtgccagggtggctacttctctctgtgaggactcaaatacaagccaatgagtggcccactaagcttttaagatttgattttcctgccttgagataaaaaggagtgtaggtaaatgaaagatcaatgtatggaatatataaaaatacgaaagaaatatatacgtttaaaaatccataaagaaaaaaatctcattctaaacctgattaagttggctttttacgtaagtgtacaaataggatattcacagcatctttgtgcagtttttaaacttttatatttaaacattattaagttggcttttgttcacatgttgagtaatgggtagtaaattttctacctcaggagctgatatagacatcagttctgctagccatatcacatattttaatgtttcatcaacatcagctgtttttttgtttgctacactatttgaactaatagacagtggatcatgtaacacaaaattgtcttcaactttaacaaaattgtcattgttatttttttttgagacagagtctccctctgttgcccaggctggagtgcagtggcgcaatctcggctcactgcaacctcgcctgctgggttcaagcagttctcccacctcagcctcccaagtagctgggattataggtgtgcaccaccagacccggctaatttttgtatttttagtagagacggggtttcaccatgttggccaggctggtctcaaactactgacctcaggtgatccacccaccttggcctcccaaagtgctgagataacaggcgtgagccaccgcacccacccaacaaaattatttttaactgtcgtttctgaactgaacctctcacattggcatcttgatttattggtacttaacagtatatatggattttgaactctacacaagggtataaccagaatgaattgaggggtatcaagaaccagattggttacagtagaactctgtaagatgatgtggagagtaaggaaaaggagaagaaataaaaattagtttaagatggaataaagatttgggctgctaattttttcccaggattcaaaatatacccgctagaatggaaaacaaaaatttgaatgattacaacattatcgttaacattcaattttgtatttattgttttattgaatatagttcagagtatattaaaatagacctaccacttcaaatgataatgattattataatgtctcttcaccctattctagcacttctgcttgcagtatgtggtttctatttttttcctcttgtataattccacttgcttttaattgttgtttcattatataaaaggaacatcttcccatagcatattctatgaaaggggtttcattccaagttgagttttcaaaaaaaaggtcttcctaaagctaccattttcaaccgtccttgttatctagtacaacataaataacagtcttaaaaattgcactaataccagtgcccccctggctctccaaatctgttctttgctcttgtatctgctggacgcttgaagacaggtgcactgtctcgtatgtatttgaattatgaacagtaatttctaatgaattctaaaatggtcattgtaagtgaaagcctctcgctaccacttcctcttccaactacataaatatatttcaatgtatttccagttttggaaagttttcaatacatacatcaagtgtttacttagatttttataaaaattttttttacaatctaataatctttggtaaaggaactagagatgcatgcagttgcaaaattaatgtatttattttccagcataattttattaacttcactttttttctctctagtaaatatccagtgtacttatgaactcatgtttggctcttttaaaaccttttctaaaagctagatcagcatttttctattttacaagttttttgtataaaaaggtgaacatatgagatattgtgagaaatcattttaagtttcatttaaatcatggtgcctcttttgatactttcttaaaattgtgcaagaagaaatcatttttagtagtggtcataaatattatccttttggcagtaagctattactaattcagcctgaagctcggtagacaatatgtctacatgtgtttgagtacatcctggatacagtttcccagctcatgagggactgaaaatagtcttattcatcaacccactaggatgtgaagggttaagtctagatttggtcgcattgaaaccccacaatatagaattaataaatggccttcagtaggaaaacctacactaaagcaaatccgaagaagtggggcagggggaaagaggcattactggtctttccttttgttttgcaagcataatttgattttcctttggctcagaaaactcatttggggaaattctcttttgtgttcagtttaacctagaaaggtcctcttgaaaaaccaacattttaggaaagttcttttttcaggatggagtatattaaaattaagccaggctttgacgtgaattatcacttttctttattattttgttttctattttggtttatagctatttctggttcagttctgaacttcagcacttaatcatccttatcaaccaggcttttggtagcctaaaccgctatgctgttgtttttttaatttaaagatgtataagccaaaatttggatgggagtgagacataactgatttatatgaattttaacagagttgtatttgtgtgtgtttaataaaatatatatttattcagtactttcctcagtattttatgggcaaagtaaaaataacaatgcatagtgaaagggcatatattaccagcagtaataattcaaaatcctgaaaatgtttcattttttttgtttttgttatgcagaataaacaaggcagaaatgctctttgaaccact

SEQ ID NO: 1589 - DNA, 2865 bp, Homo sapiens
  source 1..2865: mol_type = genomic DNA
gctcgacggattgccatggcgccgctgctggagtacgagcgacagctggtgctggaactgctcgacactgacgggctagtagtgtgcgcccgcgggctcggcgcggaccggctcctctaccactttctccagctgcactgccacccagcctgcctggtgctggtgctcaacacgcagccggccgaggaggagtattttatcaatcagctgaagatagaaggagttgaacacctccctcgccgtgtaacaaatgaaatcacaagcaacagtcgctatgaagtttacacacaaggtggtgttatatttgcgacaagtaggatacttgtggttgacttcttgactgatagaataccttcagatttaattactggcatcttggtgtatagagcccacagaataatcgagtcttgtcaagaagcattcatcttgcgcctctttcgccagaaaaacaaacgtggttttattaaagctttcacagacaatgctgttgcctttgatactggtttttgtcatgtggaaagagtgatgagaaatctttttgtgaggaaactgtatctgtggccaaggttccatgtagcagtaaactcatttttagaacagcacaaacctgaagttgtagaaatccatgtttctatgacacctaccatgcttgctatacagactgctatactggacattttaaatgcatgtctaaaggaactaaaatgccataacccatcgcttgaagtggaagatttatctttagaaaatgctattggaaaaccttttgacaagacaatccgccattatctggatcctttgtggcaccagcttggagccaagactaaatccttagttcaggatttgaagatattacgaactttgctgcagtatctctctcagtatgattgtgtcacatttcttaatcttctggaatctctgagagcaacggaaaaagcttttggtcagaattcaggttggctgtttcttgactccagcacctcgatgtttataaatgctcgagcaagggtttatcatcttccagatgccaaaatgagtaaaaaagaaaaaatatctgaaaaaatggaaattaaagaaggggaagaaacaaaaaaggaactggtcctagaaagcaacccaaagtgggaggcactgactgaagtattaaaagaaattgaggcagaaaataaggagagtgaagctcttggtggtccaggtcaagtactgatttgtgcaagtgatgaccgaacatgttcccagctgagagactatatcactcttggagcggaggccttcttattgaggctctacaggaaaacctttgagaaggatagcaaagctgaagaagtctggatgaaatttaggaaggaagacagttcaaagagaattaggaaatctcacaaaagacctaaagacccccaaaacaaagaacgggcttctaccaaagaaagaaccctcaaaaagaaaaaacggaagttgaccttaactcaaatggtaggaaaacctgaagaactggaagaggaaggagatgtcgaggaaggatatcgtcgagaaataagcagtagcccagaaagctgcccggaagaaattaagcatgaagaatttgatgtaaatttgtcatcggatgctgctttcggaatcctgaaagaacccctcactatcatccatccgcttctgggttgcagcgacccctatgctctgacaagggtactacatgaagtggagccaagatacgtggttctttatgacgcagagctaacctttgttcggcagcttgaaatttacagggcgagtaggcctgggaaacctctgaggtactttcttatatacggaggttcaactgaggaacaacgctatctcactgctttgcggaaagaaaaggaagcttttgaaaaactcataagggaaaaagcaagcatggttgtccctgaagaaagagaaggcagagatgaaacaaacttagacctagtaagaggcacagcatctgcagatgtttccactgacactcggaaagccggtggccaggaacagaatggtacacagcaaagcatagttgtggatatgcgtgaatttcgaagtgagcttccatctctgatccatcgtcggggcattgacattgaacccgtgactttagaggttggagattacatcctcactccagaaatgtgcgtggagcgcaagagtatcagtgatttaatcggctctttaaataacggccgcctctacagccagtgcatctccatgtcccgctactacaagcgtcccgtgcttctgattgagtttgaccctagcaagcctttctctctcacttcccgaggtgccttgtttcaggagatctccagcaatgacattagttccaaactcactcttcttacacttcacttccccagactacggattctctggtgcccctctcctcatgcaacggcggagttgtttgaggagctgaaacaaagcaagccacagcctgatgcggcgacagcactggccattacagcagattctgaaacccttcccgagtcagagaagtataatcctggtccccaagacttcttgttaaaaatgccaggggtgaatgccaaaaactgccgctccttgatgcaccacgttaagaacatcgcagaattagcagccctgtcacaagacgagctcacgagtattctggggaatgctgcaaatgccaaacagctttatgatttcattcacacctcttttgcagaagtcgtatcaaaaggaaaagggaaaaagtgaacagtgatggctgttttcttatcccatgcctgtacttttcagcggctccttgccagacatcataggtcattattaattattggtttgctatttcattcttttccaatgctcttaatgattgtacggtggaccaga

SEQ ID NO: 1590 - DNA, 1110 bp, Homo sapiens
  source 1..1110: mol_type = genomic DNA
agagcttccatggagtcagggcagccggctcgacggattgccatggcgccgctgctggagtacgagcgacagctggtgctggaactgctcgacactgacgggctagtagtgtgcgcccgcgggctcggcgcggaccggctcctctaccactttctccagctgcactgccacccagcctgcctggtgctggtgctcaacacgcagccggccgaggaggagtattttatcaatcagctgaagatagaaggagttgaacacctccctcgccgtgtaacaaatgaaatcacaagcaacagtcgctatgaagtttacacacaaggtggtgttatatttgcgacaagtaggatacttgtggttgacttcttgactgatagaataccttcagatttaattactggcatcttggtgtatagagcccacagaataatcgagtcttgtcaagaagcattcatcttgcgcctctttcgccagaaaaacaaacgtggttttattaaagctttcacagacaatgctgttgcctttgatactggtttttgtcatgtggaaagagtgatgagaaatctttttgtgaggaaactgtatctgtggccaaggttccatgtagcagtaaactcatttttagaacagcacaaacctgaagttgtagaaatccatgtttctatgacacctaccatgcttgctatacagactgctatactggacattttaaatgcatgtctaaaggaactaaaatgccataacccatcgcttgaagtggaagatttatctttagaaaatgctattggaaaaccttttgacaagacaatccgccattatctggatcctttgtggcaccagcttggagccaagactaaatccttagttcaggatttgaagatattacgaactttgctgcagtatctctctcagtatgattgtgtcacatttcttaatcttctggaatctctgagagcaacggaaaaagcttttggtcagaattcaggttggctgtttcttgactccagcacctcgatgtttataaatgctcgagcaagggtttatcatcttccagatgccaaaatgagtaaaaaagaaaaaatatctgaaaaaataaaaaaaaaaaaaaaaaaa

SEQ ID NO: 1591 - DNA, 5076 bp, Homo sapiens
  source 1..5076: mol_type = genomic DNA
tttgccaacgttaaggacgcgcagctgtgacacagccccaggaagtccagatgacatgtgcccaaggtggttggggcacagattggttttatacattttagggagacaggagacatcaatcaacatatgtaagtacactggttccttccagaaaggtggggacaactcggaagcaggaagggcttctaggtcacaggtagatgagagacaaaaggctgcatacgagtttctgataagcctttccaaaggagacaatcagaatatgcatctatctcagtgagcagaaggatgactgactagaatgggaggcaggttttgccctgagcagttcccagcttgacttttcccttttgcttagtaattttgggaccctaacattttcacaggctttaaattttattattctttagttactacgtgctagcatataaataaatagtacaaaaccaagaaggcatccaccttttggttgtctcttcacgtgtaaaacaacactttgtgttaagtatcttcacacacggcggcgcaaaggtagaaaccgatactaaaaaagcgtgtagaaaatagttcccagcctgggcaacacagggagacctcatttctacaaaaataattcgccaagcatagtggtgcgcacctgcggtcccagctacttgagaggctgagatgggaaagttgcttgagctcgggcagcaggagttccaggctgcagtgagctaagaatgcgccactggactccagtatgggcgacagcgtgagaccctgtctcaaacaaaaacaaaagcccgttactccaccaagaaggcgcttttgcacattgttttaatgcttaacgccttcaggatgccagcgtgacggaagcaagtaaccaccaaggcatcaccactggcgctaaacttctcacttccggagtgctgcaagcgcagaaaatatacgtcatgtgcggaggcggagcttccgccctgcgcgtcgtattagacggaaaccgagcgggcccatttttcatgggtttgcggacccaccagcgaaggcgggaggtgtcgcagggacatcttctggctgtttccgtcgcctgcgtggcccttgcaccccggtcttccattagcggcgcagacgtttgggcctaagcgctgggcgaggcgaggccctgcccctccccgccaacggccattctctggacctgtctttcttccgggaggcggtgacagctgctgagacgtgttgcagccagagtctctccgctttaatgcgctcccattagtgccgtcccccactggaaaaccgtggcttctgtattatttgccatctttgttgtgtaggagcagggagggcttcctcccggggtcctaggcggcggtgcagtccgtcgtagaagaattagagtagaagttgtcggggtccgctcttaggacgcagccgcctcatgggggtccaggggctctggaagctgctggagtgctccgggcggcaggtcagccccgaagcgctggaagggaagatcctggctgttgatattagcatttggttaaaccaagcacttaaaggagtccgggatcgccatgggaactcaatagaaaatcctcatcttctcactttgtttcatcggctctgcaaactcttattttttcgaattcgtcctatttttgtgtttgatggggatgctccactattgaagaaacagactttggtgaagagaaggcagagaaaggacttagcgtccagtgactccaggaaaacgacagagaagcttctgaaaacatttttgaaaagacaagccatcaaaactgccttcagaagcaaaagagatgaagcactacccagtcttacccaagttcgaagagaaaacgacctctatgttttgcctcctttacaagaggaagaaaaacacagttcagaagaggaagatgaaaaagaatggcaagaaagaatgaatcaaaaacaagcattacaggaagagttctttcataatcctcaagcgatagatattgagtctgaggacttcagcagcctgccccctgaagtaaagcatgaaatcttgactgatatgaaagagttcaccaagcgcagaagaacattatttgaagcaatgccagaggagtctgatgacttttcacagtaccaactcaaaggcttgcttaaaaagaactatctgaaccagcatatagaacatgtccaaaaggaaatgaatcagcaacattcaggacacatccgaaggcagtatgaagatgaagggggctttctgaaggaggtagagtcaaggagagtggtctctgaagacacttcacattacatcttgataaaaggtattcaagctaagacagttgcagaagtggattcagagtctcttccttcttccagcaaaatgcacggcatgtcttttgacgtgaagtcatctccatgtgaaaaactgaagacagagaaagagcctgatgctacccctccttctccaagaactttactagctatgcaagctgccctgctgggaagtagctcagaagaggagctggagagtgaaaatcgaaggcaggcccgtgggaggaacgcacctgctgctgtagacgaaggctccatatcaccccggactctttcagccattaagagagctcttgacgatgacgaagatgtaaaagtgtgtgctggggatgatgtgcagacgggagggccaggagcagaagaaatgcgtataaacagctccaccgagaacagtgatgaaggacttaaagtgagagatggaaaaggaataccgtttactgcaacacttgcgtcatctagtgtgaactctgcagaggagcacgtagccagcactaatgaggggagagagcccacagactcagttccaaaagaacaaatgtcacttgttcacgtggggactgaagcctttccgataagtgatgagtctatgattaaggacagaaaagatcggctgcctctggagagtgcagtggttagacatagtgacgcacctgggctcccgaatggaagggaactgacaccggcatctccaacttgtacaaattctgtgtcaaagaatgaaacacatgctgaagtgcttgagcagcagaacgaactttgcccatatgagagtaaattcgattcttctcttctttcaagtgatgatgaaacaaaatgtaaaccgaattctgcttctgaagtcattggccctgtcagtttgcaagaaacaagtagcatagtaagtgtcccttcagaggcagtagataatgtggaaaatgtggtgtcatttaatgctaaagagcatgagaattttctggaaaccatccaagaacagcagaccactgaatctgcaggccaggatttaatttccattccaaaggccgtggaaccaatggaaattgactcggaagaaagtgaatctgatggaagtttcattgaagtgcaaagtgtgattagtgatgaggaacttcaagcagaattccctgaaacttccaaacctccctcagaacaaggcgaagaggaactggtaggaactagggagggagaagcccctgctgagtccgagagcctcctgagggacaactctgagagggacgacgtggatggtgagccacaggaagctgagaaagatgcggaagattcgctccatgaatggcaagatattaatttggaggagttggaaactctggagagcaacctcttagcacagcagaattcactgaaagctcaaaaacagcagcaagaacggatcgctgctactgtcaccggacagatgttcctggaaagccaggaactcctgcgcctgttcggcattccctacatccaggctcccatggaagcagaggcgcagtgcgccatcctggacctgactgatcagacttccggaaccatcactgatgacagtgatatctggctgtttggagcgcggcatgtctatagaaacttttttaataaaaacaagtttgtagaatattatcaatatgtggactttcacaatcaattgggattggaccggaataagttaataaatttggcttatttgcttggaagtgattataccgaaggaataccaactgtgggttgtgtaaccgccatggaaattctcaatgaattccctgggcatggcctggaacctctcctaaaattctcagaatggtggcatgaagctcaaaaaaatccaaagataagacctaatcctcatgacaccaaagtgaaaaaaaaattacggacattgcaactcacccctggctttcctaacccagctgttgccgaggcctacctcaaacccgtggtggatgactcgaagggatcctttctgtgggggaaacctgatctcgacaaaattagagaattttgtcagcggtatttcggctggaacagaacgaagacagatgaatctctgtttcctgtattaaagcaactcgatgcccagcagacacagctccgaattgattccttctttagattagcacaacaggagaaagaagatgctaaacgtattaagagccagagactaaacagagctgtgacatgtatgctaaggaaagagaaagaagcagcagccagcgaaatagaagcagtttctgttgccatggagaaagaatttgagctacttgataaggcaaaaggaaaaacccagaagagaggcataacaaataccttagaagagtcatcaagcctgaaaagaaagaggctttcagattctaaaggaaagaatacatgcggtggatttttgggggagacctgcctctcagaatcatctgatggatcttcaagtgaagatgctgaaagttcatctttaatgaatgtacaaaggagaacagctgcgaaagagccaaaaaccagtgcttcagattcgcagaactcagtgaaggaagctcccgtgaagaatggaggtgcgaccaccagcagctctagtgatagtgatgacgatggagggaaagagaagatggtcctcgtgaccgccagatctgtgtttgggaagaaaagaaggaaactaagacgtgcgaggggaagaaaaaggaaaacctaattaaaaaatatgtatcctctataattagttatgacagccatttgtaatgaatttgtcgcaaagacgtaataaaattaactggtggcacggtc

SEQ ID NO: 1592 - DNA, 2986 bp, Homo sapiens
  source 1..2986: mol_type = genomic DNA
caccacaagctggatgtgagtgtgcttatggatcctgaggtataactgtctcaggccttttcagcaacagtgccaggaagtatatttatgtatacatatacatgcacacacacatctatatttatttctatgtctatctgtactaaaatccatgagtttatactgacatctgcaattccatggggttcagtctagcctcctgcttctttatagtttccctaacaatgagaaacattgctccccttatcctcaatacatttacatctgcttattctccctggatatgtaaccatctccccctcccactggcctcctccttggccctgctctcttctttgcttcagctgtgtccttggtgccagctcccagtccctgagagccccctcctctgttctgattgtctccttaaacccagctggacaggccttgccagccctctccacctacagggaaggaaggcaaccattaaatatattttaaggagaaggaaagacagtaagacagtaagagaggagagaagggaagtggaagaggaagaactatttcttagtcacagctttattctgtgctgtgtaaatagcataaaaacatactgagcaacttccatgattgtttatatactttgataatcctcctttttgaatttttaaaacaatgtcagttaacttagaacatatttatataaagcgaatatacaaatcttaagagagtttcctactttcaaagacagtgccagtttacctaattgaaaaggcttgttttgaagttacaggcatttgtgattacatttatttattaataacgctactattacatgtattctgttatagtcatatctttcctttttaggatgtagcatttttcaggttcctccagaaagctcttgatgattgcaggatcattttaatgttttgattgtagatgaagtgaccttttaattttggtacaggaagtttcattgaagtgcaaagtgtgattagtgatgaggaacttcaagcagaattccctgaaacttccaaacctccctcagaacaaggcgaagaggaactggtaggaactagggagggagaagcccctgctgagtccgagagcctcctgagggacaactctgagagggacgacgtggatggtgagccacaggaagctgagaaagatgcggaagattcgctccatgaatggcaagatattaatttggtaataccgtaacattgtgtttcgacttcttgctgaggaagccaggttaagtaggttttgagttttaaggagttggtggatgagtatttagtagctatttgcagtacatcttgtggttgctgatggcttcatttttgtgtaggttactggctgggatagactccgttttccatgtggtttagtgatgaatctctaaagatattacagagtcttggttagacatccagtggagtacttcctaaggagaaagagcttattggtaatttcagtcagactaaatgcaggctttttgtaaacaaaactcatttggattattaatataaatctataaatgaaaaaacattttataggaggagttggaaactctggagagcaacctcttagcacagcagaattcactgaaagctcaaaaacagcagcaagaacggatcgctgctactgtcaccggacagatgttcctggaaagccaggaactcctgcgcctgttcggcattccctacatccaggctcccatggaagcagaggcgcagtgcgccatcctggacctgactgatcagacttccggaaccatcactgatgacagtgatatctggctgtttggagcgcggcatgtctatagaaacttttttaataaaaacaagtttgtagaatattatcaatatgtggactttcacaatcaattgggattggaccggaataagttaataaatttggcttatttgcttggaagtgattataccgaaggaataccaactgtgggttgtgtaaccgccatggaaattctcaatgaattccctgggcatggcctggaacctctcctaaaattctcagaatggtggcatgaagctcaaaaaaatccaaagataagacctaatcctcatgacaccaaagtgaaaaaaaaattacggacattgcaactcacccctggctttcctaacccagctgttgccgaggcctacctcaaacccgtggtggatgactcgaagggatcctttctgtgggggaaacctgatctcgacaaaattagagaattttgtcagcggtatttcggctggaacagaacgaagacagatgaatctctgtttcctgtattaaagcaactcgatgcccagcagacacagctccgaattgattccttctttagattagcacaacaggagaaagaagatgctaaacgtattaagagccagagactaaacagagctgtgacatgtatgctaaggaaagagaaagaagcagcagccagcgaaatagaagcagtttctgttgccatggagaaagaatttgagctacttgataaggcaaaaggaaaaacccagaagagaggcataacaaataccttagaagagtcatcaagcctgaaaagaaagaggctttcagattctaaaggaaagaatacatgcggtggatttttgggggagacctgcctctcagaatcatctgatggatcttcaagtgaagatgctgaaagttcatctttaatgaatgtacaaaggagaacagctgcgaaagagccaaaaaccagtgcttcagattcgcagaactcagtgaaggaagctcccgtgaagaatggaggtgcgaccaccagcagctctagtgatagtgatgacgatggagggaaagagaagatggtcctcgtgaccgccagatctgtgtttgggaagaaaagaaggaaactaagacgtgcgaggggaagaaaaaggaaaacctaattaaaaaatatgtatcctctataattagttatgacagccatttgtaatgaatttgtcgcaaagacgtaataaaattaact

SEQ ID NO: 1593 - DNA, 4008 bp, Homo sapiens
  source 1..4008: mol_type = genomic DNA
gtttccgtcgcctgcgtggcccttgcaccccggtcttccattagcggcgcagacgtttgggcctaagcgctgggcgaggcgaggccctgcccctccccgccaacggccattctctggacctgtctttcttccgggaggcggtgacagctgctgagacgtgttgcagccagagtctctccgctttaatgcgctcccattagtgccgtcccccactggaaaaccgtggcttctgtattatttgccatctttgttgtgtaggagcagggagggcttcctcccggggtcctaggcggcggtgcagtccgtcgtagaagaattagagtagaagttgtcggggtccgctcttaggacgcagccgcctcatgggggtccaggggctctggaagctgctggagtgctccgggcggcaggtcagccccgaagcgctggaagggaagatcctggctgttgaaacttcccagtggccgtatcacctcctgccattccttttgtcctgctgcactggcttcctggagatagggaccgtctctgttttgttcatggctgaattgtttggtgtatattagcatttggttaaaccaagcacttaaaggagtccgggatcgccatgggaactcaatagaaaatcctcatcttctcactttgtttcatcggctctgcaaactcttattttttcgaattcgtcctatttttgtgtttgatggggatgctccactattgaagaaacagactttgagatgaagcactacccagtcttacccaagttcgaagagaaaacgacctctatgttttgcctcctttacaagaggaagaaaaacacagttcagaagaggaagatgaaaaagaatggcaagaaagaatgaatcaaaaacaagcattacaggaagagttctttcataatcctcaagcgatagatattgagtctgaggacttcagcagcctgccccctgaagtaaagcatgaaatcttgactgatatgaaagagttcaccaagcgcagaagaacattatttgaagcaatgccagaggagtctgatgacttttcacagtaccaactcaaaggcttgcttaaaaagaactatctgaaccagcatatagaacatgtccaaaaggaaatgaatcagcaacattcaggacacatccgaaggcagtatgaagatgaagggggctttctgaaggaggtagagtcaaggagagtggtctctgaagacacttcacattacatcttgataaaaggtattcaagctaagacagttgcagaagtggattcagagtctcttccttcttccagcaaaatgcacggcatgtcttttgacgtgaagtcatctccatgtgaaaaactgaagacagagaaagagcctgatgctacccctccttctccaagaactttactagctatgcaagctgccctgctgggaagtagctcagaagaggagctggagagtgaaaatcgaaggcaggcccgtgggaggaacgcacctgctgctgtagacgaaggctccatatcaccccggactctttcagccattaagagagctcttgacgatgacgaagatgtaaaagtgtgtgctggggatgatgtgcagacgggagggccaggagcagaagaaatgcgtataaacagctccaccgagaacagtgatgaaggacttaaagtgagagatggaaaaggaataccgtttactgcaacacttgcgtcatctagtgtgaactctgcagaggagcacgtagccagcactaatgaggggagagagcccacagactcagttccaaaagaacaaatgtcacttgttcacgtggggactgaagcctttccgataagtgatgagtctatgattaaggacagaaaagatcggctgcctctggagagtgcagtggttagacatagtgacgcacctgggctcccgaatggaagggaactgacaccggcatctccaacttgtacaaattctgtgtcaaagaatgaaacacatgctgaagtgcttgagcagcagaacgaactttgcccatatgagagtaaattcgattcttctcttctttcaagtgatgatgaaacaaaatgtaaaccgaattctgcttctgaagtcattggccctgtcagtttgcaagaaacaagtagcatagtaagtgtcccttcagaggcagtagataatgtggaaaatgtggtgtcatttaatgctaaagagcatgagaattttctggaaaccatccaagaacagcagaccactgaatctgcaggccaggatttaatttccattccaaaggccgtggaaccaatggaaattgactcggaagaaagtgaatctgatggaagtttcattgaagtgcaaagtgtgattagtgatgaggaacttcaagcagaattccctgaaacttccaaacctccctcagaacaaggcgaagaggaactggtaggaactagggagggagaagcccctgctgagtccgagagcctcctgagggacaactctgagagggacgacgtggatggtgagccacaggaagctgagaaagatgcggaagattcgctccatgaatggcaagatattaatttggaggagttggaaactctggagagcaacctcttagcacagcagaattcactgaaagctcaaaaacagcagcaagaacggatcgctgctactgtcaccggacagatgttcctggaaagccaggaactcctgcgcctgttcggcattccctacatccaggctcccatggaagcagaggcgcagtgcgccatcctggacctgactgatcagacttccggaaccatcactgatgacagtgatatctggctgtttggagcgcggcatgtctatagaaacttttttaataaaaacaagtttgtagaatattatcaatatgtggactttcacaatcaattgggattggaccggaataagttaataaatttggcttatttgcttggaagtgattataccgaaggaataccaactgtgggttgtgtaaccgccatggaaattctcaatgaattccctgggcatggcctggaacctctcctaaaattctcagaatggtggcatgaagctcaaaaaaatccaaagataagacctaatcctcatgacaccaaagtgaaaaaaaaattacggacattgcaactcacccctggctttcctaacccagctgttgccgaggcctacctcaaacccgtggtggatgactcgaagggatcctttctgtgggggaaacctgatctcgacaaaattagagaattttgtcagcggtatttcggctggaacagaacgaagacagatgaatctctgtttcctgtattaaagcaactcgatgcccagcagacacagctccgaattgattccttctttagattagcacaacaggagaaagaagatgctaaacgtattaagagccagagactaaacagagctgtgacatgtatgctaaggaaagagaaagaagcagcagccagcgaaatagaagcagtttctgttgccatggagaaagaatttgagctacttgataaggcaaaaggaaaaacccagaagagaggcataacaaataccttagaagagtcatcaagcctgaaaagaaagaggctttcagattctaaaggaaagaatacatgcggtggatttttgggggagacctgcctctcagaatcatctgatggatcttcaagtgaagatgctgaaagttcatctttaatgaatgtacaaaggagaacagctgcgaaagagccaaaaaccagtgcttcagattcgcagaactcagtgaaggaagctcccgtgaagaatggaggtgcgaccaccagcagctctagtgatagtgatgacgatggagggaaagagaagatggtcctcgtgaccgccagatctgtgtttgggaagaaaagaaggaaactaagacgtgcgaggggaagaaaaaggaaaacctaattaaaaaatatgtatcctctataattagttatgacagccatttgtaatgaatttgtcgcaaagacgtaataaaattaactggtggcacggtc

SEQ ID NO: 1594 - DNA, 4928 bp, Homo sapiens
  source 1..4928: mol_type = genomic DNA
caaggtgctgtaaaatctttctgcacaagtgcctcaggagcacccttgggtcccaaaggagatggtcattatccatggagttgtccagtgactcatacacgggaaaaaatttatgccatctgttcggactatgcctttctcaaccaggcgacctcaatctataaaactccaaatccatcccgctctccttgcctccctgatagtacctctttatctgctggaaataattcatcaagatacattggtatcccgactagtacatcggaaattatctacaatgaagaaaatagcttggaaaacttatccaacagcctgggcaagctacctctcgcatgggaaattgataaatctgaatttgatggggtgaccacaaattcgaaacacaaatcaggcaatgcaaagaaacaagtttccaagagaaaaacttcagataaaaagggaagatatcagaaggaatgtcctcagcattctcctcttgaagatattaaacagcggaaagtattagacctcagacgatggtactgcataagccgaccacagtataagacttcttgtggcatctcttcattaatttcttgttggaatttcttatacagcacaatgggagctggaaaccttccacctattacccaagaagaagctttacatattctgggctttcaacctccatttgaagatattaggtttggtcctttcacggggaatacaacacttatgaggtggtttagacaaattaatgaccacttccatgtaaaaggatgctcttatgttctatataagcctcatgggaagaataaaacagcaggagaaactgcttcaggggccctgtcaaagttaacccgtggattgaaagatgaatcgctggcttatatctatcattgccaaaatcattatttttgtccaattggcttcgaagcaacccctgttaaagctaataaagcattcagcaggggacctctctcaccacaggaagttgaatattggatcttaattggagaatcaagtagaaaacatcctgccattcactgtaaaaaatgggcagatattgttactgatctaaacactcaaaatccagaatacctggatatccggcacttagagaggggactgcagtatagaaaaacaaagaaggttgggggaaatttgcattgcatcatagcattccagagacttaactggcaaagatttggcctttggaactttccatttggaaccattagacaagaatcacaacctccaacacatgcccagggaattgccaaatctgagagtgaagacaatatttccaagaagcagcatgggcgtctgggccggtctttcagtgctagtttccatcaggactcggcatggaaaaagatgtctaatattagcatttggttaaaccaagcacttaaaggagtccgggatcgccatgggaactcaatagaaaatcctcatcttctcactttgtttcatcggctctgcaaactcttattttttcgaattcgtcctatttttgtgtttgatggggatgctccactattgaagaaacagactttggtgaagagaaggcagagaaaggacttagcgtccagtgactccaggaaaacgacagagaagcttctgaaaacatttttgaaaagacaagccatcaaaactgccttcagaagcaaaagagatgaagcactacccagtcttacccaagttcgaagagaaaacgacctctatgttttgcctcctttacaagaggaagaaaaacacagttcagaagaggaagatgaaaaagaatggcaagaaagaatgaatcaaaaacaagcattacaggaagagttctttcataatcctcaagcgatagatattgagtctgaggacttcagcagcctgccccctgaagtaaagcatgaaatcttgactgatatgaaagagttcaccaagcgcagaagaacattatttgaagcaatgccagaggagtctgatgacttttcacagtaccaactcaaaggcttgcttaaaaagaactatctgaaccagcatatagaacatgtccaaaaggaaatgaatcagcaacattcaggacacatccgaaggcagtatgaagatgaagggggctttctgaaggaggtagagtcaaggagagtggtctctgaagacacttcacattacatcttgataaaaggtattcaagctaagacagttgcagaagtggattcagagtctcttccttcttccagcaaaatgcacggcatgtcttttgacgtgaagtcatctccatgtgaaaaactgaagacagagaaagagcctgatgctacccctccttctccaagaactttactagctatgcaagctgccctgctgggaagtagctcagaagaggagctggagagtgaaaatcgaaggcaggcccgtgggaggaacgcacctgctgctgtagacgaaggctccatatcaccccggactctttcagccattaagagagctcttgacgatgacgaagatgtaaaagtgtgtgctggggatgatgtgcagacgggagggccaggagcagaagaaatgcgtataaacagctccaccgagaacagtgatgaaggacttaaagtgagagatggaaaaggaataccgtttactgcaacacttgcgtcatctagtgtgaactctgcagaggagcacgtagccagcactaatgaggggagagagcccacagactcagttccaaaagaacaaatgtcacttgttcacgtggggactgaagcctttccgataagtgatgagtctatgattaaggacagaaaagatcggctgcctctggagagtgcagtggttagacatagtgacgcacctgggctcccgaatggaagggaactgacaccggcatctccaacttgtacaaattctgtgtcaaagaatgaaacacatgctgaagtgcttgagcagcagaacgaactttgcccatatgagagtaaattcgattcttctcttctttcaagtgatgatgaaacaaaatgtaaaccgaattctgcttctgaagtcattggccctgtcagtttgcaagaaacaagtagcatagtaagtgtcccttcagaggcagtagataatgtggaaaatgtggtgtcatttaatgctaaagagcatgagaattttctggaaaccatccaagaacagcagaccactgaatctgcaggccaggatttaatttccattccaaaggccgtggaaccaatggaaattgactcggaagaaagtgaatctgatggaagtttcattgaagtgcaaagtgtgattagtgatgaggaacttcaagcagaattccctgaaacttccaaacctccctcagaacaaggcgaagaggaactggtaggaactagggagggagaagcccctgctgagtccgagagcctcctgagggacaactctgagagggacgacgtggatggtgagccacaggaagctgagaaagatgcggaagattcgctccatgaatggcaagatattaatttggaggagttggaaactctggagagcaacctcttagcacagcagaattcactgaaagctcaaaaacagcagcaagaacggatcgctgctactgtcaccggacagatgttcctggaaagccaggaactcctgcgcctgttcggcattccctacatccaggctcccatggaagcagaggcgcagtgcgccatcctggacctgactgatcagacttccggaaccatcactgatgacagtgatatctggctgtttggagcgcggcatgtctatagaaacttttttaataaaaacaagtttgtagaatattatcaatatgtggactttcacaatcaattgggattggaccggaataagttaataaatttggcttatttgcttggaagtgattataccgaaggaataccaactgtgggttgtgtaaccgccatggaaattctcaatgaattccctgggcatggcctggaacctctcctaaaattctcagaatggtggcatgaagctcaaaaaaatccaaagataagacctaatcctcatgacaccaaagtgaaaaaaaaattacggacattgcaactcacccctggctttcctaacccagctgttgccgaggcctacctcaaacccgtggtggatgactcgaagggatcctttctgtgggggaaacctgatctcgacaaaattagagaattttgtcagcggtatttcggctggaacagaacgaagacagatgaatctctgtttcctgtattaaagcaactcgatgcccagcagacacagctccgaattgattccttctttagattagcacaacaggagaaagaagatgctaaacgtattaagagccagagactaaacagagctgtgacatgtatgctaaggaaagagaaagaagcagcagccagcgaaatagaagcagtttctgttgccatggagaaagaatttgagctacttgataaggcaaaaggaaaaacccagaagagaggcataacaaataccttagaagagtcatcaagcctgaaaagaaagaggctttcagattctaaaggaaagaatacatgcggtggatttttgggggagacctgcctctcagaatcatctgatggatcttcaagtgaagatgctgaaagttcatctttaatgaatgtacaaaggagaacagctgcgaaagagccaaaaaccagtgcttcagattcgcagaactcagtgaaggaagctcccgtgaagaatggaggtgcgaccaccagcagctctagtgatagtgatgacgatggagggaaagagaagatggtcctcgtgaccgccagatctgtgtttgggaagaaaagaaggaaactaagacgtgcgaggggaagaaaaaggaaaacctaattaaaaaatatgtatcctctataattagttatgacagccatttgtaatgaatttgtcgcaaagacgtaataaaattaactggtggcacggtc

SEQ ID NO: 1595 - DNA, 1142 bp, Homo sapiens
  source 1..1142: mol_type = genomic DNA
ggaaaccgagcgggcccatttttcatgggtttgcggacccaccagcgaaggcgggaggtgtcgcagggacatcttctggctgtttccgtcgcctgcgtggcccttgcaccccggtcttccattagcggcgcagacgtttgggcctaagcgctgggcgaggcgaggccctgcccctccccgccaacggccattctctggacctgtctttcttccgggaggcggtgacagctgctgagacgtgttgcagccagagtctctccgctttaatgcgctcccattagtgccgtcccccactggaaaaccgtggcttctgtattatttgccatctttgttgtgtaggagcagggagggcttcctcccggggtcctaggcggcggtgcagtccgtcgtagaagaattagagtagaagttgtcggggtccgctcttaggacgcagccgcctcatgggggtccaggggctctggaagctgctggagtgctccgggcggcaggtcagccccgaagcgctggaagggaagatcctggctgttgatattagcatttggttaaaccaagcacttaaaggagtccgggatcgccatgggaactcaatagaaaatcctcatcttctcactttgtttcatcggctctgcaaactcttattttttcgaattcgtcctatttttgtgtttgatggggatgctccactattgaagaaacagactttggtgaagagaaggcagagaaaggacttagcgtccagtgactccaggaaaacgacagagaagcttctgaaaacatttttgaaaagacaagccatcaaaactgccttcagaagcaaaagagatgaagcactacccagtcttacccaagttcgaagagaaaacgacctctatgttttgcctcctttacaagaggaagaaaaacacagttcagaagaggaagatgaaaaagaatggcaagaaagaatgaatcaaaaacaagcattacaggaagagttctttcataatcctcaagcgatagatattgagtctgaggacttcagcagcctgccccctgaagtaaagcatgaaatcttgactgatatgaaagagttcaccaagcgcagaagaacattatttgaagcaatgccagaggtatatcttcctctgctgcagccctag

SEQ ID NO: 1596 - DNA, 8008 bp, Homo sapiens
  source 1..8008: mol_type = genomic DNA
tgggttccaaggcggctggcggcggtagcgtctctgtttccttgtgggcgctcgcgcggccctgggtagtctgtagagaatgccaaatgagggaatcccccactcaagtcaaactcaggagcaagactgtttacagagtcaacctgtcagtaataatgaagaaatggcaatcaagcaagaaagtggtggtgatggggaggtggaggagtacctctcctttcgttctgtgggtgacgggctgtccacctctgctgtggggtgcgcatcagcagctccgaggagagggccagccctgctgcacatcgaccgacatcagatccaggcagtagagcctagcgcccaggcccttgagctgcagggtttgggtgtggacgtctatgaccaggacgtgctggaacagggagtgcttcagcaggtggacaatgccatccatgaggccagccgtgcctcccagctcgttgacgtggagaaggagtatcggtcggtcctggatgacctcacgtcatgtacgacatccctaaggcaaatcaataaaattattgaacagcttagccctcaagctgccaccagcagagacatcaacaggaaactagattctgtaaaacgacagaagtataataaggaacaacagctaaaaaagatcactgcaaaacaaaagcatctccaggccatccttggaggagcagaggtgaaaattgaactagatcacgccagtctggaggaggatgcagagccggggccatccagtcttggcagcatgctcatgcctgtccaggagactgcctgggaagagctcatccgcactggccagatgacaccttttggtacccagatccctcagaaacaggagaaaaagcccagaaaaatcatgcttaatgaagcatcaggcttcgaaaagtatttggcagatcaagcaaaactgtcttttgaaaggaagaagcaaggttgtaataaaagagcagctagaaaagctccagccccagtcacgcctccagccccagtgcaaaataaaaacaaaccaaacaagaaagccagagttctgtccaaaaaagaggagcgtttgaaaaagcacatcaagaaactccagaagagggctttgcagttccaggggaaagtgggattgccaaaggcaaggagaccttgggagtcagacatgaggccagaggcagagggagactctgagggtgaagagtctgagtatttccccacagaggaggaggaagaggaggaagatgacgaggtggagggggcagaggcggacctgtctggagatggtactgactatgagctgaagcctctgcccaagggcgggaaacggcagaagaaagtgccagtgcaggagattgatgatgactttttcccaagttctggggaagaagctgaagctgcttctgtaggagaaggaggaggaggaggtcggaaagtgggaagataccgagatgatggagatgaagattattataagcagcggttaaggagatggaataaactgagactgcaggacaaagagaaacgtctgaagctggaggacgattctgaggaaagtgatgctgaatttgacgaaggttttaaagtgccaggttttctgttcaaaaagctttttaagtaccagcagacaggtgttaggtggctgtgggaattgcactgccagcaggcaggaggaattctgggagatgaaatgggattgggcaagaccatccagataattgccttcttggcaggtctgagctacagcaagatcaggactcgtggttcaaattacaggtttgaggggttgggtccaactgtaattgtctgtccaacaacagtgatgcatcagtgggtgaaggaatttcacacgtggtggcctccgttcagagtggcaattctacatgaaaccggttcctatacccacaaaaaggagaaactaattcgagatgttgctcattgtcatggaattttgatcacatcttactcctacattcgattgatgcaggatgacattagcaggtatgactggcactatgtgatcttggacgaaggacacaaaattcgaaatccaaatgctgctgtcacccttgcttgcaaacagtttcgcacccctcatcggatcattctgtctggctcaccgatgcaaaataacctccgagagctgtggtcgctctttgacttcatcttcccgggaaagttaggcacgttgcctgtgtttatggagcagttctccgtccccatcaccatggggggatattcaaatgcttccccagtacaggtcaaaactgcttacaagtgtgcatgtgtcttacgagataccataaatccatacctactgcggagaatgaagtcagatgtcaagatgagcctttctttgccagataaaaatgaacaggtcttattttgccgtcttacagatgagcagcataaagtctaccaaaatttcgttgattccaaagaagtttacaggattctcaatggagagatgcagattttctccggacttatagccctaagaaaaatttgcaaccaccctgatctcttttctggaggtcccaagaatctcaaaggtcttcctgatgatgaactagaagaagatcagtttgggtactggaaacgttctgggaaaatgattgttgttgagtctttgttgaaaatatggcacaagcagggtcagcgagtattgctgttttctcagtcaaggcagatgctggacatacttgaagtattccttagagcccaaaagtatacctatctcaagatggatggtaccactacaatagcttcaagacagccactgattacgagatacaatgaggacacatccatatttgtgtttcttctgaccacgcgggtgggcggcttaggtgtcaacctgacgggggcaaacagagttgtcatctatgacccagactggaacccaagcacggacacgcaggcccgggagcgagcatggagaataggccagaagaagcaagtgactgtgtacaggctcctgactgcgggcaccattgaagaaaagatctaccaccgacaaatcttcaagcagtttttgacaaatagagtgctaaaagacccaaaacaaaggcggtttttcaaatccaatgatctctatgagctatttactctgactagtcctgatgcatcccagagcactgaaacaagtgcaatttttgcaggaactggatcagatgttcagacacccaaatgccatctaaaaagaaggattcaaccagcctttggagcagaccatgatgttccaaaacgcaagaagttccctgcttctaacatatctgtaaatgatgccacatcatctgaagagaaatctgaggctaaaggagctgaagtaaatgcagtaacttctaatcgaagtgatcctttgaaagatgaccctcacatgagtagtaatgtaactagcaatgataggcttggagaagagacaaatgcagtatctggaccagaagagttgtcagtgattagtggaaatggggaatgttcaaattcttcaggaacaggcaaaacttctatgccatctggtgatgaaagcattgatgaaaagttaggtctttcttacaaaagagaaagacccagccaggctcaaacagaagctttttgggagaataaacaaatggaaaataatttttataagcacaagtcaaaaacaaaacatcatagtgtggcagaagaagagaccctggagaaacatctgagaccaaagcaaaagcctaagaactctaagcattgcagagacgccaagtttgaaggaactcgaattccacacctggtgaagaaaaggcgttaccagaagcaagacagtgaaaacaagagtgaggccaaggaacagagcaatgacgattatgttttggaaaagcttttcaaaaaatcagttggcgtgcacagtgtcatgaagcacgatgccatcatggatggagccagcccagattatgtactggtggaggcagaagccaaccgagtggcccaggatgccctgaaagcactgaggctctctcgtcagcggtgtctgggagcagtgtctggtgttcccacctggactggccacagggggatttctggtgcaccagcaggaaaaaagagtagatttggtaagaaaaggaattctaacttctctgtgcagcatccttcatcaacatctccaacagagaagtgccaggatggcatcatgaaaaaggagggaaaagataatgtccctgagcattttagtggaagagcagaagatgcagactcttcatccgggcccctcgcttcctcctcactcttggctaaaatgagagctagaaaccacctgattctgccagagcgtttagaaagtgaaagcgggcacctgcaggaagcttctgccctgctgcccaccacagaacacgatgaccttctggtggagatgagaaacttcatcgctttccaggcccacactgatggccaggccagcaccagggagatactgcaggagtttgaatccaagttatctgcatcacagtcttgtgtcttccgagaactattgagaaatctgtgcactttccatagaacttctggtggtgaaggaatttggaaactcaagccagaatactgctaaacaacattgcttcctaaactttcaagtccctttttctaacgggcatttctgattattaatttattattaataatcatgtttgtcaatggaagttggctgcacttgatgtttgtttgcatgatgtctacctcagaattaaaactttaaggaagaagaaactcttctctgaaagttaaaagttttaataatgctagctaaaggagaaaatacttggattgatttttttttttttggcaatctaattatattgtaaatcaggtacctaacagttactccttggagcacatttgttcctttacccaaaagatgctgtcagggagcacagttagaagtttgcagaacagaaatctcaatatttttttttattggtgctaaaaacaggtcttacattcagtcagacctgttcaataagttcatcaatatctgataacagcattattttgatgcttaaactttaaacatttatatttaccatttgccacccacaaaggtcaggtttgttatttgttgtttgataattatattaattttcttggaaagatcctcttttcaaggtactggtaaattggtgagtatttttattagtaaagcatgaaatagtatggtaataaatgataagacatgtatttgtggaaagctgtagggtattcagtttaccctggctttcctttaagcagagggcatctttttctctcctacagtcacaaaatgtgttatcattaaaaaaaatcaaattaaagccaaaagtaggtacataaaaaccacacacatgcatgcacacaaacatcactgcagcccacagcagacccagccgttgttaccatgaagtgacaccactccaggcctctcttgtctgcaggctggcaggctgtcttctctccagttgccttcgtcttgcgcctgcctttgcattccttgcgacgggctttcttgtttctgcggtttggattccagccaaggctgtttgtatctcactactgtttatgtgtttgtggttctgtgatggtgttgctttgatcctcagtttattttcttacccatgtttttcttgtttccttctcaggatgattttatcatctcatctttgaagtgttgttttccgaaattcatcgtattcctgaaatttcttcttagctgtcttagtgcagtttgtttcttggatttgtattctctggcatgctcttttcctctctctcatttttctgtagtatgcctgccctcctaccctgctatttctttacatctctctcatgcttaacatggatagctgtgtccagatcttctgtctgctcatccatgtgactcagagaggagggttctgggcaggggggccttgccggactgcatgagaggacatgagttttgctttctctgctctaatattttgcttaagccaagaatccttttcttagagatgttctatatgattcctgtcaggattttctagttttttttggattatagcttgttcatttcttttgtttttagtttggtttatatataatgagggaagaagatgattacattatttttgtcactttgccatcattgtttagaagtcatagaaagaatttttaaataggccaataagtcttaaacttgagtacttggcttagaagaaagtcaaaactccttcctttttgactaagtggtttgtttctggggagctcttaatttctatttttataatcattagcctataaggaaattgtgtcttccttgttctcagggtgatctgctgaccttgttcactcatgaagcatttgggtatcatacttatagtgtctgaaacataaactgtattgagctagacaaggtatagcctcctcttcaagtagcaaatactatcaaaagctataatgcagtaggagcaaggtggtccttgttccagtttttgtctcagttctgctgctgatgtaccatgatcttgggaaggtggtgtctcagtgtggagatctgacacattgttaccgtgcctcctggctggagggacttggagaacaatgcagttaagtagaatggttttaacaatacagagaaatttattcatttagataaaaatctgatttttagaactttaaaagctttgtacagtgtaaatagatttaatgtatttaacatgctttatcagcacaaataaaggattttaaaattttgtcaaaaaattaaatgttaatactatcaccattaaaaatgttcaagcaatagtctgcctccccacccccacaccatcttgcacctgttccacagctaagtacagccctaggtttggtgtgtattctccatgcatttagagaatcacatgacacagactgctgctataatgtcattttcccattcttcctttactaataaaatttttgagttttacctggacgtctggctgctcagcttaagactacttctcagcctctcttatagttaattgtggccatatgactaagttttaaacttcccaattggccctttaaagaagcagggtatgcactctccttgacattcccctttcttgctggctgggaggccaatgggagcttcagtagtgacctggcatctcaagagatggaagtgatgtgttgaggaaggagaagttggcctgccagtcttgaactgctctcctttgacctgttatttaagagtaaaataaaatactgacttgcttaagctactgtcttttgaagtctattatagcaattagtttgctttaaatatgtaatttatattaatggccttataccatccttattttgcaactaacttttcatttaatattatatgcaagacatttctattcctgtaagtatagctctgcctgcacagaattgttggattaatgatgtagattttaaatgtcagtggatgtagcagaattgcttgcatcaattcaccctccataaaaggacccatttctccaaacccttgccaacagtaagtggtatcaatatcgataggttgttttgttttgttttaaccagtctcgtgattgaaagtaccttgttttcacttgaatttccctgattacgtacaaaatcaaacatttccatgtttattggccatttgtagatctctaccgtacattgcctattagtgttatgttggcctagttttcctgtgggttgtttatcttttaggattgctcccctaaacaaaaacaaaaaggcagttattccaatgatcaacaaatattcttttctccaccagtttaaaatgtcagctttcaactcatcacatgctaagttgtctatttctgtcctgtggatccaggtgttggttctaccaaccacactcctcacgctgtcatttggtgctttgcattgtgttttgccattcatgggcaagttccttttcctttctccccctcttcagtgtcttatacttgggtgttttctgttccagctgaatcaagaattagtttattaaattccagtaaaattgtggtgttctttt

SEQ ID NO: 1597 - DNA, 4983 bp, Homo sapiens
  source 1..4983: mol_type = genomic DNA
cagcagccctttcacagacatcttctaatgacaacagcactgcattcagagaaactaattcgagatgttgctcattgtcatggaattttgatcacatcttactcctacattcgattgatgcaggatgacattagcaggtatgactggcactatgtgatcttggacgaaggacacaaaattcgaaatccaaatgctgctgtcacccttgcttgcaaacagtttcgcacccctcatcggatcattctgtctggctcaccgatgcaaaataacctccgagagctgtggtcgctctttgacttcatcttcccgggaaagttaggcacgttgcctgtgtttatggagcagttctccgtccccatcaccatggggggatattcaaatgcttccccagtacaggtcaaaactgcttacaagtgtgcatgtgtcttacgagataccataaatccatacctactgcggagaatgaagtcagatgtcaagatgagcctttctttgccagataaaaatgaacagattttctccggacttatagccctaagaaaaatttgcaaccaccctgatctcttttctggaggtcccaagaatctcaaaggtcttcctgatgatgaactagaagaagatcagtttgggtactggaaacgttctgggaaaatgattgttgttgagtctttgttgaaaatatggcacaagcagggtcagcgagtattgctgttttctcagtcaaggcagatgctggacatacttgaagtattccttagagcccaaaagtatacctatctcaagatggatggtaccactacaatagcttcaagacagccactgattacgagatacaatgaggacacatccatatttgtgtttcttctgaccacgcgggtgggcggcttaggtgtcaacctgacgggggcaaacagagttgtcatctatgacccagactggaacccaagcacggacacgcaggcccgggagcgagcatggagaataggccagaagaagcaagtgactgtgtacaggctcctgactgcgggcaccattgaagaaaagatctaccaccgacaaatcttcaagcagtttttgacaaatagagtgctaaaagacccaaaacaaaggcggtttttcaaatccaatgatctctatgagctatttactctgactagtcctgatgcatcccagagcactgaaacaagtgcaatttttgcaggaactggatcagatgttcagacacccaaatgccatctaaaaagaaggattcaaccagcctttggagcagaccatgatgttccaaaacgcaagaagttccctgcttctaacatatctgtaaatgatgccacatcatctgaagagaaatctgaggctaaaggagctgaagtaaatgcagtaacttctaatcgaagtgatcctttgaaagatgaccctcacatgagtagtaatgtaactagcaatgataggcttggagaagagacaaatgcagtatctggaccagaagagttgtcagtgattagtggaaatggggaatgttcaaattcttcaggaacaggcaaaacttctatgccatctggtgatgaaagcattgatgaaaagttaggtctttcttacaaaagagaaagacccagccaggctcaaacagaagctttttgggagaataaacaaatggaaaataatttttataagcacaagtcaaaaacaaaacatcatagtgtggcagaagaagagaccctggagaaacatctgagaccaaagcaaaagcctaagaactctaagcattgcagagacgccaagtttgaaggaactcgaattccacacctggtgaagaaaaggcgttaccagaagcaagacagtgaaaacaagagtgaggccaaggaacagagcaatgacgattatgttttggaaaagcttttcaaaaaatcagttggcgtgcacagtgtcatgaagcacgatgccatcatggatggagccagcccagattatgtactggtggaggcagaagccaaccgagtggcccaggatgccctgaaagcactgaggctctctcgtcagcggtgtctgggagcagtgtctggtgttcccacctggactggccacagggggatttctggtgcaccagcaggaaaaaagagtagatttggtaagaaaaggaattctaacttctctgtgcagcatccttcatcaacatctccaacagagaagtgccaggatggcatcatgaaaaaggagggaaaagataatgtccctgagcattttagtggaagagcagaagatgcagactcttcatccgggcccctcgcttcctcctcactcttggctaaaatgagagctagaaaccacctgattctgccagagcgtttagaaagtgaaagcgggcacctgcaggaagcttctgccctgctgcccaccacagaacacgatgaccttctggtggagatgagaaacttcatcgctttccaggcccacactgatggccaggccagcaccagggagatactgcaggagtttgaatccaagttatctgcatcacagtcttgtgtcttccgagaactattgagaaatctgtgcactttccatagaacttctggtggtgaaggaatttggaaactcaagccagaatactgctaaacaacattgcttcctaaactttcaagtccctttttctaacgggcatttctgattattaatttattattaataatcatgtttgtcaatggaagttggctgcacttgatgtttgtttgcatgatgtctacctcagaattaaaactttaaggaagaagaaactcttctctgaaagttaaaagttttaataatgctagctaaaggagaaaatacttggattgatttttttttttttggcaatctaattatattgtaaatcaggtacctaacagttactccttggagcacatttgttcctttacccaaaagatgctgtcagggagcacagttagaagtttgcagaacagaaatctcaatatttttttttattggtgctaaaaacaggtcttacattcagtcagacctgttcaataagttcatcaatatctgataacagcattattttgatgcttaaactttaaacatttatatttaccatttgccacccacaaaggtcaggtttgttatttgttgtttgataattatattaattttcttggaaagatcctcttttcaaggtactggtaaattggtgagtatttttattagtaaagcatgaaatagtatggtaataaatgataagacatgtatttgtggaaagctgtagggtattcagtttaccctggctttcctttaagcagagggcatctttttctctcctacagtcacaaaatgtgttatcattaaaaaaaatcaaattaaagccaaaagtaggtacataaaaaccacacacatgcatgcacacaaacatcactgcagcccacagcagacccagccgttgttaccatgaagtgacaccactccaggcctctcttgtctgcaggctggcaggctgtcttctctccagttgccttcgtcttgcgcctgcctttgcattccttgcgacgggctttcttgtttctgcggtttggattccagccaaggctgtttgtatctcactactgtttatgtgtttgtggttctgtgatggtgttgctttgatcctcagtttattttcttacccatgtttttcttgtttccttctcaggatgattttatcatctcatctttgaagtgttgttttccgaaattcatcgtattcctgaaatttcttcttagctgtcttagtgcagtttgtttcttggatttgtattctctggcatgctcttttcctctctctcatttttctgtagtatgcctgccctcctaccctgctatttctttacatctctctcatgcttaacatggatagctgtgtccagatcttctgtctgctcatccatgtgactcagagaggagggttctgggcaggggggccttgccggactgcatgagaggacatgagttttgctttctctgctctaatattttgcttaagccaagaatccttttcttagagatgttctatatgattcctgtcaggattttctagttttttttggattatagcttgttcatttcttttgtttttagtttggtttatatataatgagggaagaagatgattacattatttttgtcactttgccatcattgtttagaagtcatagaaagaatttttaaataggccaataagtcttaaacttgagtacttggcttagaagaaagtcaaaactccttcctttttgactaagtggtttgtttctggggagctcttaatttctatttttataatcattagcctataaggaaattgtgtcttccttgttctcagggtgatctgctgaccttgttcactcatgaagcatttgggtatcatacttatagtgtctgaaacataaactgtattgagctagacaaggtatagcctcctcttcaagtagcaaatactatcaaaagctataatgcagtaggagcaaggtggtccttgttccagtttttgtctcagttctgctgctgatgtaccatgatcttgggaaggtggtgtctcagtgtggagatctgacacattgttaccgtgcctcctggctggagggacttggagaacaatgcagttaagtagaatggttttaacaatacagagaaatttattcatttagataaaaatctgatttttagaactttaaaagctttgtacagtgtaaatagatttaatgtatttaacatgctttatcagcacaaataaaggattttaaaattttgtcaaaaaattaaatgttaatactatcaccattaaaaatgttcaagcaatagtctgcctccccacccccacaccatcttgcacctgttccacagctaagtacagccctaggtttggtgtgtattctccatgcatttagagaatcacatgacacagactgctgctataatgtcattttcccattcttcctttactaataaaatttttgagtttta

SEQ ID NO: 1598 - DNA, 660 bp, Homo sapiens
  source 1..660: mol_type = genomic DNA
aggtgcgcgcgtggcggagggggaacagagaagcaggacagctctccatccttcccgtgttcagtcgtgggagacaacaagagaggtcacagcctggcgaccaaaaagtagtctgtagagaatgccaaatgagggaatcccccactcaagtcaaactcaggagcaagactgtttacagagtcaacctgtcagtaataatgaagaaatggcaatcaagcaagaaagtggtggtgatggggaggtggaggagtacctctcctttcgttctgtgggtgacgggctgtccacctctgctgtggggtgcgcatcagcagctccgaggagagggccagccctgctgcacatcgaccgacatcagatccaggcagtagagcctagcgcccaggcccttgagctgcagggtttgggtgtggacgtctatgaccaggacgtgctggaacagggagtgcttcagcaggtggacaatgccatccatgaggccagccgtgcctcccagctcgttgacgtggagaaggagtatcggtcggtcctggatgacctcacgtcatgtacgacatccctaaggcaaatcaataaaattattgaacagcttagccctcaagctgccaccagcagagacatcaacaggaaactagattctgtaaaacgacagaagtataa

SEQ ID NO: 1599 - DNA, 2256 bp, Homo sapiens
  source 1..2256: mol_type = genomic DNA
aagtgatgctgaatttgacgaaggttttaaagtgccaggttttctgttcaaaaagctttttaagtaccagcagacaggtgttaggtggctgtgggaattgcactgccagcaggcaggaggaattctgggagatgaaatgggattgggcaagaccatccagataattgccttcttggcaggtctgagctacagcaagatcaggactcgtggttcaaattacaggtttgaggggttgggtccaactgtaattgtctgtccaacaacagtgatgcatcagtgggtgaaggaatttcacacgtggtggcctccgttcagagtggcaattctacatgaaaccggttcctatacccacaaaaaggagaaactaattcgagatgttgctcattgtcatggaattttgatcacatcttactcctacattcgattgatgcaggatgacattagcaggtatgactggcactatgtgatcttggacgaaggacacaaaattcgaaatccaaatgctgctgtcacccttgcttgcaaacagtttcgcacccctcatcggatcattctgtctggctcaccgatgcaaaataacctccgagagctgtggtcgctctttgacttcatcttcccgggaaagttaggcacgttgcctgtgtttatggagcagttctccgtccccatcaccatggggggatattcaaatgcttccccagtacaggtcaaaactgcttacaagtgtgcatgtgtcttacgagataccataaatccatacctactgcggagaatgaagtcagatgtcaagatgagcctttctttgccagataaaaatgaacaggtcttattttgccgtcttacagatgagcagcataaagtctaccaaaatttcgttgattccaaagaagtttacaggattctcaatggagagatgcaggaggttcttcagtcattcacatctattcatctccatgaatctccccttaacttcttcaggtctttccaagttagggggtctagatcacactatccaggaaagggaatgcaaactacacttggaattgtaaattttctagtagtcacattaaaaaggaaaaagagaaacagattttctccggacttatagccctaagaaaaatttgcaaccaccctgatctcttttctggaggtcccaagaatctcaaaggtcttcctgatgatgaactagaagaagatcagtttgggtactggaaacgttctgggaaaatgattgttgttgagtctttgttgaaaatatggcacaagcagggtcagcgagtattgctgttttctcagtcaaggcagatgctggacatacttgaagtattccttagagcccaaaagtatacctatctcaagatggatggtaccactacaatagcttcaagacagccactgattacgagatacaatgaggacacatccatatttgtgtttcttctgaccacgcgggtgggcggcttaggtgtcaacctgacgggggcaaacagagttgtcatctatgacccagactggaacccaagcacggacacgcaggcccgggagcgagcatggagaataggccagaagaagcaagtgactgtgtacaggctcctgactgcgggcaccattgaagaaaagatctaccaccgacaaatcttcaagcagtttttgacaaatagagtgctaaaagacccaaaacaaaggcggtttttcaaatccaatgatctctatgagctatttactctgactagtcctgatgcatcccagagcactgaaacaagtgcaatttttgcaggaactggatcagatgttcagacacccaaatgccatctaaaaagaaggattcaaccagcctttggagcagaccatgatgttccaaaacgcaagaagttccctgcttctaacatatctgtaaatgatgccacatcatctgaagagaaatctgaggctaaaggagctgaagtaaatgcagtaacttctaatcgaagtgatcctttgaaagatgaccctcacatgagtagtaatgtaactagcaatgataggcttggagatactgcaggagtttgaatccaagttatctgcatcacagtcttgtgtcttccgagaactattgagaaatctgtgcactttccatagaacttctggtggtgaaggaatttggaaactcaagccagaatactgctaaacaacattgcttcctaaactttcaagtccctttttctaacgggcatttctgattattaatttattattaataatcatgtttgtcaatgg

SEQ ID NO: 1600 - DNA, 2932 bp, Homo sapiens
  source 1..2932: mol_type = genomic DNA
aaaatgagattttaggtagacatacctataggtaccagatagtaagtatttggacagcaaaacaacaaaactatcttcttttaaggtaccagcagacaggtgttaggtggctgtgggaattgcactgccagcaggcaggaggaattctgggagatgaaatgggattgggcaagaccatccagataattgccttcttggcaggtctgagctacagcaagatcaggactcgtggttcaaattacaggagaaactaattcgagatgttgctcattgtcatggaattttgatcacatcttactcctacattcgattgatgcaggatgacattagcaggtatgactggcactatgtgatcttggacgaaggacacaaaattcgaaatccaaatgctgctgtcacccttgcttgcaaacagtttcgcacccctcatcggatcattctgtctggctcaccgatgcaaaataacctccgagagctgtggtcgctctttgacttcatcttcccgggaaagttaggcacgttgcctgtgtttatggagcagttctccgtccccatcaccatggggggatattcaaatgcttccccagtacaggtcaaaactgcttacaagtgtgcatgtgtcttacgagataccataaatccatacctactgcggagaatgaagtcagatgtcaagatgagcctttctttgccagataaaaatgaacaggtcttattttgccgtcttacagatgagcagcataaagtctaccaaaatttcgttgattccaaagaagtttacaggattctcaatggagagatgcagattttctccggacttatagccctaagaaaaatttgcaaccaccctgatctcttttctggaggtcccaagaatctcaaaggtcttcctgatgatgaactagaagaagatcagtttgggtactggaaacgttctgggaaaatgattgttgttgagtctttgttgaaaatatggcacaagcagggtcagcgagtattgctgttttctcagtcaaggcagatgctggacatacttgaagtattccttagagcccaaaagtatacctatctcaagatggatggtaccactacaatagcttcaagacagccactgattacgagatacaatgaggacacatccatatttgtgtttcttctgaccacgcgggtgggcggcttaggtgtcaacctgacgggggcaaacagagttgtcatctatgacccagactggaacccaagcacggacacgcaggcccgggagcgagcatggagaataggccagaagaagcaagtgactgtgtacaggctcctgactgcgggcaccattgaagaaaagatctaccaccgacaaatcttcaagcagtttttgacaaatagagtgctaaaagacccaaaacaaaggcggtttttcaaatccaatgatctctatgagctatttactctgactagtcctgatgcatcccagagcactgaaacaagtgcaatttttgcaggaactggatcagatgttcagacacccaaatgccatctaaaaagaaggattcaaccagcctttggagcagaccatgatgttccaaaacgcaagaagttccctgcttctaacatatctgtaaatgatgccacatcatctgaagagaaatctgaggctaaaggagctgaagtaaatgcagtaacttctaatcgaagtgatcctttgaaagatgaccctcacatgagtagtaatgtaactagcaatgataggcttggagaagagacaaatgcagtatctggaccagaagagttgtcagtgattagtggaaatggggaatgttcaaattcttcaggaacaggcaaaacttctatgccatctggtgatgaaagcattgatgaaaagttaggtctttcttacaaaagagaaagacccagccaggctcaaacagaagctttttgggagaataaacaaatggaaaataatttttataagcacaagtcaaaaacaaaacatcatagtgtggcagaagaagagaccctggagaaacatctgagaccaaagcaaaagcctaagaactctaagcattgcagagacgccaagtttgaaggaactcgaattccacacctggtgaagaaaaggcgttaccagaagcaagacagtgaaaacaagagtgaggccaaggaacagagcaatgacgattatgttttggaaaagcttttcaaaaaatcagttggcgtgcacagtgtcatgaagcacgatgccatcatggatggagccagcccagattatgtactggtggaggcagaagccaaccgagtggcccaggatgccctgaaagcactgaggctctctcgtcagcggtgtctgggagcagtgtctggtgttcccacctggactggccacagggggatttctggtgcaccagcaggaaaaaagagtagatttggtaagaaaaggaattctaacttctctgtgcagcatccttcatcaacatctccaacagagaagtgccaggatggcatcatgaaaaaggagggaaaagataatgtccctgagcattttagtggaagagcagaagatgcagactcttcatccgggcccctcgcttcctcctcactcttggctaaaatgagagctagaaaccacctgattctgccagagcgtttagaaagtgaaagcgggcacctgcaggaagcttctgccctgctgcccaccacagaacacgatgaccttctggtggagatgagaaacttcatcgctttccaggcccacactgatggccaggccagcaccagggagatactgcaggagtttgaatccaagttatctgcatcacagtcttgtgtcttccgagaactattgagaaatctgtgcactttccatagaacttctggtggtgaaggaatttggaaactcaagccagaatactgctaaacaacattgcttcctaaactttcaagt

SEQ ID NO: 1601 - DNA, 2017 bp, Homo sapiens
  source 1..2017: mol_type = genomic DNA
gtcatggcgacgtccagtgctccagccggtgtgaggacacgatatgctggggtttttgtccgcacgccaaacgggtttggaggaccctcttcgccttcggagagcagagtcaacacggagagttttgggactggaattaaataaagacagagatgttgaaagaatccacggcggtggaattaacacccttgacattgaacctgttgaagggagatacatgttatcaggtggttcagatggtgtgattgtactttatgaccttgagaactccagcagacaatcttattacacatgtaaagcagtgtgttccattggcagagatcatcctgatgttcacagatacagtgtggagactgtacagtggtatcctcatgacactggcatgttcacatcaagctcatttgataaaactctgaaagtatgggatacaaatacattacaaactgcagatgtatttaattttgaggaaacagtttatagtcatcatatgtctccagtctccaccaagcactgtttggtagcagttggtactagaggacccaaagtacaactttgtgacttgaagtctggatcctgttctcacattctacagggtcacagacaagaaatattagcagtttcctggtctccacgttatgactatatcttggcaacagcaagtgctgacagtagagtaaaattatgggatgtgagaagagcatcaggatgtttgattactcttgatcaacataatgggaaaaagtcacaagctgttgaatcagcaaacactgctcataatgggaaagttaatggcttatgttttacaagtgatggacttcacctcctcactgttggtacagataatcgaatgaggctctggaatagttccaatggagaaaacacacttgtgaactatggaaaagtttgtaataacagtaaaaaaggattgaaattcactgtctcctgtggctgcagttcagaatttgtttttgtaccatatggtagcaccattgctgtttatacagtttactcaggagaacagataactatgcttaagggacattataaaactgttgactgctgtgtatttcagtcaaatttccaggaactttatagtggtagcagagactgcaacattctggcttgggttccatccttatatgaaccagttcctgatgatgatgagactacaacaaaatcacaattaaatccggcctttgaagatgcctggagcagcagtgatgaagaaggatgaatatcatctttagtacctttttgtctctgctgaaactttttaaatgagactgtgtttttttcaactgtatggtctattcctgacagctaaattagccctaaatgtgggtaatatttttcctcatgttttaaaatgaggttaatatttgcataaaatcctaaaacagacttctgtatagtttatttagtcaaaatgtgttccttgatcccagatgttgtggcctgggaaagccctcattgctacagtacaagtaacacaagtcgttgtacctcagttgtgaccttcagcagattttatgaactataagatgcagtctcagaggatcagcaagtggaggccatcagtattgactttctcttacttgctgtactatcagcctgctcgtttccacctttaagaatgattttgccaagaatgattatatcaaaaatagtagttgaaatggtaacatcaaaattattttattctttcttcttcatgtattcacatttttcagtggtttcatttaattaaccatgctttatgttaaacattttggggctcaatgtctcctactatccaaaatgtgcatcacaggaggcttttaactttgtgaaaatcccatgtttgctttattttattttaatgtcagaaggcagtttgcgctaatgcttgaactctttttctgtgaaactcattaaggtatgaccaaatcctgcctcattaattcaagcagaaaatatcctggcagggaatctggcttaaacatgaaatgctgtaataaaatttctatgttattgtctc

SEQ ID NO: 1602 - DNA, 2236 bp, Homo sapiens
  source 1..2236: mol_type = genomic DNA
gtcatggcgacgtccagtgctccagccggtgtgaggacacgatatgctggggtttttgtccgcacgccaaacgggtttggaggaccctcttcgccttcggagagcagagtcaacacggagagttttgggactggaattaaataaagacagagatgttgaaagaatccacggcggtggaattaacacccttgacattgaacctgttgaagggagataaaatgaagcttcttatccaagatgctcaaggaaataaaatgtgagtcaaggattttatatccagccaaactgatttcagatacaaaaaggacggataaattgtcaacaacacaagaattcagagactgttgttctcattagccattccttaggaatcaaccagagaatgaaatcattcaaccagaatgacaagagagacagcaacttaaggattgacgcatgttatcaggtggttcagatggtgtgattgtactttatgaccttgagaactccagcagacaatcttattacacatgtaaagcagtgtgttccattggcagagatcatcctgatgttcacagatacagtgtggagactgtacagtggtatcctcatgacactggcatgttcacatcaagctcatttgataaaactctgaaagtatgggatacaaatacattacaaactgcagatgtatttaattttgaggaaacagtttatagtcatcatatgtctccagtctccaccaagcactgtttggtagcagttggtactagaggacccaaagtacaactttgtgacttgaagtctggatcctgttctcacattctacagggtcacagacaagaaatattagcagtttcctggtctccacgttatgactatatcttggcaacagcaagtgctgacagtagagtaaaattatgggatgtgagaagagcatcaggatgtttgattactcttgatcaacataatgggaaaaagtcacaagctgttgaatcagcaaacactgctcataatgggaaagttaatggcttatgttttacaagtgatggacttcacctcctcactgttggtacagataatcgaatgaggctctggaatagttccaatggagaaaacacacttgtgaactatggaaaagtttgtaataacagtaaaaaaggattgaaattcactgtctcctgtggctgcagttcagaatttgtttttgtaccatatggtagcaccattgctgtttatacagtttactcaggagaacagataactatgcttaagggacattataaaactgttgactgctgtgtatttcagtcaaatttccaggaactttatagtggtagcagagactgcaacattctggcttgggttccatccttatatgaaccagttcctgatgatgatgagactacaacaaaatcacaattaaatccggcctttgaagatgcctggagcagcagtgatgaagaaggatgaatatcatctttagtacctttttgtctctgctgaaactttttaaatgagactgtgtttttttcaactgtatggtctattcctgacagctaaattagccctaaatgtgggtaatatttttcctcatgttttaaaatgaggttaatatttgcataaaatcctaaaacagacttctgtatagtttatttagtcaaaatgtgttccttgatcccagatgttgtggcctgggaaagccctcattgctacagtacaagtaacacaagtcgttgtacctcagttgtgaccttcagcagattttatgaactataagatgcagtctcagaggatcagcaagtggaggccatcagtattgactttctcttacttgctgtactatcagcctgctcgtttccacctttaagaatgattttgccaagaatgattatatcaaaaatagtagttgaaatggtaacatcaaaattattttattctttcttcttcatgtattcacatttttcagtggtttcatttaattaaccatgctttatgttaaacattttggggctcaatgtctcctactatccaaaatgtgcatcacaggaggcttttaactttgtgaaaatcccatgtttgctttattttattttaatgtcagaaggcagtttgcgctaatgcttgaactctttttctgtgaaactcattaaggtatgaccaaatcctgcctcattaattcaagcagaaaatatcctggcagggaatctggcttaaacatgaaatgctgtaataaaatttctatgttattgtctcc

SEQ ID NO: 1603 - DNA, 1414 bp, Homo sapiens
  source 1..1414: mol_type = genomic DNA
gtcatggcgacgtccagtgctccagccggtgtgaggacacgatatgctggggtttttgtccgcacgccaaacgggtttggaggaccctcttcgccttcggagagcagagtcaacacggagagttttgggactggaattaacacccttgacattgaacctgttgaagggagatacatgttatcaggtggttcagatggtgtgattgtactttatgaccttgagaactccagcagacaatcttattacacatgtaaagcagtgtgttccattggcagagatcatcctgatgttcacagatacagtgtggagactgtacagtggtatcctcatgacactggcatgttcacatcaagctcatttgataaaactctgaaagtatgggatacaaatacattacaaactgcagatgtatttaattttgaggaaacagtttatagtcatcatatgtctccagtctccaccaagcactgtttggtagcagttggtactagaggacccaaagtacaactttgtgacttgaagtctggatcctgttctcacattctacagggtcacagacaagaaatattagcagtttcctggtctccacgttatgactatatcttggcaacagcaagtgctgacagtagagtaaaattatgggatgtgagaagagcatcaggatgtttgattactcttgatcaacataatgggaaaaagtcacaagctgttgaatcagcaaacactgctcataatgggaaagttaatggcttatgttttacaagtgatggacttcacctcctcactgttggtacagataatcgaatgaggctctggaatagttccaatggagaaaacacacttgtgaactatggaaaagtttgtaataacagtaaaaaaggattgaaattcactgtctcctgtggctgcagttcagaatttgtttttgtaccatatggtagcaccattgctgtttatacagtttactcaggagaacagataactatgcttaagggacattataaaactgttgactgctgtgtatttcagtcaaatttccaggaactttatagtggtagcagagactgcaacattctggcttgggttccatccttatatgaaccagttcctgatgatgatgagactacaacaaaatcacaattaaatccggcctttgaagatgcctggagcagcagtgatgaagaaggatgaatatcatctttagtacctttttgtctctgctgaaactttttaaatgagactgtgtttttttcaactgtatggtctattcctgacagctaaattagccctaaatgtgggtaatatttttcctcatgttttaaaatgaggttaatatttgcataaaatcctaaaacagacttctgtatagtttatttagtcaaaatgtgttccttgatcccagatgttgtggcct

SEQ ID NO: 1604 - DNA, 1554 bp, Homo sapiens
  source 1..1554: mol_type = genomic DNA
gagctctgtcatggcgacgtccagtgctccagccggtgtgaggacacgatatgctggggtttttgtccgcacgccaaacgggtttggaggaccctcttcgccttcggagagcagagtcaacacggagagttttgggactggaattaaataaagacagagatgttgaaagaatccacggcggtggaattaacacccttgacattgaacctgttgaagggagatacatgttatcaggtggttcagatggtgtgattgtactttatgaccttgagaactccagcagacaatcttattacacatgtaaagcagtgtgttccattggcagagatcatcctgatgttcacagatacagtgtggagactgtacagtggtatcctcatgacactggcatgttcacatcaagctcatttgataaaactctgaaagtatgggatacaaatacattacaattggtactagaggacccaaagtacaactttgtgacttgaagtctggatcctgttctcacattctacagggtcacagacaagaaatattagcagtttcctggtctccacgttatgactatatcttggcaacagcaagtgctgacagtagagtaaaattatgggatgtgagaagagcatcaggatgtttgattactcttgatcaacataatgggaaaaagtcacaagctgttgaatcagcaaacactgctcataatgggaaagttaatggcttatgttttacaagtgatggacttcacctcctcactgttggtacagataatcgaatgaggctctggaatagttccaatggagaaaacacacttgtgaactatggaaaagtttgtaataacagtaaaaaaggattgaaattcactgtctcctgtggctgcagttcagaatttgtttttgtaccatatggtagcaccattgctgtttatacagtttactcaggagaacagataactatgcttaagggacattataaaactgttgactgctgtgtatttcagtcaaatttccaggaactttatagtggtagcagagactgcaacattctggcttgggttccatccttatatgaaccagttcctgatgatgatgagactacaacaaaatcacaattaaatccggcctttgaagatgcctggagcagcagtgatgaagaaggatgaatatcatctttagtacctttttgtctctgctgaaactttttaaatgagactgtgtttttttcaactgtatggtctattcctgacagctaaattagccctaaatgtgggtaatatttttcctcatgttttaaaatgaggttaatatttgcataaaatcctaaaacagacttctgtatagtttatttagtcaaaatgtgttccttgatcccagatgttgtggcctgggaaagccctcattgctacagtacaagtaacacaagtcgttgtacctcagttgtgaccttcagcagattttatgaactataagatgcagtctcagaggatcagcaagtggaggccatcagtattgactttctcttacttgctgtactatcagcctgctcgtttccaccttt

SEQ ID NO: 1605 - DNA, 3190 bp, Homo sapiens
  source 1..3190: mol_type = genomic DNA
gcctaaggaaacgtgtcgtctggaatgggcttgggggccacgcctgcacatctccgcgagacagagggataaagtgaagatggtgctgttattgttacctcgagtgccacatgcgacctctgagatatgtacacagtcattcttactatcgcactcagccattcttactacgctaaagaagaaataattattcgaggatatttgcctggcccagaagaaacttatgtaaatttcatgaactattatatccgttttcctcggagtgagagaaaactctttttagatatcatctgagaggtagttaatttggcaccatggggatacagggattgctacaatttatcaaagaagcttcagaacccatccatgtgaggaagtataaagggcaggtagtagctgtggatacatattgctggcttcacaaaggagctattgcttgtgctgaaaaactagccaaaggtgaacctactgataggtatgtaggattttgtatgaaatttgtaaatatgttactatctcatgggatcaagcctattctcgtatttgatggatgtactttaccttctaaaaaggaagtagagagatctagaagagaaagacgacaagccaatcttcttaagggaaagcaacttcttcgtgaggggaaagtctcggaagctcgagagtgtttcacccggtctatcaatatcacacatgccatggcccacaaagtaattaaagctgcccggtctcagggggtagattgcctcgtggctccctatgaagctgatgcgcagttggcctatcttaacaaagcgggaattgtgcaagccataattacagaggactcggatctcctagcttttggctgtaaaaaggtaattttaaagatggaccagtttggaaatggacttgaaattgatcaagctcggctaggaatgtgcagacagcttggggatgtattcacggaagagaagtttcgttacatgtgtattctttcaggttgtgactacctgtcatcactgcgtgggattggattagcaaaggcatgcaaagtcctaagactagccaataatccagatatagtaaaggttatcaagaaaattggacattatctcaagatgaatatcacggtaccagaggattacatcaacgggtttattcgggccaacaataccttcctctatcagctagtttttgatcccatcaaaaggaaacttattcctctgaacgcctatgaagatgatgttgatcctgaaacactaagctacgctgggcaatatgttgatgattccatagctcttcaaatagcacttggaaataaagatataaatacttttgaacagatcgatgactacaatccagacactgctatgcctgcccattcaagaagtcatagttgggatgacaaaacatgtcaaaagtcagctaatgttagcagcatttggcataggaattactctcccagaccagagtcgggtactgtttcagatgccccacaattgaaggaaaatccaagtactgtgggagtggaacgagtgattagtactaaagggttaaatctcccaaggaaatcatccattgtgaaaagaccaagaagtgcagagctgtcagaagatgacctgttgagtcagtattctctttcatttacgaagaagaccaagaaaaatagctctgaaggcaataaatcattgagcttttctgaagtgtttgtgcctgacctggtaaatggacctactaacaaaaagagtgtaagcactccacctaggacgagaaataaatttgcaacatttttacaaaggaaaaatgaagaaagtggtgcagttgtggttccagggaccagaagcaggtttttttgcagttcagattctactgactgtgtatcaaacaaagtgagcatccagcctctggatgaaactgctgtcacagataaagagaacaatctgcatgaatcagagtatggagaccaagaaggcaagagactggttgacacagatgtagcacgtaattcaagtgatgacattccgaataatcatattccaggtgatcatattccagacaaggcaacagtgtttacagatgaagagtcctactcttttgagagcagcaaatttacaaggaccatttcaccacccactttgggaacactaagaagttgttttagttggtctggaggtcttggagatttttcaagaacgccgagcccctctccaagcacagcattgcagcagttccgaagaaagagcgattcccccacctctttgcctgagaataatatgtctgatgtgtcgcagttaaagagcgaggagtccagtgacgatgagtctcatcccttacgagaagaggcatgttcttcacagtcccaggaaagtggagaattctcactgcagagttcaaatgcatcaaagctttctcagtgctctagtaaggactctgattcagaggaatctgattgcaatattaagttacttgacagtcaaagtgaccagacctccaagctacgtttatctcatttctcaaaaaaagacacacctctaaggaacaaggttcctgggctatataagtccagttctgcagactctctttctacaaccaagatcaaacctctaggacctgccagagccagtgggctgagcaagaagccggcaagcatccagaagagaaagcatcataatgccgagaacaagccggggttacagatcaaactcaatgagctctggaaaaactttggatttaaaaaagattctgaaaagcttcctccttgtaagaaacccctgtccccagtcagagataacatccaactaactccagaagcggaagaggatatatttaacaaacctgaatgtggccgtgttcaaagagcaatattccagtaaatgcagactgctgcaaagcttttgcctgcaagagaatctgatcaatttgaagtccctgtttgggaatgaggcacttatcagcatgaagaattttttctcattctgtgccattttaaaaatagaatacattttgtatattaactttataattgggttgtggtttttttgctcagctttttatatttttataagaagctaaatagaagaataattgtatctctgacaggtttttggaggttttagtgttaattgggaaaatcctctggagtttataaaagtctactctaaatatttctgtaatgttgtcaagtagaaagatagtaaatggagaaact

SEQ ID NO: 1606 - DNA, 3070 bp, Homo sapiens
  source 1..3070: mol_type = genomic DNA
gcctaaggaaacgtgtcgtctggaatgggcttgggggccacgcctgcacatctccgcgagacagagggataaagtgaagatggtgctgttattgttacctcgagtgccacatgcgacctctgagatatgtacacagtcattcttactatcgcactcagccattcttactacgctaaagaagaaataattattcgaggatatttgcctggcccagaagaaacttatgtaaatttcatgaactattatatccgttttcctcggagtgagagaaaactctttttagatatcatctgagaggtagttaatttggcaccatggggatacagggattgctacaatttatcaaagaagcttcagaacccatccatgtgaggaagtataaagggcaggtagtagctgtggatacatattgctggcttcacaaaggagctattgcttgtgctgaaaaactagccaaaggtgaacctactgatagaagacgacaagccaatcttcttaagggaaagcaacttcttcgtgaggggaaagtctcggaagctcgagagtgtttcacccggtctatcaatatcacacatgccatggcccacaaagtaattaaagctgcccggtctcagggggtagattgcctcgtggctccctatgaagctgatgcgcagttggcctatcttaacaaagcgggaattgtgcaagccataattacagaggactcggatctcctagcttttggctgtaaaaaggtaattttaaagatggaccagtttggaaatggacttgaaattgatcaagctcggctaggaatgtgcagacagcttggggatgtattcacggaagagaagtttcgttacatgtgtattctttcaggttgtgactacctgtcatcactgcgtgggattggattagcaaaggcatgcaaagtcctaagactagccaataatccagatatagtaaaggttatcaagaaaattggacattatctcaagatgaatatcacggtaccagaggattacatcaacgggtttattcgggccaacaataccttcctctatcagctagtttttgatcccatcaaaaggaaacttattcctctgaacgcctatgaagatgatgttgatcctgaaacactaagctacgctgggcaatatgttgatgattccatagctcttcaaatagcacttggaaataaagatataaatacttttgaacagatcgatgactacaatccagacactgctatgcctgcccattcaagaagtcatagttgggatgacaaaacatgtcaaaagtcagctaatgttagcagcatttggcataggaattactctcccagaccagagtcgggtactgtttcagatgccccacaattgaaggaaaatccaagtactgtgggagtggaacgagtgattagtactaaagggttaaatctcccaaggaaatcatccattgtgaaaagaccaagaagtgcagagctgtcagaagatgacctgttgagtcagtattctctttcatttacgaagaagaccaagaaaaatagctctgaaggcaataaatcattgagcttttctgaagtgtttgtgcctgacctggtaaatggacctactaacaaaaagagtgtaagcactccacctaggacgagaaataaatttgcaacatttttacaaaggaaaaatgaagaaagtggtgcagttgtggttccagggaccagaagcaggtttttttgcagttcagattctactgactgtgtatcaaacaaagtgagcatccagcctctggatgaaactgctgtcacagataaagagaacaatctgcatgaatcagagtatggagaccaagaaggcaagagactggttgacacagatgtagcacgtaattcaagtgatgacattccgaataatcatattccaggtgatcatattccagacaaggcaacagtgtttacagatgaagagtcctactcttttgagagcagcaaatttacaaggaccatttcaccacccactttgggaacactaagaagttgttttagttggtctggaggtcttggagatttttcaagaacgccgagcccctctccaagcacagcattgcagcagttccgaagaaagagcgattcccccacctctttgcctgagaataatatgtctgatgtgtcgcagttaaagagcgaggagtccagtgacgatgagtctcatcccttacgagaagaggcatgttcttcacagtcccaggaaagtggagaattctcactgcagagttcaaatgcatcaaagctttctcagtgctctagtaaggactctgattcagaggaatctgattgcaatattaagttacttgacagtcaaagtgaccagacctccaagctacgtttatctcatttctcaaaaaaagacacacctctaaggaacaaggttcctgggctatataagtccagttctgcagactctctttctacaaccaagatcaaacctctaggacctgccagagccagtgggctgagcaagaagccggcaagcatccagaagagaaagcatcataatgccgagaacaagccggggttacagatcaaactcaatgagctctggaaaaactttggatttaaaaaagattctgaaaagcttcctccttgtaagaaacccctgtccccagtcagagataacatccaactaactccagaagcggaagaggatatatttaacaaacctgaatgtggccgtgttcaaagagcaatattccagtaaatgcagactgctgcaaagcttttgcctgcaagagaatctgatcaatttgaagtccctgtttgggaatgaggcacttatcagcatgaagaattttttctcattctgtgccattttaaaaatagaatacattttgtatattaactttataattgggttgtggtttttttgctcagctttttatatttttataagaagctaaatagaagaataattgtatctctgacaggtttttggaggttttagtgttaattgggaaaatcctctggagtttataaaagtctactctaaatatttctgtaatgttgtcaagtagaaagatagtaaatggagaaact

SEQ ID NO: 1607 - DNA, 3473 bp, Homo sapiens
  source 1..3473: mol_type = genomic DNA
ggaacccgcgcaaattgaaaggtcagcctttcgcgcgctgtgtaggcaagttacccgtgttctgcgttgccggccgtgggtgctctggccacagtgagttaggggcgtcggagcgggtttctccaaccgcaatcggctccgctcaaggggaggaggagagtcccttctcggaaggcctaaggaaacgtgtcgtctggaatgggcttgggggccacgcctgcacatctccgcgagacagagggataaagtgaagatggtgctgttattgttacctcgagtgccacatgcgacctctgagatatgtacacagtcattcttactatcgcactcagccattcttactacgctaaagaagaaataattattcgaggatatttgcctggcccagaagaaacttatgtaaatttcatgaactattatatccgttttcctcggagtgagagaaaactctttttagatatcatctgagagaactagtgaatcccagtcactgagtggagttgagagtctaagaacctctgaaatttgagaactgctggaccagagcctttagagctctgataaggtgtcaacagggtagttaatttggcaccatggggatacagggattgctacaatttatcaaagaagcttcagaacccatccatgtgaggaagtataaagggcaggtagtagctgtggatacatattgctggcttcacaaaggagctattgcttgtgctgaaaaactagccaaaggtgaacctactgataggtatgtaggattttgtatgaaatttgtaaatatgttactatctcatgggatcaagcctattctcgtatttgatggatgtactttaccttctaaaaaggaagtagagagatctagaagagaaagacgacaagccaatcttcttaagggaaagcaacttcttcgtgaggggaaagtctcggaagctcgagagtgtttcacccggtctatcaatatcacacatgccatggcccacaaagtaattaaagctgcccggtctcagggggtagattgcctcgtggctccctatgaagctgatgcgcagttggcctatcttaacaaagcgggaattgtgcaagccataattacagaggactcggatctcctagcttttggctgtaaaaaggtaattttaaagatggaccagtttggaaatggacttgaaattgatcaagctcggctaggaatgtgcagacagcttggggatgtattcacggaagagaagtttcgttacatgtgtattctttcaggttgtgactacctgtcatcactgcgtgggattggattagcaaaggcatgcaaagtcctaagactagccaataatccagatatagtaaaggttatcaagaaaattggacattatctcaagatgaatatcacggtaccagaggattacatcaacgggtttattcgggccaacaataccttcctctatcagctagtttttgatcccatcaaaaggaaacttattcctctgaacgcctatgaagatgatgttgatcctgaaacactaagctacgctgggcaatatgttgatgattccatagctcttcaaatagcacttggaaataaagatataaatacttttgaacagatcgatgactacaatccagacactgctatgcctgcccattcaagaagtcatagttgggatgacaaaacatgtcaaaagtcagctaatgttagcagcatttggcataggaattactctcccagaccagagtcgggtactgtttcagatgccccacaattgaaggaaaatccaagtactgtgggagtggaacgagtgattagtactaaagggttaaatctcccaaggaaatcatccattgtgaaaagaccaagaagtgcagagctgtcagaagatgacctgttgagtcagtattctctttcatttacgaagaagaccaagaaaaatagctctgaaggcaataaatcattgagcttttctgaagtgtttgtgcctgacctggtaaatggacctactaacaaaaagagtgtaagcactccacctaggacgagaaataaatttgcaacatttttacaaaggaaaaatgaagaaagtggtgcagttgtggttccagggaccagaagcaggtttttttgcagttcagattctactgactgtgtatcaaacaaagtgagcatccagcctctggatgaaactgctgtcacagataaagagaacaatctgcatgaatcagagtatggagaccaagaaggcaagagactggttgacacagatgtagcacgtaattcaagtgatgacattccgaataatcatattccaggtgatcatattccagacaaggcaacagtgtttacagatgaagagtcctactcttttgagagcagcaaatttacaaggaccatttcaccacccactttgggaacactaagaagttgttttagttggtctggaggtcttggagatttttcaagaacgccgagcccctctccaagcacagcattgcagcagttccgaagaaagagcgattcccccacctctttgcctgagaataatatgtctgatgtgtcgcagttaaagagcgaggagtccagtgacgatgagtctcatcccttacgagaagaggcatgttcttcacagtcccaggaaagtggagaattctcactgcagagttcaaatgcatcaaagctttctcagtgctctagtaaggactctgattcagaggaatctgattgcaatattaagttacttgacagtcaaagtgaccagacctccaagctacgtttatctcatttctcaaaaaaagacacacctctaaggaacaaggttcctgggctatataagtccagttctgcagactctctttctacaaccaagatcaaacctctaggacctgccagagccagtgggctgagcaagaagccggcaagcatccagaagagaaagcatcataatgccgagaacaagccggggttacagatcaaactcaatgagctctggaaaaactttggatttaaaaaagattctgaaaagcttcctccttgtaagaaacccctgtccccagtcagagataacatccaactaactccagaagcggaagaggatatatttaacaaacctgaatgtggccgtgttcaaagagcaatattccagtaaatgcagactgctgcaaagcttttgcctgcaagagaatctgatcaatttgaagtccctgtttgggaatgaggcacttatcagcatgaagaattttttctcattctgtgccattttaaaaatagaatacattttgtatattaactttataattgggttgtggtttttttgctcagctttttatatttttataagaagctaaatagaagaataattgtatctctgacaggtttttggaggttttagtgttaattgggaaaatcctctggagtttataaaagtctactctaaatatttctgtaatgttgtcaagtagaaagatagtaaatggagaaactacaa

SEQ ID NO: 1608 - DNA, 607 bp, Homo sapiens
  source 1..607: mol_type = genomic DNA
cttatgtaaatttcatgaactattatatccgttttcctcggagtgagagaaaactctttttagatatcatctgagagcagaactagtgaatcccagtcactgagtggagttgagagtctaagaacctctgaaatttgagaactgctggaccagagcctttagagctctgataaggtgtcaacagggtagttaatttggcaccatggggatacagggattgctacaatttatcaaagaagcttcagaacccatccatgtgaggaagtataaagggcaggtagtagctgtggatacatattgctggcttcacaaaggagctattgcttgtgctgaaaaactagccaaaggtgaacctactgataggtatgtaggattttgtatgaaatttgtaaatatgttactatctcatgggatcaagcctattctcgtatttgatggatgtactttaccttctaaaaaggaagtagagagatctagaagagaaagacgacaagccaatcttcttaagggaaagcaacttcttcgtgaggggaaagtctcggaagctcgagagtgtttcacccggtctatcaatatcacacatgccatggcccacaaagtaattaaa

SEQ ID NO: 1609 - DNA, 2899 bp, Homo sapiens
  source 1..2899: mol_type = genomic DNA
cgagtgccacatgcgacctctgagatatgtacacagtcattcttactatcgcactcagccattcttactacgctaaagaagaaataattattcgaggatatttgcctggcccagaagaaacttatgtaaatttcatgaactattatatccgttttcctcggagtgagagaaaactctttttagatatcatctgagaggtagttaatttggcaccatggggatacagggattgctacaatttatcaaagaagcttcagaacccatccatgtgaggaagtataaagggcaggtagtagctgtggatacatattgctggcttcacaaaggagctattgcttgtgctgaaaaactagccaaaggtgaacctactgataggtatgtaggattttgtatgaaatttgtaaatatgttactatctcatgggatcaagcctattctcgtatttgatggatgtactttaccttctaaaaaggaagtagagagatctagaagagaaagacgacaagccaatcttcttaagggaaagcaacttcttcgtgaggggaaagtctcggaagctcgagagtgtttcacccggtctatcaatatcacacatgccatggcccacaaagtaattaaagctgcccggtctcagggggtagattgcctcgtggctccctatgaagctgatgcgcagttggcctatcttaacaaagcgggaattgtgcaagccataattacagaggactcggatctcctagcttttggctgtaaaaaggtaattttaaagatggaccagtttggaaatggacttgaaattgatcaagctcggctaggaatgtgcagacagcttggggatgtattcacggaagagaagtttcgttacatgtgtattctttcaggttgtgactacctgtcatcactgcgtgggattggattagcaaaggcatgcaaagtcctaagactagccaataatccagatatagtaaaggttatcaagaaaattggacattatctcaagatgaatatcacggtaccagaggattacatcaacgggtttattcgggccaacaataccttcctctatcagctagtttttgatcccatcaaaaggaaacttattcctctgaacgcctatgaagatgatgttgatcctgaaacactaagctacgctgggcaatatgttgatgattccatagctcttcaaatagcacttggaaataaagatataaatacttttgaacagatcgatgactacaatccagacactgctatgcctgcccattcaagaagtcatagttgggatgacaaaacatgtcaaaagtcagctaatgttagcagcatttggcataggaattactctcccagaccagagtcgggtactgtttcagatgccccacaattgaaggaaaatccaagtactgtgggagtggaacgagtgattagtactaaagggttaaatctcccaaggaaatcatccattgtgaaaagaccaagaagtgcagagctgtcagaagatgacctgttgagtcagtattctctttcatttacgaagaagaccaagaaaaatagctctgaaggcaataaatcattgagcttttctgaagtgtttgtgcctgacctggtaaatggacctactaacaaaaagagtgtaagcactccacctaggacgagaaataaatttgcaacatttttacaaaggaaaaatgaagaaagtggtgcagttgtggttccagggaccagaagcaggtttttttgcagttcagattctactgactgtgtatcaaacaaagtgagcatccagcctctggatgaaactgctgtcacagataaagagaacaatctgcatgaatcagagtatggagaccaagaaggcaagagactggttgacacagatgtagcacgtaattcaagtgatgacattccgaataatcatattccaggtgatcatattccagacaaggcaacagtgtttacagatgaagagtcctactcttttgagagcagcaaatttacaaggaccatttcaccacccactttgggaacactaagaagttgttttagttggtctggaggtcttggagatttttcaagaacgccgagcccctctccaagcacagcattgcagcagttccgaagaaagagcgattcccccacctctttgcctgagaataatatgtctgatgtgtcgcagttaaagagcgaggagtccagtgacgatgagtctcatcccttacgagaagaggcatgttcttcacagtcccaggaaagtggagaattctcactgcagagttcaaatgcatcaaagctttctcagtgctctagtaaggactctgattcagaggaatctgattgcaatattaagttacttgacagtcaaagtgaccagacctccaagctacgtttatctcatttctcaaaaaaagacacacctctaaggaacaaggttcctgggctatataagtccagttctgcagactctctttctacaaccaagatcaaacctctaggacctgccagagccagtgggctgagcaagaagccggcaagcatccagaagagaaagcatcataatgccgagaacaagccggggttacagatcaaactcaatgagctctggaaaaactttggatttaaaaaattctgaaaagcttcctccttgtaagaaacccctgtccccagtcagagataacatccaactaactccagaagcggaagaggatatatttaacaaacctgaatgtggccgtgttcaaagagcaatattccagtaaatgcagactgctgcaaagcttttgcctgcaagagaatctgatcaatttgaagtccctgtttgggaatgaggcacttatcagcatgaagaattttttctcattctgtgccattttaaaaatagaatacattttgtatattaacttta

SEQ ID NO: 1610 - DNA, 583 bp, Homo sapiens
  source 1..583: mol_type = genomic DNA
accatcggccatcagcgccagtgccactcgcgccctcaagaagccgcacggagttcgggccggcagcagcggctgcagtcgtatggcagtgagccgctgtctacccagcgagacggagagctcaggacgcaaccctatgagttggaagccgcaggaggcggaaccgggttgcgggatacgcgttgacgtcacatcctctgggcggggccgcaaggaacccgcgcaaattgaaaggcctaaggaaacgtgtcgtctggaatgggcttgggggccacgcctgcacatctccgcgagacagagggataaagtgaagatggtgctgttattgttacctcgagtgccacatgcgacctctgagatatgtacacagtcattcttactatcgcactcagccattcttactacgctaaagaagaaataattattcgaggatatttgcctggcccagaagaaacttatgtaaatttcatgaactattatatccgttttcctcggagtgagagaaaactctttttagatatcatctgagaggtagttaatttggcaccatggggatacagggattgctacaatttatcaaaga

SEQ ID NO: 1611 - DNA, 8270 bp, Homo sapiens
  source 1..8270: mol_type = genomic DNA
gtgtaagtgtaacattcagaaccgggtaacattcggcgaccgaacgcggcggtcggcagcgttcgcgcgggggcctgcgaagcgctgctcggggccggcactgcccgcggggaggacgcgccgccgccgccacccagcgccgccgccgccgccgcctccagccgggccgccgcgcgtcccgggggccggccccgcgagcgcaggagtaaacaccgccggagtcttggagccgctgcagaagggaataaagagagatgcagggatttgtgaggttacggcgccccagctgcaagatgcactagccggctgaacccgggatcggctgacttgttggaaccggagtgctctgcacggagagtggtggatgagttgaagttgccttcccggggctcattttccacgctgccgagaggaatccgagaggcaaggcaatcacttcgtcttgccattgattgggtatcgggagctttttttttctcccctctctctttcttttcctccgtcttgttgcatgcaagaaaattacagtccgctgctcgcccgccctgggtgcgagatattcagccccgctctctcccgtgcattgtgcaacccaaagatgaaagaccgaaggggagaaagttaaagaaatcgcccacatgcgctggatcagtccacggcttggggaaaggcatccagagaaggtgggagcggagagtttgaagtctttacaggcgggaagatggcggactggagctgaaagtgttgattgggaaacttgggtgattcttgtgtttatttacaatcctcttgacccaggcaggacacatgcaggccaaaaaacgctatttcatcctgctctcagctggctcttgtctcgcccttttgttttatttcggaggcttgcagtttagggcatcgaggagccacagccggagagaagaacacagcggtaggaatggcttgcaccaccccagtccggatcatttctggccccgcttcccggacgctctgcgccccttcgttccttgggatcaattggaaaacgaggattccagcgtgcacatttccccccggcagaagcgagatgccaactccagcatctacaaaggcaagaagtgccgcatggagtcctgcttcgatttcaccctttgcaagaaaaacggcttcaaagtctacgtatacccacagcaaaaaggggagaaaatcgccgaaagttaccaaaacattctagcggccatcgagggctccaggttctacacctcggaccccagccaggcgtgcctctttgtcctgagtctggatactttagacagagaccagttgtcacctcagtatgtgcacaatttgagatccaaagtgcagagtctccacttgtggaacaatggtaggaatcatttaatttttaatttatattccggcacttggcctgactacaccgaggacgtggggtttgacatcggccaggcgatgctggccaaagccagcatcagtactgaaaacttccgacccaactttgatgtttctattcccctcttttctaaggatcatcccaggacaggaggggagagggggtttttgaagttcaacaccatccctcctctcaggaagtacatgctggtattcaaggggaagaggtacctgacagggataggatcagacaccaggaatgccttatatcacgtccataacggggaggacgttgtgctcctcaccacctgcaagcatggcaaagactggcaaaagcacaaggattctcgctgtgacagagacaacaccgagtatgagaagtatgattatcgggaaatgctgcacaatgccactttctgtctggttcctcgtggtcgcaggcttgggtccttcagattcctggaggctttgcaggctgcctgcgtccctgtgatgctcagcaatggatgggagttgccattctctgaagtgattaattggaaccaagctgccgtcataggcgatgagagattgttattacagattccttctacaatcaggtctattcatcaggataaaatcctagcacttagacagcagacacaattcttgtgggaggcttatttttcttcagttgagaagattgtattaactacactagagattattcaggacagaatattcaagcacatatcacgtaacagtttaatatggaacaaacatcctggaggattgttcgtactaccacagtattcatcttatctgggagattttccttactactatgctaatttaggtttaaagcccccctccaaattcactgcagtcatccatgcggtgacccccctggtctctcagtcccagccagtgttgaagcttctcgtggctgcagccaagtcccagtactgtgcccagatcatagttctatggaattgtgacaagcccctaccagccaaacaccgctggcctgccactgctgtgcctgtcgtcgtcattgaaggagagagcaaggttatgagcagccgttttctgccctacgacaacatcatcacagacgccgtgctcagccttgacgaggacacggtgctttcaacaacagaggtggatttcgccttcacagtgtggcagagcttccctgagaggattgtggggtaccccgcgcgcagccacttctgggataactctaaggagcggtggggatacacatcaaagtggacgaacgactactccatggtgttgacaggagctgctatttaccacaaatattatcactacctatactcccattacctgccagccagcctgaagaacatggtggaccaattggccaattgtgaggacattctcatgaacttcctggtgtctgctgtgacaaaattgcctccaatcaaagtgacccagaagaagcagtataaggagacaatgatgggacagacttctcgggcttcccgttgggctgaccctgaccactttgcccagcgacagagctgcatgaatacgtttgccagctggtttggctacatgccgctgatccactctcagatgaggctcgaccccgtcctctttaaagaccaggtctctattttgaggaagaaataccgagacattgagcgactttgaggaatccggctgagtgggggaggggaagcaagaagggatgggggtcaagctgctctctcttcccagtgcagatccactcatcagcagagccagattgtgccaactatccaaaaacttagatgagcagaatgacaaaaaaaaaaaggccaatgagaactcaactcctggctcctgggactgcaccagactgctccaaactcacctcactggcttctgtgtcccaagactaggttgtgtacagtttaattatggaacattaaataattatttttgaaatgattgctatgcaggtttaaacttttttaatgatcaaaactattaaaaaccagagttctttgtttaatcaaaattgtgttggttgtgaatatttcaaagctgctattccttttcccacagacatcattgtcatggccatgtagggtgccctgcagtttcaaaagctcaaacttcgtggaaaacacaataagtcactctacccattatcaagaaataactgagcataagttgtaacttcattattcaactttgccagtgcaaattgttttccacttcgaatcttcaaatccacttgaacttttatctctaaaatgtcgctgcatgaaagaaagtattacgacttccaggtaggcagttctaactgaaatctctatgtttgagatagatatatatgataatcgtttttcattgggggggtggggggaattagtaccaagaaaacactagtataattaagaaatgttcagtttgcacaaagaactatccagataacccaccagcatgttagtgagatggaaatacagacccacaacagtaacccaatacttgcaggggttgggggcacggttatagattcaaccattgacctaagtctgcgtagcactgggaagaggctttggtttagaagccaaggaataatgagtatattggggagaacagattatttacaagatgaactctttaatgtttgtgagaatctcaagtttcagagtttctcttttgagaaagaaaaaggggtaataaggtagaaattcacaccaatgaacaagaggattgctgcaaagtaactgaggagatgtctcgccattgggaccctaatgccatttttggtcaaacattgttttgagcaagaatctggcaaacaaaataatcaacaacaaatgtgaatatagtttcatttacttttaatttttaaatctgtggaaaagtttagttgtgcttcttgttaaaaagaacatttctatccctgaaaatgctatcttgggcttatgattattgttaaactccaagtataaactgaaaaaaaaaacatatccctaactctgttatgaaaaatggagacttctgatattaaatgctttcttctacttggaagaggccagagaaaacagggaagagaaagacattattgagtttgaccatgtattatgctgaataaacaataagcactttagagtccctccctcaaactctcatacatttcatatttcttttccatttattttcagttttgttttagaagaaaagttcatcagagaattttgttctgataatttcaagtggccatcttaggtcagtggaaaccgtaagtccattggactttacctcatcctttctttgtagacatctgggagaggaagaggagcttgtaatgatagcacggggatggtgctgtaaacaggagtgaaagtgtttgtggaagtccagagaagtgactcaacaggctacctagctgcagaacaaggagtagagcccacatatccagatggtgttttgagaggtgcgtagacagtgaaattcaattaaagagaggattttctcctcagcctcatgactcagaacagctccctaaatacctctctcatctaattggacccatccatagtccattctcaaacatgtgacattttcccctaagtagatgtgattatctcttaggcatttgttgaaaaataattcttaggtccatggtgcttgcacttgtgtcttttctataaaatgtttggtcttacaggtttcatgtcatttaagctgcacttctcagcaagttaaaagattagcagttaatctttattcatttggcctttgtgaatttgtatttaaattatttttttcaggattggcaaattattcttgtttctcctttaccaaaaaataaatgcgatattttgttcaatgaccccaaaaccaacttgaaacttaggtggtcatattggcttgcaaagcaatgtccctaattgtaccagtcagtcacacaagtggattcaaggacctgctttgccagattgacctgtcaccaagctcacaacacatatcctccacaaacaacatgtgttatgtgaagaaaaatggtaattataaataagaacaggatataacacacctttcatccactttaaatctccacagtttcattttatgtcattctctgagcaaatctctttgggatgtgagctagcgtgttcttctcccatttggaatataaggctgggaatagaacaatgcttaacaaatcagtgaagctcgacagtaatatgtaattttaattcagttaggaaagagttgtattgcattgcaacaagttgacaaatcatagccatctctgtagggtgtcaggaattatctcctggtcaactttaatgataactaggggtccctaagtgggctaacatgtgctgcattggagagaagccaagggctgagagtacagtgccaaccacgtaatgaattgcttgcagaaattccaaagaggactcagccacttatggatttccacacagcatcttttcccagctccacattaagacacaggatcttaaaagtaattttttaaaagctggctgtgtatttatttatatgaaagtgttataaatatcaaagcttacaaatacattaatacatatcacctttgttgaagctagcaaaatggctcaaaattgagactgtagagaaaaatccatgaaataatcacgatagtcataccacaaaagatagcatagctaggtgggcctacctggtcgtatcaacacactttcagatagatgcttcaaaaaaaaagggaaagcttgttactggaatcttatgtgcattacagtttaatttcttcttgtgacaaatggtgctcaaagaaggatcaatccggttgcatccttcaatttcccttttagaatgacttttggttttcattacagtaggctatgttagcctttattttggtggttctcaaatacctggtgacttgaaagagtattatgctggtggcctttcataaaggttactgaactttaatcaggggtgagatgaatgaatgtgaataggcctatatactattttttttaattaaaaaaaaaaaaaacagggcacttgatttaagaacaaacctgtttaaagggcaggatcagggggaagacagccttactaggttggaatctgaatgagattcttgctggacaaggctgaattatggatgcaaaagccaagcaaacttcccagacctggaagtgtcttgtgttcccttgggtctcttgagatctccagtatttaaaagtagcagttattgccatgaactctcaaataaaaatgctcctgcctcttacttgtgaatataatcaacatgcagccagtacatcaggaccgcagttgctgaattcatttacctagttcccctttacagcgactatggacaagaacctttcagttggttttgtcattcttggccagatttaaccaagaaatttctttcactatcagcctcattttctcaggcatgcttacagggacaaagttgttttgagttgagttctcagcaaataagcattaatatcaaactgtgctaaacttgtctcacttggtataagaacttcagcataaagagattagtttatcctttgacaccaagtcttttttttttctttgagacagagtcttgccctgtcacccaggctggaatgcattggtgtgatctcagctcagtcactgcaacctccgcctccccggttcaagcaattctcctgcctcaccctgcttagtagttgggattacaggcatgtgctaccacactgggctaatttttgtatatttattagagacagggttttgctatgttggccaggctggtctcaaactcctgacctcaggtgatccacctgcctctgcctcccaaagtgctgagattacaggtgtaagccactgcgcctggccccccttttttttttctttaaaaaaaaaaaaaagcttgggggattaagtaccctaagatagtggtctctcccatcagttcaataatgctgtacagaacctctggataaaaaagctgttatttacaccataattgtgatgatggatttgactcctcaaaaccatctctcccctttttgccctttccaaaaatcaaaggcttttgtctccatgagttttacctagtagggattgtagttgtcactggtctagagttccaatacattttatatcaggaacctcagtgagctacccagaattggaacttaacatggcccagcaactaggagaagaaggcaaaccttgagaaagctgagccctcaggatagcacagtctcacccttgtttaaaatcaagtcaggctagcctttcagtcactctggttttgtaatgatttgccttttaggcctcaggccatttgatttctgcaatagttttctgttcttctcctacaggaatacatccctgtcctttcggttgtaactattactaaaactagggctatgcaaatgacctggttaccatgtaatgaaccttgtgtacttattttgagagaacaatatgtataggatatgttgaggggcagaaagaaagacatcaaaaactggaactattttaggtggcaaattgtaacgcaaaaaacaaaagtataccttattttgtatacgatgtacacttgggacagagttttctaatatgttgccaatgtttttgtagtgtcaccacaggtcttttctgaagtgtttttcccatttgttatagagtattaatgacttagcgtaattaagccctcaagtatgtgtgagagagcgcgtgtgagaaaatacaaagccatagatattgatttacttcactgacctgtgtaactttatgtctgggtttcgccatccaagatagattgttttatagagagtgtcaccaaagactttttccttccaatttatagaagaaaaaaaaaagaaattattaataaatgacatgacttttca

SEQ ID NO: 1612 - DNA, 3424 bp, Homo sapiens
  source 1..3424: mol_type = genomic DNA
agccacagggatctgattcctcccagggggatgtcctgcgcctcagggtccggtggtggcctgcggcatcccttgcggtgccagaagccgtgggacgaggagtgtgaggaagaggctgtctgtgtcattatgtgtgcgtcggtcaagtataatatccggggtcctgccctcatcccaagaatgaagaccaagcaccgaatctactatatcaccctcttctccattgtcctcctgggcctcattgccactggcatgtttcagttttggccccattctatcgagtcctcaaatgactggaatgtagagaagcgcagcatccgtgatgtgccggttgttaggctgccagccgacagtcccatcccagagcggggggatctcagttgcagaatgcacacgtgttttgatgtctatcgctgtggcttcaacccaaagaacaaaatcaaggtgtatatctatgctctgaaaaagtacgtggatgactttggcgtctctgtcagcaacaccatctcccgggagtataatgaactgctcatggccatctcagacagtgactactacactgatgacatcaaccgggcctgtctgtttgttccctccatcgatgtgcttaaccagaacacactgcgcatcaaggagacagcacaagcgatggcccagctctctaggtgggatcgaggtacgaatcacctgttgttcaacatgttgcctggaggtcccccagattataacacagccctggatgtccccagagacagggccctgttggctggtggcggcttttctacgtggacttaccggcaaggctacgatgtcagcattcctgtctatagtccactgtcagctgaggtggatcttccagagaaaggaccaggtccacggcaatacttcctcctgtcatctcaggtgggtctccatcctgagtacagagaggacctagaagccctccaggtcaaacatggagagtcagtgttagtactcgataaatgcaccaacctctcagagggtgtcctttctgtccgtaagcgctgccacaagcaccaggtcttcgattacccacaggtgctacaggaggctactttctgtgtggttcttcgtggagctcggctgggccaggcagtattgagcgatgtgttacaagctggctgtgtcccggttgtcattgcagactcctatattttgcctttctctgaagttcttgactggaagagagcatctgtggttgtaccagaagaaaagatgtcagatgtgtacagtattttgcagagcatcccccaaagacagattgaagaaatgcagagacaggcccggtggttctgggaagcgtacttccagtcaattaaagccattgccctggccaccctgcagattatcaatgaccggatctatccatatgctgccatctcctatgaagaatggaatgaccctcctgctgtgaagtggggcagcgtgagcaatccactcttcctcccgctgatcccaccacagtctcaagggttcaccgccatagtcctcacctacgaccgagtagagagcctcttccgggtcatcactgaagtgtccaaggtgcccagtctatccaaactacttgtcgtctggaataatcagaataaaaaccctccagaagattctctctggcccaaaatccgggttccattaaaagttgtgaggactgctgaaaacaagttaagtaaccgtttcttcccttatgatgaaatcgagacagaagctgttctggccattgatgatgatatcattatgctgacctctgacgagctgcaatttggttatgaggtctggcgggaatttcctgaccggttggtgggttacccgggtcgtctgcatctctgggaccatgagatgaataagtggaagtatgagtctgagtggacgaatgaagtgtccatggtgctcactggggcagctttttatcacaagtattttaattacctgtatacctacaaaatgcctggggatatcaagaactgggtagatgctcatatgaactgtgaagatattgccatgaacttcctggtggccaacgtcacgggaaaagcagttatcaaggtaaccccacgaaagaaattcaagtgtcctgagtgcacagccatagatgggctttcactagaccaaacacacatggtggagaggtcagagtgcatcaacaagtttgcttcagtcttcgggaccatgcctctcaaggtggtggaacaccgagctgaccctgtcctgtacaaagatgactttcctgagaagctgaagagcttccccaacattggcagcttatgaaacgtgtcattggtggaggtctgaatgtgaggctgggacagagggagagaacaaggcctcccagcactctgatgtcagagtagtaggttaagggtggaaggttgacctacttggatcttggcatgcacccacctaacccactttctcaagaacaagaacctagaatgaatatccaagcacctcgagctatgcaacctctgttcttgtatttcttatgatctctgatgggttcttctcgaaaatgccaagtggaagactttgtggcatgctccagatttaaatccagctgaggctccctttgttttcagttccatgtaacaatctggaaggaaacttcacggacaggaagactgctggagaagagaagcgtgttagcccatttgaggtctggggaatcatgtaaagggtacccagacctcacttttagttatttacatcaatgagttctttcagggaaccaaacccagaattcggtgcaaaagccaaacatcttggtgggatttgataaatgccttgggacctggagtgctgggcttgtgcacaggaagagcaccagccgctgagtcaggatcctgtcagttccatgagctattcctctttggtttggctttttgatatgattaaaattattttttattcctttttctactgtgtcttaaacaccaattcctgatagtccaaggaaccacctttctcccttgatatatttaactccgtctttggcctgacaacagtcttctgcccatgtctgggaacacacgccaggaggaatgtctgataccctctgcatcaagcgtaagaaggtcccaaatcataaccattttaagaacagatgactcagaaacctccagaggaatctgtttgcttcctgattagatccagtcaatgttttaaaggtattgtcagagaaaaacagagggtctgtactagccatgcaaggagtcgctctagctggtacccgtaaaagttgtgggaattgtgacccccatcccaaggggatgccaaaatttctctcattcttttggtataaacttaacattagccagggaggttctggctaacgttaaatgctgctatacaactgctttgcaacagttgctggtatatttaaatcattaaatttcagcatttactaata

SEQ ID NO: 1613 - DNA, 2997 bp, Homo sapiens
  source 1..2997: mol_type = genomic DNA
ctcgccagcccagactcggccctggcagtggcggctggcgattcggaccgatccgacctgggcggaggtggcccgcgccccgcggcatgagccggtgaccaagctcggggccgagcgggaggcagccgtggccgaggagtgtgaggaagaggctgtctgtgtcattatgtgtgcgtcggtcaagtataatatccggggtcctgccctcatcccaagaatgaagaccaagcaccgaatctactatatcaccctcttctccattgtcctcctgggcctcattgccactggcatgtttcagttttggccccattctatcgagtcctcaaatgactggaatgtagagaagcgcagcatccgtgatgtgccggttgttaggctgccagccgacagtcccatcccagagcggggggatctcagttgcagaatgcacacgtgttttgatgtctatcgctgtggcttcaacccaaagaacaaaatcaaggtgtatatctatgctctgaaaaagtacgtggatgactttggcgtctctgtcagcaacaccatctcccgggagtataatgaactgctcatggccatctcagacagtgactactacactgatgacatcaaccgggcctgtctgtttgttccctccatcgatgtgcttaaccagaacacactgcgcatcaaggagacagcacaagcgatggcccagctctctaggtgggatcgaggtacgaatcacctgttgttcaacatgttgcctggaggtcccccagattataacacagccctggatgtccccagagacagggccctgttggctggtggcggcttttctacgtggacttaccggcaaggctacgatgtcagcattcctgtctatagtccactgtcagctgaggtggatcttccagagaaaggaccaggtccacggcaatacttcctcctgtcatctcaggtgggtctccatcctgagtacagagaggacctagaagccctccaggtcaaacatggagagtcagtgttagtactcgataaatgcaccaacctctcagagggtgtcctttctgtccgtaagcgctgccacaagcaccaggtcttcgattacccacaggtgctacaggaggctactttctgtgtggttcttcgtggagctcggctgggccaggcagtattgagcgatgtgttacaagctggctgtgtcccggttgtcattgcagactcctatattttgcctttctctgaagttcttgactggaagagagcatctgtggttgtaccagaagaaaagatgtcagatgtgtacagtattttgcagagcatcccccaaagacagattgaagaaatgcagagacagctcttcatggaaccagccaggagagagaactggtcagctgctaatcaccaaatgaactccctgatctggcctagggaacagtgggattcacagattatcaatgaccggatctatccatatgctgccatctcctatgaagaatggaatgaccctcctgctgtgaagtggggcagcgtgagcaatccactcttcctcccgctgatcccaccacagtctcaagggttcaccgccatagtcctcacctacgaccgagtagagagcctcttccgggtcatcactgaagtgtccaaggtgcccagtctatccaaactacttgtcgtctggaataatcagaataaaaaccctccagaagattctctctggcccaaaatccgggttccattaaaagttgtgaggactgctgaaaacaagttaagtaaccgtttcttcccttatgatgaaatcgagacagaagctgttctggccattgatgatgatatcattatgctgacctctgacgagctgcaatttggttatgaggtctggcgggaatttcctgaccggttggtgggttacccgggtcgtctgcatctctgggaccatgagatgaataagtggaagtatgagtctgagtggacgaatgaagtgtccatggtgctcactggggcagctttttatcacaagtattttaattacctgtatacctacaaaatgcctggggatatcaagaactgggtagatgctcatatgaactgtgaagatattgccatgaacttcctggtggccaacgtcacgggaaaagcagttatcaaggtaaccccacgaaagaaattcaagtgtcctgagtgcacagccatagatgggctttcactagaccaaacacacatggtggagaggtcagagtgcatcaacaagtttgcttcagtcttcgggaccatgcctctcaaggtggtggaacaccgagctgaccctgtcctgtacaaagatgactttcctgagaagctgaagagcttccccaacattggcagcttatgaaacgtgtcattggtggaggtctgaatgtgaggctgggacagagggagagaacaaggcctcccagcactctgatgtcagagtagtaggttaagggtggaaggttgacctacttggatcttggcatgcacccacctaacccactttctcaagaacaagaacctagaatgaatatccaagcacctcgagctatgcaacctctgttcttgtatttcttatgatctctgatgggttcttctcgaaaatgccaagtggaagactttgtggcatgctccagatttaaatccagctgaggctccctttgttttcagttccatgtaacaatctggaaggaaacttcacggacaggaagactgctggagaagagaagcgtgttagcccatttgaggtctggggaatcatgtaaagggtacccagacctcacttttagttatttacatcaatgagttctttcagggaaccaaacccagaattcggtgcaaaagccaaacatcttggtgggatttgataaatgccttgggacctggagtgctgggcttgtgcacaggaagagcaccagccgctgagtcaggatcctgtcagttccatgagctattcctctttggtttggctttttgatatgattaaaattattttttattcctttt

SEQ ID NO: 1614 - DNA, 3454 bp, Homo sapiens
  source 1..3454: mol_type = genomic DNA
tcccttcctgctgccaccttcccgccagccacagggatctgattcctcccagggggatgtcctgcgcctcagggtccggtggtggcctgcggcatcccttgcggtgccagaagccgtgggacgaggagtgtgaggaagaggctgtctgtgtcattatgtgtgcgtcggtcaagtataatatccggggtcctgccctcatcccaagaatgaagaccaagcaccgaatctactatatcaccctcttctccattgtcctcctgggcctcattgccactggcatgtttcagttttggccccattctatcgagtcctcaaatgactggaatgtagagaagcgcagcatccgtgatgtgccggttgttaggctgccagccgacagtcccatcccagagcggggggatctcagttgcagaatgcacacgtgttttgatgtctatcgctgtggcttcaacccaaagaacaaaatcaaggtgtatatctatgctctgaaaaagtacgtggatgactttggcgtctctgtcagcaacaccatctcccgggagtataatgaactgctcatggccatctcagacagtgactactacactgatgacatcaaccgggcctgtctgtttgttccctccatcgatgtgcttaaccagaacacactgcgcatcaaggagacagcacaagcgatggcccagctctctaggtgggatcgaggtacgaatcacctgttgttcaacatgttgcctggaggtcccccagattataacacagccctggatgtccccagagacagggccctgttggctggtggcggcttttctacgtggacttaccggcaaggctacgatgtcagcattcctgtctatagtccactgtcagctgaggtggatcttccagagaaaggaccaggtccacggcaatacttcctcctgtcatctcaggtgggtctccatcctgagtacagagaggacctagaagccctccaggtcaaacatggagagtcagtgttagtactcgataaatgcaccaacctctcagagggtgtcctttctgtccgtaagcgctgccacaagcaccaggtcttcgattacccacaggtgctacaggaggctactttctgtgtggttcttcgtggagctcggctgggccaggcagtattgagcgatgtgttacaagctggctgtgtcccggttgtcattgcagactcctatattttgcctttctctgaagttcttgactggaagagagcatctgtggttgtaccagaagaaaagatgtcagatgtgtacagtattttgcagagcatcccccaaagacagattgaagaaatgcagagacaggcccggtggttctgggaagcgtacttccagtcaattaaagccattgccctggccaccctgcagattatcaatgaccggatctatccatatgctgccatctcctatgaagaatggaatgaccctcctgctgtgaagtggggcagcgtgagcaatccactcttcctcccgctgatcccaccacagtctcaagggttcaccgccatagtcctcacctacgaccgagtagagagcctcttccgggtcatcactgaagtgtccaaggtgcccagtctatccaaactacttgtcgtctggaataatcagaataaaaaccctccagaagattctctctggcccaaaatccgggttccattaaaagttgtgaggactgctgaaaacaagttaagtaaccgtttcttcccttatgatgaaatcgagacagaagctgttctggccattgatgatgatatcattatgctgacctctgacgagctgcaatttggttatgaggtctggcgggaatttcctgaccggttggtgggttacccgggtcgtctgcatctctgggaccatgagatgaataagtggaagtatgagtctgagtggacgaatgaagtgtccatggtgctcactggggcagctttttatcacaagtattttaattacctgtatacctacaaaatgcctggggatatcaagaactgggtagatgctcatatgaactgtgaagatattgccatgaacttcctggtggccaacgtcacgggaaaagcagttatcaaggtaaccccacgaaagaaattcaagtgtcctgagtgcacagccatagatgggctttcactagaccaaacacacatggtggagaggtcagagtgcatcaacaagtttgcttcagtcttcgggaccatgcctctcaaggtggtggaacaccgagctgaccctgtcctgtacaaagatgactttcctgagaagctgaagagcttccccaacattggcagcttatgaaacgtgtcattggtggaggtctgaatgtgaggctgggacagagggagagaacaaggcctcccagcactctgatgtcagagtagtaggttaagggtggaaggttgacctacttggatcttggcatgcacccacctaacccactttctcaagaacaagaacctagaatgaatatccaagcacctcgagctatgcaacctctgttcttgtatttcttatgatctctgatgggttcttctcgaaaatgccaagtggaagactttgtggcatgctccagatttaaatccagctgaggctccctttgttttcagttccatgtaacaatctggaaggaaacttcacggacaggaagactgctggagaagagaagcgtgttagcccatttgaggtctggggaatcatgtaaagggtacccagacctcacttttagttatttacatcaatgagttctttcagggaaccaaacccagaattcggtgcaaaagccaaacatcttggtgggatttgataaatgccttgggacctggagtgctgggcttgtgcacaggaagagcaccagccgctgagtcaggatcctgtcagttccatgagctattcctctttggtttggctttttgatatgattaaaattattttttattcctttttctactgtgtcttaaacaccaattcctgatagtccaaggaaccacctttctcccttgatatatttaactccgtctttggcctgacaacagtcttctgcccatgtctgggaacacacgccaggaggaatgtctgataccctctgcatcaagcgtaagaaggtcccaaatcataaccattttaagaacagatgactcagaaacctccagaggaatctgtttgcttcctgattagatccagtcaatgttttaaaggtattgtcagagaaaaacagagggtctgtactagccatgcaaggagtcgctctagctggtacccgtaaaagttgtgggaattgtgacccccatcccaaggggatgccaaaatttctctcattcttttggtataaacttaacattagccagggaggttctggctaacgttaaatgctgctatacaactgctttgcaacagttgctggtatatttaaatcattaaatttcagcatttactaatactgc

SEQ ID NO: 1615 - DNA, 580 bp, Homo sapiens
  source 1..580: mol_type = genomic DNA
gacggcccggatcccggttaccggcccctcgctcgctgctcgccagcccagactcggccctggcagtggcggctggcgattcggaccgatccgacctgggcggaggtggcccgcgccccgcggcatgagccggtgaccaagctcggggccgagcgggaggcagccgtggccgagagctactcagagttgctgtttctccttgagatgcttttggagtgtgaggaagaggctgtctgtgtcattatgtgtgcgtcggtcaagtataatatccggggtcctgccctcatcccaagaatgaagaccaagcaccgaatctactatatcaccctcttctccattgtcctcctgggcctcattgccactggcatgtttcagttttggccccattctatcgagtcctcaaatgactggaatgtagagaagcgcagcatccgtgatgtgccggttgttaggctgccagccgacagtcccatcccagagcggggggatctcagttgcagaatgcacacgtgttttgatgtctatcgctgtggcttcaacccaaagaacaaaatcaaggtgtatatctatgctctgaaaa

SEQ ID NO: 1616 - DNA, 580 bp, Homo sapiens
  source 1..580: mol_type = genomic DNA
gtgtcagacggcccggatcccggttaccggcccctcgctcgctgctcgccagcccagactcggccctggcagtggcggctggcgattcggaccgatccgacctgggcggaggtggcccgcgccccgcggcatgagccggtgaccaagctcggggccgagcgggaggcagccgtggccgagtgtctttaatgttatagagctactcagagttgctgtttctccttgagatgcttttggtgttggggaaccactgattcaagtatacacatagaccttgagagcttcttgggaagttctaacatgggccagcggagggcagctccttgcctgcatttgtcccaaaacttcctgtcttcaaactccaggagggatatgcagaatggcaaggaagccataccatagggagtgtgaggaagaggctgtctgtgtcattatgtgtgcgtcggtcaagtataatatccggggtcctgccctcatcccaagaatgaagaccaagcaccgaatctactatatcaccctcttctccattgtcctcctgggcctcattgccactggcatgtttcagttttggccccattct

SEQ ID NO: 1617 - DNA, 3136 bp, Homo sapiens
  source 1..3136: mol_type = genomic DNA
ctgtctgagcatttcactgcggagcctgagcgcgcctgcctgggaaaacactgcagcggtgctcggactcctcctgtccagcaggaggcgcggcccggcagctcccgcatgcgcagtgcgctcggtgtcagacggcccggatcccggttaccggcccctcgctcgctgctcgccagcccagactcggccctggcagtggcggctggcgattcggaccgatccgacctgggcggaggtggcccgcgccccgcggcatgagccggtgaccaagctcggggccgagcgggaggcagccgtggccgaggagtgtgaggaagaggctgtctgtgtcattatgtgtgcgtcggtcaagtataatatccggggtcctgccctcatcccaagaatgaagaccaagcaccgaatctactatatcaccctcttctccattgtcctcctgggcctcattgccactggcatgtttcagttttggccccattctatcgagtcctcaaatgactggaatgtagagaagcgcagcatccgtgatgtgccggttgttaggctgccagccgacagtcccatcccagagcggggggatctcagttgcagaatgcacacgtgttttgatgtctatcgctgtggcttcaacccaaagaacaaaatcaaggtgtatatctatgctctgaaaaagtacgtggatgactttggcgtctctgtcagcaacaccatctcccgggagtataatgaactgctcatggccatctcagacagtgactactacactgatgacatcaaccgggcctgtctgtttgttccctccatcgatgtgcttaaccagaacacactgcgcatcaaggagacagcacaagcgatggcccagctctctaggtgggatcgaggtacgaatcacctgttgttcaacatgttgcctggaggtcccccagattataacacagccctggatgtccccagagacagggccctgttggctggtggcggcttttctacgtggacttaccggcaaggctacgatgtcagcattcctgtctatagtccactgtcagctgaggtggatcttccagagaaaggaccaggtccacggcaatacttcctcctgtcatctcaggtgggtctccatcctgagtacagagaggacctagaagccctccaggtcaaacatggagagtcagtgttagtactcgataaatgcaccaacctctcagagggtgtcctttctgtccgtaagcgctgccacaagcaccaggtcttcgattacccacaggtgctacaggaggctactttctgtgtggttcttcgtggagctcggctgggccaggcagtattgagcgatgtgttacaagctggctgtgtcccggttgtcattgcagactcctatattttgcctttctctgaagttcttgactggaagagagcatctgtggttgtaccagaagaaaagatgtcagatgtgtacagtattttgcagagcatcccccaaagacagattgaagaaatgcagagacaggcccggtggttctgggaagcgtacttccagtcaattaaagccattgccctggccaccctgcagattatcaatgaccggatctatccatatgctgccatctcctatgaagaatggaatgaccctcctgctgtgaagtggggcagcgtgagcaatccactcttcctcccgctgatcccaccacagtctcaagggttcaccgccatagtcctcacctacgaccgagtagagagcctcttccgggtcatcactgaagtgtccaaggtgcccagtctatccaaactacttgtcgtctggaataatcagaataaaaaccctccagaagattctctctggcccaaaatccgggttccattaaaagttgtgaggactgctgaaaacaagttaagtaaccgtttcttcccttatgatgaaatcgagacagaagctgttctggccattgatgatgatatcattatgctgacctctgacgagctgcaatttggttatgaggtctggcgggaatttcctgaccggttggtgggttacccgggtcgtctgcatctctgggaccatgagatgaataagtggaagtatgagtctgagtggacgaatgaagtgtccatggtgctcactggggcagctttttatcacaagtattttaattacctgtatacctacaaaatgcctggggatatcaagaactgggtagatgctcatatgaactgtgaagatattgccatgaacttcctggtggccaacgtcacgggaaaagcagttatcaaggtaaccccacgaaagaaattcaagtgtcctgagtgcacagccatagatgggctttcactagaccaaacacacatggtggagaggtcagagtgcatcaacaagtttgcttcagtcttcgggaccatgcctctcaaggtggtggaacaccgagctgaccctgtcctgtacaaagatgactttcctgagaagctgaagagcttccccaacattggcagcttatgaaacgtgtcattggtggaggtctgaatgtgaggctgggacagagggagagaacaaggcctcccagcactctgatgtcagagtagtaggttaagggtggaaggttgacctacttggatcttggcatgcacccacctaacccactttctcaagaacaagaacctagaatgaatatccaagcacctcgagctatgcaacctctgttcttgtatttcttatgatctctgatgggttcttctcgaaaatgccaagtggaagactttgtggcatgctccagatttaaatccagctgaggctccctttgttttcagttccatgtaacaatctggaaggaaacttcacggacaggaagactgctggagaagagaagcgtgttagcccatttgaggtctggggaatcatgtaaagggtacccagacctcacttttagttatttacatcaatgagttctttcagggaaccaaacccagaattcggtgcaaaagccaaacatcttggtgggatttgataaatgccttgggacctggagtgctgggcttgtgcacaggaagagcaccagccgctgagtcaggatcctgtcagttccatgagctattcctctttggtttggctttttgatatgattaaaattattttttattccttttt

SEQ ID NO: 1618 - DNA, 3068 bp, Homo sapiens
  source 1..3068: mol_type = genomic DNA
ggcgcggcaggaggacgaggcagggcgggcgggcgctctaagggttctgctctgactccaggttgggacagcgtcttcgctgctgctggatagtcgtgttttcggggatcgaggatactcaccagaaaccgaaaatgccgaaaccaatcaatgtccgagttaccaccatggatgcagagctggagtttgcaatccagccaaatacaactggaaaacagctttttgatcaggtggtaaagactatcggcctccgggaagtgtggtactttggcctccactatgtggataataaaggatttcctacctggctgaagctggataagaaggtgtctgcccaggaggtcaggaaggagaatcccctccagttcaagttccgggccaagttctaccctgaagatgtggctgaggagctcatccaggacatcacccagaaacttttcttcctccaagtgaaggaaggaatccttagcgatgagatctactgcccccctgagactgccgtgctcttggggtcctacgctgtgcaggccaagtttggggactacaacaaagaagtgcacaagtctgggtacctcagctctgagcggctgatccctcaaagagtgatggaccagcacaaacttaccagggaccagtgggaggaccggatccaggtgtggcatgcggaacaccgtgggatgctcaaagataatgctatgttggaatacctgaagattgctcaggacctggaaatgtatggaatcaactatttcgagataaaaaacaagaaaggaacagacctttggcttggagttgatgcccttggactgaatatttatgagaaagatgataagttaaccccaaagattggctttccttggagtgaaatcaggaacatctctttcaatgacaaaaagtttgtcattaaacccatcgacaagaaggcacctgactttgtgttttatgccccacgtctgagaatcaacaagcggatcctgcagctctgcatgggcaaccatgagttgtatatgcgccgcaggaagcctgacaccatcgaggtgcagcagatgaaggcccaggcccgggaggagaagcatcagaagcagctggagcggcaacagctggaaacagagaagaaaaggagagaaaccgtggagagagagaaagagcagatgatgcgcgagaaggaggagttgatgctgcggctgcaggactatgaggagaagacaaagaaggcagagagagagctctcggagcagattcagagggccctgcagctggaggaggagaggaagcgggcacaggaggaggccgagcgcctagaggctgaccgtatggctgcactgcgggctaaggaggagctggagagacaggcggtggatcagataaagagccaggagcagctggctgcggagcttgcagaatacactgccaagattgccctcctggaagaggcgcggaggcgcaaggaggatgaagttgaagagtggcagcacagggccaaagaagcccaggatgacctggtgaagaccaaggaggagctgcacctggtgatgacagcacccccgcccccaccaccccccgtgtacgagccggtgagctaccatgtccaggagagcttgcaggatgagggcgcagagcccacgggctacagcgcggagctgtctagtgagggcatccgggatgaccgcaatgaggagaagcgcatcactgaggcagagaagaacgagcgtgtgcagcggcagctgctgacgctgagcagcgagctgtcccaggcccgagatgagaataagaggacccacaatgacatcatccacaacgagaacatgaggcaaggccgggacaagtacaagacgctgcggcagatccggcagggcaacaccaagcagcgcatcgacgagttcgaggccctgtaacagccaggccaggaccaagggcagaggggtgctcatagcgggcgctgccagccccgccacgcttgtgtctttagtgctccaagtctaggaactccctcagatcccagttcctttagaaagcagttacccaacagaaacattctgggctgggaaccagggaggcgccctggtttgttttccccagttgtaatagtgccaagcaggcctgattctcgcgattattctcgaatcacctcctgtgttgtgctgggagcaggactgattgaattacggaaaatgcctgtaaagtctgagtaagaaacttcatgctggcctgtgtgatacaagagtcagcatcattaaaggaaacgtggcaggacttccatctgtgccatacttgttctgtattcgaaatgagctcaaattgattttttaatttctatgaaggatccatctttgtatatttacatgcttagaggggtgaaaattattttggaaattgagtctgaagcactctcgcacacacagtgattccctcctcccgtcactccacgcagctggcagagagcacagtgatcaccagcgtgagtggtggaggaggacacttggatttttttttttgttttttttttttttgcttaacagttttagaatacattgtacttatacaccttattaatgatcagctatatactatttatatacaagtgataatacagatttgtaacattagttttaaaaagggaaagttttgttctgtatattttgttaccttttacagaataaaagaattacatatgaaaaaccctctaaaccatggcacttgatgtgatgtggcaggagggcagtggtggagctggacctgcctgctgcagtcacgtgtaaacaggattattattagtgttttatgcatgtaatggactatgcacacttttaattttgtcagattcacacatgccactatgagctttcagactccagctgtgaagagactctgtttgcttgtgtttgtttgtttgcagtctctctctgccatggccttggcaggctgctggaaggcagcttgtggaggccgttggttccgcccactcattccttctcgtgcactgctttctccttcacagctaagatgccatgtgcaggtggattccatgccgcagacatgaaataaaagctttgcaaaggcacgaagca

SEQ ID NO: 1619 - DNA, 3096 bp, Homo sapiens
  source 1..3096: mol_type = genomic DNA
ggacccgccccgccggggcttttgggagcgcgggcagcgagcgcactcggcggacgcaagggcggcggggagcacacggagcactgcaggcgccgggttgggacagcgtcttcgctgctgctggatagtcgtgttttcggggatcgaggatactcaccagaaaccgaaaatgccgaaaccaatcaatgtccgagttaccaccatggatgcagagctggagtttgcaatccagccaaatacaactggaaaacagctttttgatcaggtggtaaagactatcggcctccgggaagtgtggtactttggcctccactatgtggataataaaggatttcctacctggctgaagctggataagaaggtgtctgcccaggaggtcaggaaggagaatcccctccagttcaagttccgggccaagttctaccctgaagatgtggctgaggagctcatccaggacatcacccagaaacttttcttcctccaagtgaaggaaggaatccttagcgatgagatctactgcccccctgagactgccgtgctcttggggtcctacgctgtgcaggccaagtttggggactacaacaaagaagtgcacaagtctgggtacctcagctctgagcggctgatccctcaaagagtgatggaccagcacaaacttaccagggaccagtgggaggaccggatccaggtgtggcatgcggaacaccgtgggatgctcaaagataatgctatgttggaatacctgaagattgctcaggacctggaaatgtatggaatcaactatttcgagataaaaaacaagaaaggaacagacctttggcttggagttgatgcccttggactgaatatttatgagaaagatgataagttaaccccaaagattggctttccttggagtgaaatcaggaacatctctttcaatgacaaaaagtttgtcattaaacccatcgacaagaaggcacctgactttgtgttttatgccccacgtctgagaatcaacaagcggatcctgcagctctgcatgggcaaccatgagttgtatatgcgccgcaggaagcctgacaccatcgaggtgcagcagatgaaggcccaggcccgggaggagaagcatcagaagcagctggagcggcaacagctggaaacagagaagaaaaggagagaaaccgtggagagagagaaagagcagatgatgcgcgagaaggaggagttgatgctgcggctgcaggactatgaggagaagacaaagaaggcagagagagagctctcggagcagattcagagggccctgcagctggaggaggagaggaagcgggcacaggaggaggccgagcgcctagaggctgaccgtatggctgcactgcgggctaaggaggagctggagagacaggcggtggatcagataaagagccaggagcagctggctgcggagcttgcagaatacactgccaagattgccctcctggaagaggcgcggaggcgcaaggaggatgaagttgaagagtggcagcacagggccaaagaagcccaggatgacctggtgaagaccaaggaggagctgcacctggtgatgacagcacccccgcccccaccaccccccgtgtacgagccggtgagctaccatgtccaggagagcttgcaggatgagggcgcagagcccacgggctacagcgcggagctgtctagtgagggcatccgggatgaccgcaatgaggagaagcgcatcactgaggcagagaagaacgagcgtgtgcagcggcagctgctgacgctgagcagcgagctgtcccaggcccgagatgagaataagaggacccacaatgacatcatccacaacgagaacatgaggcaaggccgggacaagtacaagacgctgcggcagatccggcagggcaacaccaagcagcgcatcgacgagttcgaggccctgtaacagccaggccaggaccaagggcagaggggtgctcatagcgggcgctgccagccccgccacgcttgtgtctttagtgctccaagtctaggaactccctcagatcccagttcctttagaaagcagttacccaacagaaacattctgggctgggaaccagggaggcgccctggtttgttttccccagttgtaatagtgccaagcaggcctgattctcgcgattattctcgaatcacctcctgtgttgtgctgggagcaggactgattgaattacggaaaatgcctgtaaagtctgagtaagaaacttcatgctggcctgtgtgatacaagagtcagcatcattaaaggaaacgtggcaggacttccatctgtgccatacttgttctgtattcgaaatgagctcaaattgattttttaatttctatgaaggatccatctttgtatatttacatgcttagaggggtgaaaattattttggaaattgagtctgaagcactctcgcacacacagtgattccctcctcccgtcactccacgcagctggcagagagcacagtgatcaccagcgtgagtggtggaggaggacacttggatttttttttttgttttttttttttttgcttaacagttttagaatacattgtacttatacaccttattaatgatcagctatatactatttatatacaagtgataatacagatttgtaacattagttttaaaaagggaaagttttgttctgtatattttgttaccttttacagaataaaagaattacatatgaaaaaccctctaaaccatggcacttgatgtgatgtggcaggagggcagtggtggagctggacctgcctgctgcagtcacgtgtaaacaggattattattagtgttttatgcatgtaatggactatgcacacttttaattttgtcagattcacacatgccactatgagctttcagactccagctgtgaagagactctgtttgcttgtgtttgtttgtttgcagtctctctctgccatggccttggcaggctgctggaaggcagcttgtggaggccgttggttccgcccactcattccttctcgtgcactgctttctccttcacagctaagatgccatgtgcaggtggattccatgccgcagacatgaaataaaagctttgcaaaggca

SEQ ID NO: 1620 - DNA, 1823 bp, Homo sapiens
  source 1..1823: mol_type = genomic DNA
gtgtcgggcgcggcaggaggacgaggcagggcgggcgggcgctctaagggttctgctctgactccaggttgggacagcgtcttcgctgctgctggatagtcgtgttttcggggatcgaggatactcaccagaaaccgaaaatgccgaaaccaatcaatgtccgagttaccaccatggatgcagagctggagtttgcaatccagccaaatacaactggaaaacagctttttgatcaggtgtctgcccaggaggtcaggaaggagaatcccctccagttcaagttccgggccaagttctaccctgaagatgtggctgaggagctcatccaggacatcacccagaaacttttcttcctccaagtgaaggaaggaatccttagcgatgagatctactgcccccctgagactgccgtgctcttggggtcctacgctgtgcaggccaagtttggggactacaacaaagaagtgcacaagtctgggtacctcagctctgagcggctgatccctcaaagagtgatggaccagcacaaacttaccagggaccagtgggaggaccggatccaggtgtggcatgcggaacaccgtgggatgctcaaagataatgctatgttggaatacctgaagattgctcaggacctggaaatgtatggaatcaactatttcgagataaaaaacaagaaaggaacagacctttggcttggagttgatgcccttggactgaatatttatgagaaagatgataagttaaccccaaagattggctttccttggagtgaaatcaggaacatctctttcaatgacaaaaagtttgtcattaaacccatcgacaagaaggcacctgactttgtgttttatgccccacgtctgagaatcaacaagcggatcctgcagctctgcatgggcaaccatgagttgtatatgcgccgcaggaagcctgacaccatcgaggtgcagcagatgaaggcccaggcccgggaggagaagcatcagaagcagctggagcggcaacagctggaaacagagaagaaaaggagagaaaccgtggagagagagaaagagcagatgatgcgcgagaaggaggagttgatgctgcggctgcaggactatgaggagaagacaaagaaggcagagagagagctctcggagcagattcagagggccctgcagctggaggaggagaggaagcgggcacaggaggaggccgagcgcctagaggctgaccgtatggctgcactgcgggctaaggaggagctggagagacaggcggtggatcagataaagagccaggagcagctggctgcggagcttgcagaatacactgccaagattgccctcctggaagaggcgcggaggcgcaaggaggatgaagttgaagagtggcagcacagggccaaagaagcccaggatgacctggtgaagaccaaggaggagctgcacctggtgatgacagcacccccgcccccaccaccccccgtgtacgagccggtgagctaccatgtccaggagagcttgcaggatgagggcgcagagcccacgggctacagcgcggagctgtctagtgagggcatccgggatgaccgcaatgaggagaagcgcatcactgaggcagagaagaacgagcgtgtgcagcggcagctgctgacgctgagcagcgagctgtcccaggcccgagatgagaataagaggacccacaatgacatcatccacaacgagaacatgaggcaaggccgggacaagtacaagacgctgcggcagatccggcagggcaacaccaagcagcgcatcgacgagttcgaggccctgtaacagccaggccaggaccaa

SEQ ID NO: 1621 - DNA, 2096 bp, Homo sapiens
  source 1..2096: mol_type = genomic DNA
gccgagagggcgggccagggccgcactccggagactcgcggttgctacgcgcaccatggctggagacggagtttcgctcttgatgcccagcaggctggagtgcaatggcgcgatttcagctcactgcaacctcctcctcccagaggtacttctcagccctctagctccaactgagaacccagccagtcaggaagtcgctacttcgggaacaccaaccaatcagggggccgtcacctgctgaaggagtccttcggcggctgttgtgtcgggagcctgatcgcgatggggacaaaggcgcaagtcgagaggaaactgttgtgcctcttcatattggcgatcctgttgtgctccctggcattgggcagtgttacagtgcactcttctgaacctgaagtcagaattcctgagaataatcctgtgaagttgtcctgtgcctactcgggcttttcttctccccgtgtggagtggaagtttgaccaaggagacaccaccagactcgtttgctataataacaagatcacagcttcctatgaggaccgggtgaccttcttgccaactggtatcaccttcaagtccgtgacacgggaagacactgggacatacacttgtatggtctctgaggaaggcggcaacagctatggggaggtcaaggtcaagctcatcgtgcttgtgcctccatccaagcctacagttaacatcccctcctctgccaccattgggaaccgggcagtgctgacatgctcagaacaagatggttccccaccttctgaatacacctggttcaaagatgggatagtgatgcctacgaatcccaaaagcacccgtgccttcagcaactcttcctatgtcctgaatcccacaacaggagagctggtctttgatcccctgtcagcctctgatactggagaatacagctgtgaggcacggaatgggtatgggacacccatgacttcaaatgctgtgcgcatggaagctgtggagcggaatgtgggggtcatcgtggcagccgtccttgtaaccctgattctcctgggaatcttggtttttggcatctggtttgcctatagccgaggccactttgacagaacaaagaaagggacttcgagtaagaaggtgatttacagccagcctagtgcccgaagtgaaggagaattcaaacagacctcgtcattcctggtgtgagcctggtcggctcaccgcctatcatctgcatttgccttactcaggtgctaccggactctggcccctgatgtctgtagtttcacaggatgccttatttgtcttctacaccccacagggccccctacttcttcggatgtgtttttaataatgtcagctatgtgccccatcctccttcatgccctccctccctttcctaccactgctgagtggcctggaacttgtttaaagtgtttattccccatttctttgagggatcaggaaggaatcctgggtatgccattgacttcccttctaagtagacagcaaaaatggcgggggtcgcaggaatctgcactcaactgcccacctggctggcagggatctttgaataggtatcttgagcttggttctgggctctttccttgtgtactgacgaccagggccagctgttctagagcgggaattagaggctagagcggctgaaatggttgtttggtgatgacactggggtccttccatctctggggcccactctcttctgtcttcccatgggaagtgccactgggatccctctgccctgtcctcctgaatacaagctgactgacattgactgtgtctgtggaaaatgggagctcttgttgtggagagcatagtaaattttcagagaacttgaagccaaaaggatttaaaaccgctgctctaaagaaaagaaaactggaggctgggcgcagtggctcacgcctataatcccagaggctgaggcaggcggatcacctgaggtcaggagttcaagatcagcctgaccaacatggagaaaccctactaaaaatacaaagttagccaggcatagtggtgcatgcctgtaatcccagctgctcaggagcctggcaacaagagcaaaactccagctcaaaaaaaaaaagaaagaaaagaaa

SEQ ID NO: 1622 - DNA, 2170 bp, Homo sapiens
  source 1..2170: mol_type = genomic DNA
cactccggagactcgcggttgctacgcgcaccatggctggagaggtacttctcagccctctagctccaactgagaacccagccagtcaggaagtcgctacttcgggaacaccaaccaatcagggcggctggctctcagtcccctcgctgtagtcgcggagctgtgtctgttcccaggagtccttcggcggctgttgtgtcgggagcctgatcgcgatggggacaaaggcgcaagtcgagaggaaactgttgtgcctcttcatattggcgatcctgttgtgctccctggcattgggcagtgttacagtgcactcttctgaacctgaagtcagaattcctgagaataatcctgtgaagttgtcctgtgcctactcgggcttttcttctccccgtgtggagtggaagtttgaccaaggagacaccaccagactcgtttgctataataacaagatcacagcttcctatgaggaccgggtgaccttcttgccaactggtatcaccttcaagtccgtgacacgggaagacactgggacatacacttgtatggtctctgaggaaggcggcaacagctatggggaggtcaaggtcaagctcatcgtgcttgtgcctccatccaagcctacagttaacatcccctcctctgccaccattgggaaccgggcagtgctgacatgctcagaacaagatggttccccaccttctgaatacacctggttcaaagatgggatagtgatgcctacgaatcccaaaagcacccgtgccttcagcaactcttcctatgtcctgaatcccacaacaggagagctggtctttgatcccctgtcagcctctgatactggagaatacagctgtgaggcacggaatgggtatgggacacccatgacttcaaatgctgtgcgcatggaagctgtggagcggaatgtgggggtcatcgtggcagccgtccttgtaaccctgattctcctgggaatcttggtttttggcatctggtttgcctatagccgaggccactttgacagaacaaagaaagggacttcgagtaagaaggtgatttacagccagcctagtgcccgaagtgaaggagaattcaaacagacctcgtcattcctggtgtgagcctggtcggctcaccgcctatcatctgcatttgccttactcaggtgctaccggactctggcccctgatgtctgtagtttcacaggatgccttatttgtcttctacaccccacagggccccctacttcttcggatgtgtttttaataatgtcagctatgtgccccatcctccttcatgccctccctccctttcctaccactgctgagtggcctggaacttgtttaaagtgtttattccccatttctttgagggatcaggaaggaatcctgggtatgccattgacttcccttctaagtagacagcaaaaatggcgggggtcgcaggaatctgcactcaactgcccacctggctggcagggatctttgaataggtatcttgagcttggttctgggctctttccttgtgtactgacgaccagggccagctgttctagagcgggaattagaggctagagcggctgaaatggttgtttggtgatgacactggggtccttccatctctggggcccactctcttctgtcttcccatgggaagtgccactgggatccctctgccctgtcctcctgaatacaagctgactgacattgactgtgtctgtggaaaatgggagctcttgttgtggagagcatagtaaattttcagagaacttgaagccaaaaggatttaaaaccgctgctctaaagaaaagaaaactggaggctgggcgcagtggctcacgcctataatcccagaggctgaggcaggcggatcacctgaggtcaggagttcaagatcagcctgaccaacatggagaaaccctactaaaaatacaaagttagccaggcatagtggtgcatgcctgtaatcccagctgctcaggagcctggcaacaagagcaaaactccagctcaaaaaaaaaaagaaagaaaagaaagctggagctggtggcttaggccatcacccttcccttggctggaactactggacagacccttttgagatgtgcctgtggtgctgtggagatgtgtgtagtggtcttagctctttgttgagcttgtgtgtgtgttgtgtagtc

SEQ ID NO: 1623 - DNA, 4665 bp, Homo sapiens
  source 1..4665: mol_type = genomic DNA
ggggttccacctggcggctggctctcagtcccctcgctgtagtcgcggagctgtgtctgttcccaggagtccttcggcggctgttgtgtcgggagcctgatcgcgatggggacaaaggcgcaagtcgagaggaaactgttgtgcctcttcatattggcgatcctgttgtgctccctggcattgggcagtgttacagtgcactcttctgaacctgaagtcagaattcctgagaataatcctgtgaagttgtcctgtgcctactcgggcttttcttctccccgtgtggagtggaagtttgaccaaggagacaccaccagactcgtttgctataataacaagatcacagcttcctatgaggaccgggtgaccttcttgccaactggtatcaccttcaagtccgtgacacgggaagacactgggacatacacttgtatggtctctgaggaaggcggcaacagctatggggaggtcaaggtcaagctcatcgtgcttgtgcctccatccaagcctacagttaacatcccctcctctgccaccattgggaaccgggcagtgctgacatgctcagaacaagatggttccccaccttctgaatacacctggttcaaagatgggatagtgatgcctacgaatcccaaaagcacccgtgccttcagcaactcttcctatgtcctgaatcccacaacaggagagctggtctttgatcccctgtcagcctctgatactggagaatacagctgtgaggcacggaatgggtatgggacacccatgacttcaaatgctgtgcgcatggaagctgtggagcggaatgtgggggtcatcgtggcagccgtccttgtaaccctgattctcctgggaatcttggtttttggcatctggtttgcctatagccgaggccactttgacagaacaaagaaagggacttcgagtaagaaggtgatttacagccagcctagtgcccgaagtgaaggagaattcaaacagacctcgtcattcctggtgtgagcctggtcggctcaccgcctatcatctgcatttgccttactcaggtgctaccggactctggcccctgatgtctgtagtttcacaggatgccttatttgtcttctacaccccacagggccccctacttcttcggatgtgtttttaataatgtcagctatgtgccccatcctccttcatgccctccctccctttcctaccactgctgagtggcctggaacttgtttaaagtgtttattccccatttctttgagggatcaggaaggaatcctgggtatgccattgacttcccttctaagtagacagcaaaaatggcgggggtcgcaggaatctgcactcaactgcccacctggctggcagggatctttgaataggtatcttgagcttggttctgggctctttccttgtgtactgacgaccagggccagctgttctagagcgggaattagaggctagagcggctgaaatggttgtttggtgatgacactggggtccttccatctctggggcccactctcttctgtcttcccatgggaagtgccactgggatccctctgccctgtcctcctgaatacaagctgactgacattgactgtgtctgtggaaaatgggagctcttgttgtggagagcatagtaaattttcagagaacttgaagccaaaaggatttaaaaccgctgctctaaagaaaagaaaactggaggctgggcgcagtggctcacgcctataatcccagaggctgaggcaggcggatcacctgaggtcaggagttcaagatcagcctgaccaacatggagaaaccctactaaaaatacaaagttagccaggcatagtggtgcatgcctgtaatcccagctgctcaggagcctggcaacaagagcaaaactccagctcaaaaaaaaaaagaaagaaaagaaagctggagctggtggcttaggccatcacccttcccttggctggaactactggacagacccttttgagatgtgcctgtggtgctgtggagatgtgtgtagtggtcttagctctttgttgagcttgtgtgtgtgttgtgtagtcttagctgtatgctgaaattgggcgtgtgttggagggcttcttagctctttggtgagattgtatttctatgtgtttgtatcagctgaatgttgctggaaataaaaccttggtttgtcaaggctcttttttgtgggaagtaagtaggggaaaaggtctttgagggttcctaggctcctttgtacaacaggaaaatgcctcaaagccttgcttcccagcaacctggggctggttcccagtgcctggtcctgccccttcctggttcttatctcaaggcagagcttctgaatttcaggccttcattccagagccctcttgtggccaggccttcctttgctggaggaaggtacacagggtgaagctgatgctgtacttgggggatctccttggcctgttccaccaagtgagagaaggtacttactcttgtacctcctgttcagccaggtgcattaacagacctccctacagctgtaggaactactgtcccagagctgaggcaaggggatttctcaggtcatttggagaacaagtgctttagtagtagtttaaagtagtaactgctactgtatttagtggggtggaattcagaagaaatttgaagaccagatcatgggtggtctgcatgtgaatgaacaggaatgagccggacagcctggctgtcattgctttcttcctccccatttggacccttctctgcccttacatttttgtttctccatctaccaccatccaccagtctatttattaacttagcaagaggacaagtaaagggccctcttggcttgattttgcttctttctttctgtggaggatatactaagtgcgactttgccctatcctatttggaaatccctaacagaattgagttttctattaaggatccaaaaagaaaaacaaaatgctaatgaagccatcagtcaagggtcacatgccaataaacaataaattttccagaagaaatgaaatccaactagacaaataaagtagagcttatgaaatggttcagtaaagatgagtttgttgttttttgttttgttttgttttgtttttttaaagacggagtctcgctctgtcacccaggctggagtgcagtggtatgatcttggctcactgtaacctccgcctcccgggttcaagccattctcctgcctcagtctcctgagtagctgggattacgggtgcgtgccaccatgcctggctaatttttgtgtttttagtagagacagggtttcaccatgttggtcgggctggtctcaaactcctgacctcttgatccgcctgccttggcctcccaaagtgatgggattacagatgtgagccaccgtgcctagccaaggatgagatttttaaagtatgtttcagttctgtgtcatggttggaagacagagtaggaaggatatggaaaaggtcatggggaagcagaggtgattcatggctctgtgaatttgaggtgaatggttccttattgtctaggccacttgtgaagaatatgagtcagttattgccagccttggaatttacttctctagcttacaatggaccttttgaactggaaaacaccttgtctgcattcactttaaaatgtcaaaactaatttttataataaatgtttattttcacattgagtttgtttaaatcctgaagttcttaccttaagagaattgggactcctagagtgattggacattcaaaatattcctgatagtcttgttaattaagagattaggatatctttccattaccttgataattacgttttaatttagcttttttcattggcctgtgtttaaatgcaaataaccccacaatggacatttcctatgttaaagtgacatttaggggataaaaaatgagagcagttccatggattttggtgtttcccctgagacatgaactcagcataatctgggataaaatgattgagtgttaaggatgtgtttgttgttcctgtcgtttttttattttcttcaaagtatacaacatggtttgatatgcacatacatttgtgtaatgattgccatggtcaattaacacatcaccatttttgtgtgtgtgtgtgtgtgtgtgtgtgagggagtcttgctccgttgccaggctggagtgcaatggtacaaccttggctcactgcaacctccacctcctgggttcaagcaattctcttgcctcagcctcctaagtagctgggactataggcgtgtgccaccatgcccagctaatttttgtatttttagtagagacggggtttcaccatgttggccaggatgatctcgatcccttgacctcatgatccgcccacctcggcctcccaaagtgctgggattacaggcgtgagtcactgcacccggccacatcacctcccatgttctatcttacgtattcagaacttgttcatcttgtaactgaaagcgtgtaccctttgaccaacactgtttttcctgtcttaacaggatctacagatcaaggacaggggaggggatagtggaggaaaacggagttagtctgtttctaaatgaggggacagtatgtttcttggggcctgaggacagcttaataaagtagacaaatgaagaaaaacaacaatttgcattaaaaaatatccaattcttta

SEQ ID NO: 1624 - DNA, 1162 bp, Homo sapiens
  source 1..1162: mol_type = genomic DNA
gcttccggatccggtctcagctctgggagggaacgggagatgttgcaggcgccgagagggcgggccagggccgcactccggagactcgcggttgctacgcgcaccatggctggaggctccctggcattgggcagtgttacagtgcactcttctgaacctgaagtcagaattcctgagaataatcctgtgaagttgtcctgtgcctactcgggcttttcttctccccgtgtggagtggaagtttgaccaaggagacaccaccagactcgtttgctataataacaagatcacagcttcctatgaggaccgggtgaccttcttgccaactggtatcaccttcaagtccgtgacacgggaagacactgggacatacacttgtatggtctctgaggaaggcggcaacagctatggggaggtcaaggtcaagctcatcgtgcttgtgcctccatccaagcctacagttaacatcccctcctctgccaccattgggaaccgggcagtgctgacatgctcagaacaagatggttccccaccttctgaatacacctggttcaaagatgggatagtgatgcctacgaatcccaaaagcacccgtgccttcagcaactcttcctatgtcctgaatcccacaacaggagagctggtctttgatcccctgtcagcctctgatactggagaatacagctgtgaggcacggaatgggtatgggacacccatgacttcaaatgctgtgcgcatggaagctgtggagcggaatgtgggggtcatcgtggcagccgtccttgtaaccctgattctcctgggaatcttggtttttggcatctggtttgcctatagccgaggccactttgacagaacaaagaaagggacttcgagtaagaaggtgatttacagccagcctagtgcccgaagtgaaggagaattcaaacagacctcgtcattcctggtgtgagcctggtcggctcaccgcctatcatctgcatttgccttactcaggtgctaccggactctggcccctgatgtctgtagtttcacaggatgccttatttgtcttctacaccccacagggccccctacttcttcggatgtgtttttaataatgtcagctatgtgccccatcctccttcatgccctccctccctttcctaccactgctgagtggc

SEQ ID NO: 1625 - DNA, 1245 bp, Homo sapiens
  source 1..1245: mol_type = genomic DNA
gttgtgtcgggagcctgatcgcgatggggacaaaggcgcaagtcgagaggaaactgttgtgcctcttcatattggcgatcctgttgtgctccctggcattgggcagtgttacagtgcactcttctgaacctgaagtcagaattcctgagaataatcctgtgaagttgtcctgtgcctactcgggcttttcttctccccgtgtggagtggaagtttgaccaaggagacaccaccagactcgtttgctataataacaagatcacagtgcctccatccaagcctacagttaacatcccctcctctgccaccattgggaaccgggcagtgctgacatgctcagaacaagatggttccccaccttctgaatacacctggttcaaagatgggatagtgatgcctacgaatcccaaaagcacccgtgccttcagcaactcttcctatgtcctgaatcccacaacaggagagctggtctttgatcccctgtcagcctctgatactggagaatacagctgtgaggcacggaatgggtatgggacacccatgacttcaaatgctgtgcgcatggaagctgtggagcggaatgtgggggtcatcgtggcagccgtccttgtaaccctgattctcctgggaatcttggtttttggcatctggtttgcctatagccgaggccactttgacagaacaaagaaagggacttcgagtaagaaggtgatttacagccagcctagtgcccgaagtgaaggagaattcaaacagacctcgtcattcctggtgtgagcctggtcggctcaccgcctatcatctgcatttgccttactcaggtgctaccggactctggcccctgatgtctgtagtttcacaggatgccttatttgtcttctacaccccacagggccccctacttcttcggatgtgtttttaataatgtcagctatgtgccccatcctccttcatgccctccctccctttcctaccactgctgagtggcctggaacttgtttaaagtgtttattccccatttctttgagggatcaggaaggaatcctgggtatgccattgacttcccttctaagtagacagcaaaaatggcgggggtcgcaggaatctgcactcaactgcccacctggctggcagggatctttgaataggtatcttgagcttggttctgggctctttccttgtgtactgacgaccagggccagctgttctagagcgggaattagaggctagagcggctgaaatggtt

SEQ ID NO: 1626 - DNA, 4949 bp, Homo sapiens
  source 1..4949: mol_type = genomic DNA
ccgcgcccgcgcccccgccgccgccatgggcgtgcagggcttccaggactacatcgagaagcactgcccgagcgccgtggtgccggtggagctgcagaagctggcccggggcagcctggtgggcggcgggcggcagcggcccccgcagaccccgctgcgcctgctggtggacgccgacaactgcctgcaccgcctctacggcggcttctacaccgactgggtcagcggcggccagtggaaccacatgcttggctacctggcggcgctggccaaggcctgcttcggcggcaacatcgagctcttcgtcttcttcaacggcgcgctcgagaaggcccggctgcacgagtgggtcaagcggcagggcaacgagcgccagacggcacagcagatcgtcagccatgtccagaacaagggcaccccgccgccaaaggtctggttcctgccgcccgtctgcatggcccactgcatccgcctggcgctcatccgcttccacgtcaaggttgcacagagcattgaggatcaccatcaggaagtgattggtttctgcagagagaatggtttccatggcttggttgcgtatgactctgattatgcactgtgcaacatcccctactatttcagtgcccatgccctaaaactgagccggaacgggaaaagtctcaccacaagccaatatctgatgcatgaagttgccaagcaactggacctgaatccaaatcgttttcctatttttgctgctctcttaggaaatcacattctgcctgatgaagatctggcttcctttcactggagtttacttggtccagaacatccactagcctcactaaaggtccgggcccaccagctggtcttgccaccttgcgacgtagtgatcaaagccgttgctgactatgtacgcaacattcaggacacctctgacttggatgccatagctaaagatgttttccagcattcacagtctagaacagatgacaaagttattcgatttaagagagcaattggatattattcagcgactagtaagcctatgtcatttcatccaccacattacttagcagccagacccggtccgtttggaatgcctgggatggtgccgccgcatgttcctcctcagatgctcaacattccgcagacctctctgcaagcaaagcccgtggccccacaggtgcccagcccagggggcgccccgggccagggtccatacccgtacagcctctctgagccagcacctctcactttggacacgagcgggaagaatctgacggagcagaacagctacagcaacattcctcacgaagggaagcacacgccgctgtatgagcggtcctcgcccatcaacccggcccagagcggcagccccaaccacgtggattccgcctacttccctggctcttctacatcgtcatcttccgacaacgacgagggcagcggaggggcgacaaaccatatcagcgggaacaagattggctgggagaagacgggaagccactcagagcctcaggcacgaggagacccaggagaccaaacaaaggcagaaggctcgtccactgcctcttcaggaagccaactagccgaaggcaagggaagccagatgggcactgtccagccaatcccgtgcctcctgtcgatgcccaccaggaaccacatggacatcaccacacctcccctgccccccgtcgcacctgaggtgctgagagtggccgagcacaggcacaagaaggggctgatgtacccctacatcttccatgtcctgacgaagggtgaaatcaaaattgctgtttctattgaagatgaagccaacaaggacctgcctccggccgctctgctctataggccagttcgtcagtatgtttacggagtcctgtttagtttggcagaaagcagaaagaaaactgagagacttgcttttagaaagaacagacttccaccagaattttcaccagtgatcattaaagaatgggcagcttacaaaggaaagtctcctcaaaccccggaactggttgaagctcttgccttcagggagtggacctgccccaacctgaagaggctgtggttgggtaaggcggtagaggacaagaaccgcaggatgagggccttcctggcctgcatgaggtcggacaccccagccatgctcaaccctgccaacgtgcccactcacctcatggtgctctgctgcgtcttacggtacatggtgcagtggccgggagcacgcatccttcggcgtcaggagctagatgccttcctggctcaggcgctgtcccccaaactctacgagcctgatcagctccaggagctcaagattgagaacctagatccccgaggaattcagctatcagctctcttcatgagtggagtagacatggccttgtttgcaaatgatgcatgcggacagccaatcccctgggaacactgttgtccttggatgtattttgatgggaagctcttccaatccaaactcctcaaagccagccgggaaaagaccccactcattgacctctgtgatggtcaggctgatcaggctgccaaggtagagaagatgcgccagagcgtcctcgaggggctcagcttctccaggcagagccacacgctccctttcccgccgccacctgccctgcccttctaccctgcctctgcgtacccccggcactttgggcctgtcccaccctctcagggcaggggcagaggctttgcaggcgtctgtggctttggaggcccctatggggaaacggtagcaacaggcccttaccgtgccttccgtgtggcggcagcatcgggacactgcggagccttctcaggcagtgacagcagcaggactagcaagtcccagggcggagtccaacctataccttctcagggaggcaaactagaaatagctggcactgtggttggccattgggctgggagcaggcggggccgtgggggccgggggcctttccccctgcaggtggtttctgtcggaggaccagctagagggcgtccaagaggagttatttccaccccagtgattagaacatttggaagaggtggaaggtactatggcagaggttacaaaaaccaggcagcaattcagggcagacctccttatgctgcttcagcagaagaagtggccaaagaacttaagtcaaaatctggggaatcgaagtcctctgctatgtcttcagacgggtccctggctgaaaacggagtgatggccgaggagaagccggctccccagatgaacgggagcacgggtgacgccagggcccccagccactctgaaagtgccttgaataatgactctaaaacgtgcaatacaaatcctcatttaaatgcactaagtacagacagcgcttgccgcagagaagctgctctggaggcagctgtcttaaataaagaagagtaaacttattttttatagagggtgaaggatgctggaagggtaaggatttaggaatatctggagagaaagagagcctgcagttatgtacattttgtcctttccgtaagagaaaaatgaggactttggaaattcagatccctctttgatatcagagatttaaacaacacatttttagttttaaccagttgtagtcaaaatgctacaataaaacaaaaaagagaaagaaaatgaagagcatttgactcccgcacttaaaatgaagtacacataaagtttaaactggttatgacaaaagcctttagttgtgtttcttgaactataaagaaaacaaattttggcagtctttaagtatatatagcttaaaatataatttttagcatttggcaccatatgtatgccattatatttgattttgcattactgtttcacaatgaagctttctttaaggctttgatttttatgattatgaaagaaataaggcacaaccacagtttttctttcttaaatttcatcactgttgatgtggttcttttgtgttaaaaaaaaaaagtgcaactatcaaaactaaaaaattatagagtaatattgccgttctgctgattttaaatatacaatacatcatacatactttacaagcaagttaaatggagataaagttgaaatcatagaagatgcaaatgacctttcaaaatcaacacaatgtgttctgaaactttcgtgactaataccatgcatctgtgatcaatgaactatgtggttttgaatcggatgtagaccattagtactactacttgagctaaacttctgcatggttcataatttttaaagtgtgtagttaatatgcatgttatcgtcctttcttccattcttaacagtatgtgcccatttgcaaaacaaaaatgctaataatcagtaatagtcctataaaagatgttaactctgtttagtcattgactgatcttgctctaaccttaaaattttgtgattattgacctctgttgcatttattctaaagccccccaaaaattatctagccgtttcgaatatcaacattaccctggtgtattcactgctgtatgcattattgttctttgttgctgttttatgccttcatattagcaaatatgaaattctgtgaaaaaaaaccctttgatcttaaaaaaaaaaaaaccaccccccccttctgtagcaggaaacaaattgcttgttcttgagaactttcccatcaagaatttagtagaagcaggtatacttctatcattttgatgtttttgttaatgtttccaaacaatgtactttgaaatcagaatcacttcttatcgttttcatatacttctgatgctcttcatcacattagtgatcagaaatgaggtgtaattccccaacccctgcccgcaagagctaagtaggatcttactgtaagttgaagggagttttgccctaactcatggattgtgcaagaatgaactgctgttgggtttgattgactgtcgatggattgtggtgtggtgtatctgaaggctattgaatgcaacttacaatgcttaataaaaatctttattcttttagt

SEQ ID NO: 1627 - DNA, 5041 bp, Homo sapiens
  source 1..5041: mol_type = genomic DNA
ccgcgcccgcgcccccgccgccgccatgggcgtgcagggcttccaggactacatcgagaagcactgcccgagcgccgtggtgccggtggagctgcagaagctggcccggggcagcctggtgggcggcgggcggcagcggcccccgcagaccccgctgcgcctgctggtggacgccgacaactgcctgcaccgcctctacggcggcttctacaccgactgggtcagcggcggccagtggaaccacatgcttggctacctggcggcgctggccaaggcctgcttcggcggcaacatcgagctcttcgtcttcttcaacggcgcgctcgagaaggcccggctgcacgagtgggtcaagcggcagggcaacgagcgccagacggcacagcagatcgtcagccatgtccagaacaagggcaccccgccgccaaaggtctggttcctgccgcccgtctgcatggcccactgcatccgcctggcgctcatccgcttccacgtcaaggttgcacagagcattgaggatcaccatcaggaagtgattggtttctgcagagagaatggtttccatggcttggttgcgtatgactctgattatgcactgtgcaacatcccctactatttcagtgcccatgccctaaaactgagccggaacgggaaaagtctcaccacaagccaatatctgatgcatgaagttgccaagcaactggacctgaatccaaatcgttttcctatttttgctgctctcttaggaaatcacattctgcctgatgaagatctggcttcctttcactggagtttacttggtccagaacatccactagcctcactaaaggtccgggcccaccagctggtcttgccaccttgcgacgtagtgatcaaagccgttgctgactatgtacgcaacattcaggacacctctgacttggatgccatagctaaagatgttttccagcattcacagtctagaacagatgacaaagttattcgatttaagagagcaattggatattattcagcgactagtaagcctatgtcatttcatccaccacattacttagcagccagacccggtccgtttggaatgcctgggatggtgccgccgcatgttcctcctcagatgctcaacattccgcagacctctctgcaagcaaagcccgtggccccacaggtgcccagcccagggggcgccccgggccagggtccatacccgtacagcctctctgagccagcacctctcactttggacacgagcgggaagaatctgacggagcagaacagctacagcaacattcctcacgaagggaagcacacgccgctgtatgagcggtcctcgcccatcaacccggcccagagcggcagccccaaccacgtggattccgcctacttccctggctcttctacatcgtcatcttccgacaacgacgagggcagcggaggggcgacaaagcctttccaactctacttgcaaaaaaactttgtgtttcacaaagagaattccatcgtgctctgctccaggatcctgaggcatggccatatcagcgggaacaagattggctgggagaagacgggaagccactcagagcctcaggcacgaggagacccaggagaccaaacaaaggcagaaggctcgtccactgcctcttcaggaagccaactagccgaaggcaagggaagccagatgggcactgtccagccaatcccgtgcctcctgtcgatgcccaccaggaaccacatggacatcaccacacctcccctgccccccgtcgcacctgaggtgctgagagtggccgagcacaggcacaagaaggggctgatgtacccctacatcttccatgtcctgacgaagggtgaaatcaaaattgctgtttctattgaagatgaagccaacaaggacctgcctccggccgctctgctctataggccagttcgtcagtatgtttacggagtcctgtttagtttggcagaaagcagaaagaaaactgagagacttgcttttagaaagaacagacttccaccagaattttcaccagtgatcattaaagaatgggcagcttacaaaggaaagtctcctcaaaccccggaactggttgaagctcttgccttcagggagtggacctgccccaacctgaagaggctgtggttgggtaaggcggtagaggacaagaaccgcaggatgagggccttcctggcctgcatgaggtcggacaccccagccatgctcaaccctgccaacgtgcccactcacctcatggtgctctgctgcgtcttacggtacatggtgcagtggccgggagcacgcatccttcggcgtcaggagctagatgccttcctggctcaggcgctgtcccccaaactctacgagcctgatcagctccaggagctcaagattgagaacctagatccccgaggaattcagctatcagctctcttcatgagtggagtagacatggccttgtttgcaaatgatgcatgcggacagccaatcccctgggaacactgttgtccttggatgtattttgatgggaagctcttccaatccaaactcctcaaagccagccgggaaaagaccccactcattgacctctgtgatggtcaggctgatcaggctgccaaggtagagaagatgcgccagagcgtcctcgaggggctcagcttctccaggcagagccacacgctccctttcccgccgccacctgccctgcccttctaccctgcctctgcgtacccccggcactttgggcctgtcccaccctctcagggcaggggcagaggctttgcaggcgtctgtggctttggaggcccctatggggaaacggtagcaacaggcccttaccgtgccttccgtgtggcggcagcatcgggacactgcggagccttctcaggcagtgacagcagcaggactagcaagtcccagggcggagtccaacctataccttctcagggaggcaaactagaaatagctggcactgtggttggccattgggctgggagcaggcggggccgtgggggccgggggcctttccccctgcaggtggtttctgtcggaggaccagctagagggcgtccaagaggagttatttccaccccagtgattagaacatttggaagaggtggaaggtactatggcagaggttacaaaaaccaggcagcaattcagggcagacctccttatgctgcttcagcagaagaagtggccaaagaacttaagtcaaaatctggggaatcgaagtcctctgctatgtcttcagacgggtccctggctgaaaacggagtgatggccgaggagaagccggctccccagatgaacgggagcacgggtgacgccagggcccccagccactctgaaagtgccttgaataatgactctaaaacgtgcaatacaaatcctcatttaaatgcactaagtacagacagcgcttgccgcagagaagctgctctggaggcagctgtcttaaataaagaagagtaaacttattttttatagagggtgaaggatgctggaagggtaaggatttaggaatatctggagagaaagagagcctgcagttatgtacattttgtcctttccgtaagagaaaaatgaggactttggaaattcagatccctctttgatatcagagatttaaacaacacatttttagttttaaccagttgtagtcaaaatgctacaataaaacaaaaaagagaaagaaaatgaagagcatttgactcccgcacttaaaatgaagtacacataaagtttaaactggttatgacaaaagcctttagttgtgtttcttgaactataaagaaaacaaattttggcagtctttaagtatatatagcttaaaatataatttttagcatttggcaccatatgtatgccattatatttgattttgcattactgtttcacaatgaagctttctttaaggctttgatttttatgattatgaaagaaataaggcacaaccacagtttttctttcttaaatttcatcactgttgatgtggttcttttgtgttaaaaaaaaaaagtgcaactatcaaaactaaaaaattatagagtaatattgccgttctgctgattttaaatatacaatacatcatacatactttacaagcaagttaaatggagataaagttgaaatcatagaagatgcaaatgacctttcaaaatcaacacaatgtgttctgaaactttcgtgactaataccatgcatctgtgatcaatgaactatgtggttttgaatcggatgtagaccattagtactactacttgagctaaacttctgcatggttcataatttttaaagtgtgtagttaatatgcatgttatcgtcctttcttccattcttaacagtatgtgcccatttgcaaaacaaaaatgctaataatcagtaatagtcctataaaagatgttaactctgtttagtcattgactgatcttgctctaaccttaaaattttgtgattattgacctctgttgcatttattctaaagccccccaaaaattatctagccgtttcgaatatcaacattaccctggtgtattcactgctgtatgcattattgttctttgttgctgttttatgccttcatattagcaaatatgaaattctgtgaaaaaaaaccctttgatcttaaaaaaaaaaaaaccaccccccccttctgtagcaggaaacaaattgcttgttcttgagaactttcccatcaagaatttagtagaagcaggtatacttctatcattttgatgtttttgttaatgtttccaaacaatgtactttgaaatcagaatcacttcttatcgttttcatatacttctgatgctcttcatcacattagtgatcagaaatgaggtgtaattccccaacccctgcccgcaagagctaagtaggatcttactgtaagttgaagggagttttgccctaactcatggattgtgcaagaatgaactgctgttgggtttgattgactgtcgatggattgtggtgtggtgtatctgaaggctattgaatgcaacttacaatgcttaataaaaatctttattcttttagtataaagta

SEQ ID NO: 1628 - DNA, 4819 bp, Homo sapiens
  source 1..4819: mol_type = genomic DNA
ccgcgcccgcgcccccgccgccgccatgggcgtgcagggcttccaggactacatcgagaagcactgcccgagcgccgtggtgccggtggagctgcagaagctggcccggggcagcctggtgggcggcgggcggcagcggcccccgcagaccccgctgcgcctgctggtggacgccgacaactgcctgcaccgcctctacggcggcttctacaccgactgggtcagcggcggccagtggaaccacatgcttggctacctggcggcgctggccaaggcctgcttcggcggcaacatcgagctcttcgtcttcttcaacggcgcgctcgagaaggcccggctgcacgagtgggtcaagcggcagggcaacgagcgccagacggcacagcagatcgtcagccatgtccagaacaagggcaccccgccgccaaaggtctggttcctgccgcccgtctgcatggcccactgcatccgcctggcgctcatccgcttccacgtcaaggttgcacagagcattgaggatcaccatcaggaagtgattggtttctgcagagagaatggtttccatggcttggttgcgtatgactctgattatgcactgtgcaacatcccctactatttcagtgcccatgccctaaaactgagccggaacgggaaaagtctcaccacaagccaatatctgatgcatgaagttgccaagcaactggacctgaatccaaatcgttttcctatttttgctgctctcttaggaaatcacattctgcctgatgaagatctggcttcctttcactggagtttacttggtccagaacatccactagcctcactaaaggtccgggcccaccagctggtcttgccaccttgcgacgtagtgatcaaagccgttgctgactatgtacgcaacattcaggacacctctgacttggatgccatagctaaagatgttttccagcattcacagtctagaacagatgacaaagttattcgatttaagagagcaattggatattattcagcgactagtaagcctatgtcatttcatccaccacattacttagcagccagacccggtccgtttggaatgcctgggatggtgccgccgcatgttcctcctcagatgctcaacattccgcagacctctctgcaagcaaagcccgtggccccacaggtgcccagcccagggggcgccccgggccagggtccatacccgtacagcctctctgagccagcacctctcactttggacacgagcgggaagaatctgacggagcagaacagctacagcaacattcctcacgaagggaagcacacgccgctgtatgagcggtcctcgcccatcaacccggcccagagcggcagccccaaccacgtggattccgcctacttccctggctcttctacatcgtcatcttccgacaacgacgagggcagcggaggggcgacaaaccatatcagcgggaacaagattggctgggagaagacgggaagccactcagagcctcaggcacgaggagacccaggagaccaaacaaaggcagaaggctcgtccactgcctcttcaggaagccaactagccgaaggcaagggaagccagatgggcactgtccagccaatcccgtgcctcctgtcgatgcccaccaggaaccacatggacatcaccacacctcccctgccccccgtcgcacctgaggtgctgagagtggccgagcacaggcacaagaaggggctgatgtacccctacatcttccatgtcctgacgaagggtgaaatcaaaattgctgtttctattgaagatgaagccaacaaggacctgcctccggccgctctgctctataggccagttcgtcagtatgtttacggagtcctgtttagtttggcagaaagcagaaagaaaactgagagacttgcttttagaaagaacagacttccaccagaattttcaccagtgatcattaaagaatgggcagcttacaaaggaaagtctcctcaaaccccggaactggttgaagctcttgccttcagggagtggacctgccccaacctgaagaggctgtggttgggtaaggcggtagaggacaagaaccgcaggatgagggccttcctggcctgcatgaggtcggacaccccagccatgctcaaccctgccaacgtgcccactcacctcatggtgctctgctgcgtcttacggtacatggtgcagtggccgggagcacgcatccttcggcgtcaggagctagatgccttcctggctcaggcgctgtcccccaaactctacgagcctgatcagctccaggagctcaagattgagaacctagatccccgaggaattcagctatcagctctcttcatgagtggagtagacatggccttgtttgcaaatgatgcatgcggacagccaatcccctgggaacactgttgtccttggatgtattttgatgggaagctcttccaatccaaactcctcaaagccagccgggaaaagaccccactcattgacctctgtgatggtcaggctgatcaggctgccaaggtagagaagatgcgccagagcgtcctcgaggggctcagcttctccaggcagagccacacgctccctttcccgccgccacctgccctgcccttctaccctgcctctgcgtacccccggcactttgggcctgtcccaccctctcagggcaggggcagaggctttgcaggagtccaacctataccttctcagggaggcaaactagaaatagctggcactgtggttggccattgggctgggagcaggcggggccgtgggggccgggggcctttccccctgcaggtggtttctgtcggaggaccagctagagggcgtccaagaggagttatttccaccccagtgattagaacatttggaagaggtggaaggtactatggcagaggttacaaaaaccaggcagcaattcagggcagacctccttatgctgcttcagcagaagaagtggccaaagaacttaagtcaaaatctggggaatcgaagtcctctgctatgtcttcagacgggtccctggctgaaaacggagtgatggccgaggagaagccggctccccagatgaacgggagcacgggtgacgccagggcccccagccactctgaaagtgccttgaataatgactctaaaacgtgcaatacaaatcctcatttaaatgcactaagtacagacagcgcttgccgcagagaagctgctctggaggcagctgtcttaaataaagaagagtaaacttattttttatagagggtgaaggatgctggaagggtaaggatttaggaatatctggagagaaagagagcctgcagttatgtacattttgtcctttccgtaagagaaaaatgaggactttggaaattcagatccctctttgatatcagagatttaaacaacacatttttagttttaaccagttgtagtcaaaatgctacaataaaacaaaaaagagaaagaaaatgaagagcatttgactcccgcacttaaaatgaagtacacataaagtttaaactggttatgacaaaagcctttagttgtgtttcttgaactataaagaaaacaaattttggcagtctttaagtatatatagcttaaaatataatttttagcatttggcaccatatgtatgccattatatttgattttgcattactgtttcacaatgaagctttctttaaggctttgatttttatgattatgaaagaaataaggcacaaccacagtttttctttcttaaatttcatcactgttgatgtggttcttttgtgttaaaaaaaaaaagtgcaactatcaaaactaaaaaattatagagtaatattgccgttctgctgattttaaatatacaatacatcatacatactttacaagcaagttaaatggagataaagttgaaatcatagaagatgcaaatgacctttcaaaatcaacacaatgtgttctgaaactttcgtgactaataccatgcatctgtgatcaatgaactatgtggttttgaatcggatgtagaccattagtactactacttgagctaaacttctgcatggttcataatttttaaagtgtgtagttaatatgcatgttatcgtcctttcttccattcttaacagtatgtgcccatttgcaaaacaaaaatgctaataatcagtaatagtcctataaaagatgttaactctgtttagtcattgactgatcttgctctaaccttaaaattttgtgattattgacctctgttgcatttattctaaagccccccaaaaattatctagccgtttcgaatatcaacattaccctggtgtattcactgctgtatgcattattgttctttgttgctgttttatgccttcatattagcaaatatgaaattctgtgaaaaaaaaccctttgatcttaaaaaaaaaaaaaccaccccccccttctgtagcaggaaacaaattgcttgttcttgagaactttcccatcaagaatttagtagaagcaggtatacttctatcattttgatgtttttgttaatgtttccaaacaatgtactttgaaatcagaatcacttcttatcgttttcatatacttctgatgctcttcatcacattagtgatcagaaatgaggtgtaattccccaacccctgcccgcaagagctaagtaggatcttactgtaagttgaagggagttttgccctaactcatggattgtgcaagaatgaactgctgttgggtttgattgactgtcgatggattgtggtgtggtgtatctgaaggctattgaatgcaacttacaatgcttaataaaaatctttattcttttagtataaagta

SEQ ID NO: 1629 - DNA, 3585 bp, Homo sapiens
  source 1..3585: mol_type = genomic DNA
ccgcgcccgcgcccccgccgccgccatgggcgtgcagggcttccaggactacatcgagaagcactgcccgagcgccgtggtgccggtggagctgcagaagctggcccggggcagcctggtgggcggcgggcggcagcggcccccgcagaccccgctgcgcctgctggtggacgccgacaactgcctgcaccgcctctacggcggcttctacaccgactgggtcagcggcggccagtggaaccacatgcttggctacctggcggcgctggccaaggcctgcttcggcggcaacatcgagctcttcgtcttcttcaacggcgcgctcgagaaggcccggctgcacgagtgggtcaagcggcagggcaacgagcgccagacggcacagcagatcgtcagccatgtccagaacaagggcaccccgccgccaaaggtctggttcctgccgcccgtctgcatggcccactgcatccgcctggcgctcatccgcttccacgtcaaggttgcacagagcattgaggatcaccatcaggaagtgattggtttctgcagagagaatggtttccatggcttggttgcgtatgactctgattatgcactgtgcaacatcccctactatttcagtgcccatgccctaaaactgagccggaacgggaaaagtctcaccacaagccaatatctgatgcatgaagttgccaagcaactggacctgaatccaaatcgttttcctatttttgctgctctcttaggaaatcacattctgcctgatgaagatctggcttcctttcactggagtttacttggtccagaacatccactagcctcactaaaggtccgggcccaccagctggtcttgccaccttgcgacgtagtgatcaaagccgttgctgactatgtacgcaacattcaggacacctctgacttggatgccatagctaaagatgttttccagcattcacagtctagaacagatgacaaagttattcgatttaagagagcaattggatattattcagcgactagtaagcctatgtcatttcatccaccacattacttagcagccagacccggtccgtttggaatgcctgggatggtgccgccgcatgttcctcctcagatgctcaacattccgcagacctctctgcaagcaaagcccgtggccccacaggtgcccagcccagggggcgccccgggccagggtccatacccgtacagcctctctgagccagcacctctcactttggacacgagcgggaagaatctgacggagcagaacagctacagcaacattcctcacgaagggaagcacacgccgctgtatgagcggtcctcgcccatcaacccggcccagagcggcagccccaaccacgtggattccgcctacttccctggctcttctacatcgtcatcttccgacaacgacgagggcagcggaggggcgacaaaccatatcagcgggaacaagattggctgggagaagacgggaagccactcagagcctcaggcacgaggagacccaggagaccaaacaaaggcagaaggctcgtccactgcctcttcaggaagccaactagccgaaggcaagggaagccagatgggcactgtccagccaatcccgtgcctcctgtcgatgcccaccaggaaccacatggacatcaccacacctcccctgccccccgtcgcacctgaggtgctgagagtggccgagcacaggcacaagaaggggctgatgtacccctacatcttccatgtcctgacgaaggtattatcaaaggggccctggagtggcttctgttatttgatgagtggccattcctatgggtgttttgtccttttgtccttttttgaaccatttttctgtcttactaatctacttgaaacaaagttcactttcccctttctaaacattgaatgaaagatgaacatttataactgtaaatagttttaaaataactcgtgaaaagtctcacttttttccttcaacttagtatagaatattttatacttctaatgaaataatgcatcacattattttatgacttgtaattttattctttttacttcaatttcagaattttcttaaaccatatttgtgctgtaatgtcaggtttaattctgatgtcagatacaatatctggttcctttatcatttgtgcttagaaaataatgtttccccctttgaatggctcatagtgcttcatgtgttttgacttgttcatgacctcattgagtgcagttttaatagtgctaagaacaaaaaatataatacaggattttgttaacatacgcatagtcagaaaatgaaactatcattttatacagtgtcataatttcactttattagtgtcttaatgtatgcttaaatatatacatatagtgtggcatcaattattttttaatcttggtgtctcaaatgtatctatgtgtatttaaatttcctcagtgatttgtagtctttatgttggcacttttaatcttagccccacaatttaacaagttacctcagttactagattaatcctgcagaactggtttattgctatcatgtattattaacatgaatacctatatgaccatatataaccagacttttctgtctattctctacaacccatctgtggtttgtaaaatggagtcaataaatgcaataatgaactcctgttctcaaatactcctgaggtggacttcaactgttaactgactaatccaaatattgcttacttttattaattaaaggacatggaaaacatgtagccagtactatttgctcagatcctttaatttattttttagttgtaatgcctccaaatctcatctattatttgatatgggtatgcatttatagtatcacttttcagattatggttgtaaggtgaacattttatttttcaggttcaacataaattataaagggtaagtgaaaagtaattgttgtggggaaaacattttgctaagtttaaggaaccaaagttttgggaagacatctttcaaaataaggtgtgaagaaacaacactcattcctcgtggggctgtttgaaatgtaaggtccccaggagctacctgttatgtccacactgctggatctgatgcgtggatagtcggttagatctatatgagggttgcaaattgtaccgacatgctttcttatttcttatgaatttcaagggcaaatactgataaaatgaccatggttgagaaaattgtcttttcacattttaaaatgctacttaagttttttcagtttatcctataagctgaatggctctggtattaattgcccaggctaagacatttacagtgagatgcatctttatggtaatgaagagaatttgcaaagcatcatattattgagataaatattccctagatgagagtgttagaacacatgtagctactggattaatgaatatgaaagtatggagggtaaggggaaagaccagtttttaaattaaacttatgtgaatgaaagaaacagcaaatattacaaaattattatttaaagcatatatatcaatgaacttcatagacattgaggtcataaatgcattgttgtgctctgagtataattaaataaaatttgttgcatga

SEQ ID NO: 1630 - DNA, 1710 bp, Homo sapiens
  source 1..1710: mol_type = genomic DNA
ggtgaaatcaaaattgctgtttctattgaagatgaagccaacaaggacctgcctccggccgctctgctctataggccagttcgtcagtatgtttacggagtcctgtttagtttggcagaaagcagaaagaaaactgagagacttgcttttagaaagaacagacttccaccagaattttcaccagtgatcattaaagaatgggcagcttacaaaggaaagtctcctcaaaccccggaactggttgaagctcttgccttcagggagtggacctgccccaacctgaagaggctgtggttgggtaaggcggtagaggacaagaaccgcaggatgagggccttcctggcctgcatgaggtcggacaccccagccatgctcaaccctgccaacgtgcccactcacctcatggtgctctgctgcgtcttacggtacatggtgcagtggccgggagcacgcatccttcggcgtcaggagctagatgccttcctggctcaggcgctgtcccccaaactctacgagcctgatcagctccaggagctcaagattgagaacctagatccccgaggaattcagctatcagctctcttcatgagtggagtagacatggccttgtttgcaaatgatgcatgcggacagccaatcccctgggaacactgttgtccttggatgtattttgatgggaagctcttccaatccaaactcctcaaagccagccgggaaaagaccccactcattgacctctgtgatggtcaggctgatcaggctgccaaggtagagaagatgcgccagagcgtcctcgaggggctcagcttctccaggcagagccacacgctccctttcccgccgccacctgccctgcccttctaccctgcctctgcgtacccccggcactttgggcctgtcccaccctctcagggcaggggcagaggctttgcaggagtccaacctataccttctcagggaggcaaactagaaatagctggcactgtggttggccattgggctgggagcaggcggggccgtgggggccgggggcctttccccctgcaggtggtttctgtcggaggaccagctagagggcgtccaagaggagttatttccaccccagtgattagaacatttggaagaggtggaaggtactatggcagaggttacaaaaaccaggcagcaattcagggcagacctccttatgctgcttcagcagaagaagtggccaaagaacttaagtcaaaatctggggaatcgaagtcctctgctatgtcttcagacgggtccctggctgaaaacggagtgatggccgaggagaagccggctccccagatgaacgggagcacgggtgacgccagggcccccagccactctgaaagtgccttgaataatgactctaaaacgtgcaatacaaatcctcatttaaatgcactaagtacagacagcgcttgccgcagagaagctgctctggaggcagctgtcttaaataaagaagagtaaacttattttttatagagggtgaaggatgctggaagggtaaggatttaggaatatctggagagaaagagagcctgcagttatgtacattttgtcctttccgtaagagaaaaatgaggactttggaaattcagatccctctttgatatcagagatttaaacaacacatttttagttttaaccagttgtagtcaaaatgctacaataaaacaaaaaagagaaagaaaa

SEQ ID NO: 1631 - DNA, 1697 bp, Homo sapiens
  source 1..1697: mol_type = genomic DNA
aggttgcacagagcattgaggatcaccatcaggaagtgattggtttctgcagagagaatggtttccatggcttggttgcgtatgactctgattatgcactgtgcaacatcccctactatttcagtgcccatgccctaaaactgagccggaacgggaaaagtctcaccacaagccaatatctgatgcatgaagttgccaagcaactggacctgaatccaaatcgttttcctatttttgctgctctcttaggaaatcacattctgcctgatgaagatctggcttcctttcactggagtttacttggtccagaacatccactagcctcactaaaggtccgggcccaccagctggtcttgccaccttgcgacgtagtgatcaaagccgttgctgactatgtacgcaacattcaggacacctctgacttggatgccatagctaaagatgttttccagcattcacagtctagaacagatgacaaagttattcgatttaagagagcaattggatattattcagcgactagtaagcctatgtcatttcatccaccacattacttagcagccagacccggtccgtttggaatgcctgggatggtgccgccgcatgttcctcctcagatgctcaacattccgcagacctctctgcaagcaaagcccgtggccccacaggtgcccagcccagggggcgccccgggccagggtccatacccgtacagcctctctgagccagcacctctcactttggacacgagcgggaagaatctgacggagcagaacagctacagcaacattcctcacgaagggaagcacacgccgctgtatgagcggtcctcgcccatcaacccggcccagagcggcagccccaaccacgtggattccgcctacttccctggctcttctacatcgtcatcttccgacaacgacgagggcagcggaggggcgacaaaccatatcagcgggaacaagattggctgggagaagacgggaagccactcagagcctcaggcacgaggagacccaggagaccaaacaaaggcagaaggctcgtccactgcctcttcaggaagccaactagccgaaggcaagggaagccagatgggcactgtccagccaatcccgtgcctcctgtcgatgcccaccaggaaccacatggacatcaccacacctcccctgccccccgtcgcacctgaggtgctgagagtggccgagcacaggcacaagaaggggctgatgtacccctacatcttccatgtcctgacgaagggtgaaatcaaaattgctgtttctattgaagatgaagccaacaaggacctgcctccggccgctctgctctataggccagttcgtcagtatgtttacggagtcctgtttagtttggcagaaagcagaaagaaaactgagagacttgcttttagaaagaacagacttccaccagaatgtatgtactgtaacaatccattgtttgttttcctcggtacctcgtaatctcttgtgcattttctaaagccttagaagaatcatgactgagttgaccccgagtgcctctgtgtaaaggaggtgggcccatcatcggggcagtaggccagggtaaaggctcttagaaaaggaggagaagccacagactttcttcctcagtaacattccaataatgatgtttattcagtaaaataataaaacaggtttacactttaaagtgaa

SEQ ID NO: 1632 - DNA, 1430 bp, Homo sapiens
  source 1..1430: mol_type = genomic DNA
tcagaggcccgacagcctctttctgaggaggacgtagccagcctttcctggagacccttgcaccttccttctgcagactggcagagagctgccctctctctctggacacacagaaccttccgagaggtgttgaaagaggaagatgttcacttaacttaccaagactggttacacctggagctggaaattcaacctgaagctgatgctctttcagatactgaacgctcaaggagttatgaccactcagaaaattctgatttggtctttggtggccgcacaggaaatgaggatattatttccagattgcaggagatggtagctgacctggagctgcagcaagacctcatagtgcctctcggccacaccccttcccaggagcacttcctctttgagattttccgcagacggctccaggctctgacaagcgggtggagcgtggctgccagccttcagagacagagggagctgctaatgtacaaacggatcctcctccgcctgccttcgtctgtcctctgcggcagcagcttccaggcagaacagcccatcactgccagatgcgagcagttcttccacttggtcaactctgagatgagaaacttctgctcccacggaggtgccctgacacaggacatcactgcccacttcttcaggggcctcctgaacgcctgtctgcggagcagagacccctccctgatggtcgacttcatactggccaagtgccagacgaaatgccccttaattttgacctctgctctggtgtggtggccgagcctggagcctgtgctgctctgccggtggaggagacactgccagagcccgctgccccgggaactgcagaagctacaagaaggccggcagtttgccagcgatttcctctcccctgaggctgcctccccagcacccaacccggactggctctcagctgctgcactgcactttgcgattcaacaagtcagggaagaaaacatcaggaagcagctaaagaagctggactgcgagagagaggagctattggttttccttttcttcttctccttgatgggcctgctgtcgtcacatctgacctcaaatagcaccacagacctgccaaaggctttccacgtttgtgcagcaatcctcgagtgtttagagaagaggaagatatcctggctggcactctttcagttgacagagagtggtaagaaacacgctgctgaggcacaaatgcggagggccgctcttttcagaggcatcttgcaaatggttaagaacgagccctccttgaggttccttgctaagtaagtttataagctccattttagttgggacagattaagcacaaacttgtttaaagcaataagataatttactggctcactggtcaaccccaggaccaatgggcctatcatggggactgcctctctctgcaccacacccaccctcctgcaaga

SEQ ID NO: 1633 - DNA, 5460 bp, Homo sapiens
  source 1..5460: mol_type = genomic DNA
cgggcgcagggagccgccgccggggctgtaggcgccaaggccatgtccgactcgtgggtcccgaactccgcctcgggccaggacccagggggccgccggagggcctgggccgagctgctggcgggaagggtcaagagggaaaaatataatcctgaaagggcacagaaattaaaggaatcagctgtgcgcctcctgcgaagccatcaggacctgaatgcccttttgcttgaggtagaaggtccactgtgtaaaaaattgtctctcagcaaagtgattgactgtgacagttctgaggcctatgctaatcattctagttcatttataggctctgctttgcaggatcaagcctcaaggctgggggttcccgtgggtattctctcagccgggatggttgcctctagcgtgggacagatctgcacggctccagcggagaccagtcaccctgtgctgctgactgtggagcagagaaagaagctgtcttccctgttagagtttgctcagtatttattggcacacagtatgttctcccgtctttccttctgtcaagaattatggaaaatacagagttctttgttgcttgaagcggtgtggcatcttcacgtacaaggcattgtgagcctgcaagagctgctggaaagccatcccgacatgcatgctgtgggatcgtggctcttcaggaatctgtgctgcctttgtgaacagatggaagcatcctgccagcatgctgacgtcgccagggccatgctttctgattttgttcaaatgtttgttttgaggggatttcagaaaaactcagatctgagaagaactgtggagcctgaaaaaatgccgcaggtcacggttgatgtactgcagagaatgctgatttttgcacttgacgctttggctgctggagtacaggaggagtcctccactcacaagatcgtgaggtgctggttcggagtgttcagtggacacacgcttggcagtgtaatttccacagatcctctgaagaggttcttcagtcataccctgactcagatactcactcacagccctgtgctgaaagcatctgatgctgttcagatgcagagagagtggagctttgcgcggacacaccctctgctcacctcactgtaccgcaggctctttgtgatgctgagtgcagaggagttggttggccatttgcaagaagttctggaaacgcaggaggttcactggcagagagtgctctcctttgtgtctgccctggttgtctgctttccagaagcgcagcagctgcttgaagactgggtggcgcgtttgatggcccaggcattcgagagctgccagctggacagcatggtcactgcgttcctggttgtgcgccaggcagcactggagggcccctctgcgttcctgtcatatgcagactggttcaaggcctcctttgggagcacacgaggctaccatggctgcagcaagaaggccctggtcttcctgtttacgttcttgtcagaactcgtgccttttgagtctccccggtacctgcaggtgcacattctccacccacccctggttcccggcaagtaccgctccctcctcacagactacatctcattggccaagacacggctggccgacctcaaggtttctatagaaaacatgggactctacgaggatttgtcatcagctggggacattactgagccccacagccaagctcttcaggatgttgaaaaggccatcatggtgtttgagcatacggggaacatcccagtcaccgtcatggaggccagcatattcaggaggccttactacgtgtcccacttcctccccgccctgctcacacctcgagtgctccccaaagtccctgactcccgtgtggcgtttatagagtctctgaagagagcagataaaatccccccatctctgtactccacctactgccaggcctgctctgctgctgaagagaagccagaagatgcagccctgggagtgagggcagaacccaactctgctgaggagcccctgggacagctcacagctgcactgggagagctgagagcctccatgacagaccccagccagcgtgatgttatatcggcacaggtggcagtgatttctgaaagactgagggctgtcctgggccacaatgaggatgacagcagcgttgagatatcaaagattcagctcagcatcaacacgccgagactggagccacgggaacacatggctgtggacctcctgctgacgtctttctgtcagaacctgatggctgcctccagtgtcgctcccccggagaggcagggtccctgggctgccctcttcgtgaggaccatgtgtggacgtgtgctccctgcagtgctcacccggctctgccagctgctccgtcaccagggcccgagcctgagtgccccacatgtgctggggttggctgccctggccgtgcacctgggtgagtccaggtctgcgctcccagaggtggatgtgggtcctcctgcacctggtgctggccttcctgtccctgcgctctttgacagcctcctgacctgtaggacgagggattccttgttcttctgcctgaaattttgtacagcagcaatttcttactctctctgcaagttttcttcccagtcacgagatactttgtgcagctgcttatctccaggccttattaaaaagtttcagttcctcatgttcagattgttctcagaggcccgacagcctctttctgaggaggacgtagccagcctttcctggagacccttgcaccttccttctgcagactggcagagagctgccctctctctctggacacacagaaccttccgagaggtgttgaaagaggaagatgttcacttaacttaccaagactggttacacctggagctggaaattcaacctgaagctgatgctctttcagatactgaacggcaggacttccaccagtgggcgatccatgagcactttctccctgagtcctcggcttcagggggctgtgacggagacctgcaggctgcgtgtaccattcttgtcaacgcactgatggatttccaccaaagctcaaggagttatgaccactcagaaaattctgatttggtctttggtggccgcacaggaaatgaggatattatttccagattgcaggagatggtagctgacctggagctgcagcaagacctcatagtgcctctcggccacaccccttcccaggagcacttcctctttgagattttccgcagacggctccaggctctgacaagcgggtggagcgtggctgccagccttcagagacagagggagctgctaatgtacaaacggatcctcctccgcctgccttcgtctgtcctctgcggcagcagcttccaggcagaacagcccatcactgccagatgcgagcagttcttccacttggtcaactctgagatgagaaacttctgctcccacggaggtgccctgacacaggacatcactgcccacttcttcaggggcctcctgaacgcctgtctgcggagcagagacccctccctgatggtcgacttcatactggccaagtgccagacgaaatgccccttaattttgacctctgctctggtgtggtggccgagcctggagcctgtgctgctctgccggtggaggagacactgccagagcccgctgccccgggaactgcagaagctacaagaaggccggcagtttgccagcgatttcctctcccctgaggctgcctccccagcacccaacccggactggctctcagctgctgcactgcactttgcgattcaacaagtcagggaagaaaacatcaggaagcagctaaagaagctggactgcgagagagaggagctattggttttccttttcttcttctccttgatgggcctgctgtcgtcacatctgacctcaaatagcaccacagacctgccaaaggctttccacgtttgtgcagcaatcctcgagtgtttagagaagaggaagatatcctggctggcactctttcagttgacagagagtgacctcaggctggggcggctcctcctccgtgtggccccggatcagcacaccaggctgctgcctttcgctttttacagtcttctctcctacttccatgaagacgcggccatcagggaagaggccttcctgcatgttgctgtggacatgtacttgaagctggtccagctcttcgtggctggggatacaagcacagtttcacctccagctggcaggagcctggagctcaagggtcagggcaaccccgtggaactgataacaaaagctcgtctttttctgctgcagttaatacctcggtgcccgaaaaagagcttctcacacgtggcagagctgctggctgatcgtggggactgcgacccagaggtgagcgccgccctccagagcagacagcaggctgcccctgacgctgacctgtcccaggagcctcatctcttctgacgggacctgccactgcacaccagcccagctcccgtgtaaataatttattacaagcataacatggagctcttgttgcactaaaaagtggattacaaatctcctcgactgctttagtggggaaaggaatcaattatttatgaactgtccggccccgagtcactcagcgtttgcgggaaaataaaccactggtcccagagcagaggaaggctacttgagccggacaccaagcccgcctccagcaccaagggcgggcagcaccctccgaccctcccatgcgggtgcacacgaagggtgaggctgacacagccactgcggagtccaggctgctagaggtgctcatcctcactgccgtcctcaggtgggttcgggcttcaccgcctggccctctgtggtcacagaggggctcggtggcccaggtggtggttccgcctccaggggcagggccttgtcctgggtctgtgtcagcgggtgcaccatggacatgtgtacattgaggttgtgggccttctcaaaccgccggccacactggtcacaggcaaagtccagctcagtctcagccttgtgtttggtcatgtggtacttgagggatgcccgctgcctgcactggaacccacagacctcacacctgggggacagaggcagataagaaggtgcgagggccacagccctgggagggggtcctgactcacacttactgcaaaggcttggctcccgaatgtcgcatttggtggacgagaaggtgcttccgctgcttgaaggtttgtccacattcgtcacagatatagttccgcacctctgagaggggagagtccagtgagtccaggcccctgatgctccaacctcccggggggacgacgatgacaatgtgaaaccatcacagctgggaagacatttctgcacatggttcaccatgcagtgggcccaagcaaggggcctatgagggcctcgtttattaagatctttaaactgctttatacactgtcacgtggcttcatcagctgtgtgcatttcaggatggtttttaaagaaacctcagaaagctatttcctt

SEQ ID NO: 1634 - DNA, 1656 bp, Homo sapiens
  source 1..1656: mol_type = genomic DNA
cgggcgcagggagccgccgccggggctgtaggcgccaaggccatgtccgactcgtgggtcccgaactccgcctcgggccaggacccagggggccgccggagggcctgggccgagctgctggcgggaagggtcaagagggaaaaatataatcctgaaagggcacagaaattaaaggaatcagctgtgcgcctcctgcgaagccatcaggacctgaatgcccttttgcttgaggtagaaggtccactgtgtaaaaaattgtctctcagcaaagtgattgactgtgacagttctgaggcctatgctaatcattctagttcatttataggctctgctttgcaggatcaagcctcaaggctgggggttcccgtgggtattctctcagccgggatggttgcctctagcgtgggacagatctgcacggctccagcggagaccagtcaccctgtgctgctgactgtggagcagagaaagaagctgtcttccctgttagagtttgctcagtatttattggcacacagtatgttctcccgtctttccttctgtcaagaattatggaaaatacagagttctttgttgcttgaagcggtgtggcatcttcacgtacaaggcattgtgagcctgcaagagctgctggaaagccatcccgacatgcatgctgtgggatcgtggctcttcaggaatctgtgctgcctttgtgaacagatggaagcatcctgccagcatgctgacgtcgccagggccatgctttctgattttgttcaaatgtttgttttgaggggatttcagaaaaactcagatctgagaagaactgtggagcctgaaaaaatgccgcaggtcacggttgatgtactgcagagaatgctgatttttgcacttgacgctttggctgctggagtacaggaggagtcctccactcacaagatcgtgaggtgctgagcttcagcagcccgctcctgagcacacttcctctgccagttacgataacgtgcgtgaggaggaggcgaccatgggaaagcccggggaacgctctggtcagccttttcctgtgaggatgaggtcggaaggtgcgcccactgcagtatcctgttccgcctctggaagtcctgcaccaatgtttgtcccactcactgtgacctcctcctgtgtggagtctccccttgctcctccttccctgggtgtgattcaggctctagagctggccctgcctctcagccccccacatttctagaacacactgtagctgtgcctctacagactcccgctgcctggcctccacagatcctgctcagattcaccagtaggcaaagcttggccctattagctttttctctccatggctctgtggagatgtgcggagacccttacaggtcgggaggcggaagctgaggagtgggggctgggtggaaggtggacatcggggtttggtggaaatggggctctggggtttgcttccctctagtgtgggcaggggaccttgaagtgaagtcttgagaaaccagtagaatttgccactgtttccaggccttgtcaaccttttcattctttattttgctcctcatttcccatccctcacagtaactgtttaactgctcaattaaatgtgttgtaccgttcggtacttttactgaaacagtgaataaagcactgtgtgatttc

SEQ ID NO: 1635 - DNA, 1088 bp, Homo sapiens
  source 1..1088: mol_type = genomic DNA
ggcgcagggagccgccgccggggctgtaggcgccaaggccatgtccgactcgtgggtcccgaactccgcctcgggccaggacccagggggccgccggagggcctgggccgagctgctggcgggaagggtcaagagggaaaaatataatcctgaaagggcacagaaattaaaggaatcagctgtgcgcctcctgcgaagccatcaggacctgaatgcccttttgcttgaggtagaaggtccactgtgtaaaaaattgtctctcagcaaagtgattgactgtgacagttctgaggcctatgctaatcattctagttcatttataggctctgctttgcaggatcaagcctcaaggctgggggttcccgtgggtattctctcagccgggatggttgcctctagcgtgggacagatctgcacggctccagcggagaccagtcaccctgtgctgctgactgtggagcagagaaagaagctgtcttccctgttagagtttgctcagtatttattggcacacagtatgttctcccgtctttccttctgtcaagaattatggaaaatacagagttctttgttgcttgaagcggtgtggcatcttcacgtacaaggcattgtgagcctgcaagagctgctggaaagccatcccgacatgcatgctgtgggatcgtggctcttcaggaatctgtgctgcctttgtgaacagatggaagcatcctgccagcatgctgacgtcgccagggccatgctttctgattttgttcaaatgtttgttttgaggggatttcagaaaaactcagatctgagaagaactgtggagcctgaaaaaatgccgcaggtcacggttgatgtactgcagagaatgctgatttttgcacttgacgctttggctgctggagtacaggaggagtcctccactcacaagatcgtgagagcttcagcagcccgctcctgagcacacttcctctgccagttacgataacgtgcgtgaggaggaggcgaccatgggaaagcccggggaacgctctggtcagccttttcctgtgaggatgaggtcggaaggtgcgcccactgcagtatcctgttccgcctct

SEQ ID NO: 1636 - DNA, 1000 bp, Homo sapiens
  source 1..1000: mol_type = genomic DNA
cgggcgcagggagccgccgccggggctgtaggcgccaaggccatgtccgactcgtgggtcccgaactccgcctcgggccaggacccagggggccgccggagggcctgggccgagctgctggcgggaagggtcaagagggaaaaatataatcctgaaagggcacagaaattaaaggaatcagctgtgcgcctcctgcgaagccatcaggacctgaatgcccttttgcttgaggtagaaggtccactgtgtaaaaaattgtctctcagcaaagtgattgactgtgacagttctgaggcctatgctaatcattctagttcatttataggctctgctttgcaggatcaagcctcaaggctgggggttcccgtgggtattctctcagccgggatggttgcctctagcgtgggacagatctgcacggctccagcggagaccagtcaccctgtgctgctgactgtggagcagagaagttctttgttgcttgaagcggtgtggcatcttcacgtacaaggcattgtgagcctgcaagagctgctggaaagccatcccgacatgcatgctgtgggatcgtggctcttcaggaatctgtgctgcctttgtgaacagatggaagcatcctgccagcatgctgacgtcgccagggccatgctttctgattttgttcaaatgtttgttttgaggggatttcagaaaaactcagatctgagaagaactgtggagcctgaaaaaatgccgcaggtcacggttgatgtactgcagagaatgctgatttttgcacttgacgctttggctgctggagtacaggaggagtcctccactcacaagatcgtgaggtgctgagcttcagcagcccgctcctgagcacacttcctctgccagttacgataacgtgcgtgaggaggaggcgaccatgggaaagcccggggaacgctctggtcagccttttcctgtgaggatgaggtcggaaggtgcgcccactgcagtatcctgttccgcctct

SEQ ID NO: 1637 - DNA, 2631 bp, Homo sapiens
  source 1..2631: mol_type = genomic DNA
aggaggacctgggggtgtggcagcgaggaagggccgagccacggactgtggggccgaaactcgctcccgcccaccctttctcgaggctgtggcctccgcgagagccgagcgggccgcaccgccggccgtgcgactgccccagtcagacacgaccccggcttctagcccgcctaagcctgtttggggttgctgactcgtttcctccccgagtttcccgcgggaactaactcttcaagaggaccaaccgcagcccagagcttcgcagacccggccaaccagaggcgaggttgagagcccggcgggccgcggggagagagcgtcccatctgtcctggaaagcctgggcgggtggattgggaccccgagagaagcaggggagctcggcggggtgcagaagtgcccaggcccctccccgctggggttgggagcttgggcaggccagcttcacccttcctaagtccgcttctggtctccgggcccagcctcggccaccatgtcccgccagaccacctctgtgggctccagctgcctggacctgtggagggaaaagaatgaccggctcgttcgacaggccaaggtggctcagaactccggtctgactctgaggcgacagcagttggctcaggatgcactggaagggctcagagggctcctccatagtctgcaagggctccctgcagctgttcctgttcttcccttggagctgactgtcacctgcaacttcattatcctgagggcaagcttggcccagggtttcacagaggatcaggcccaggatatccagcggagcctagagagagtgctggagacacaggagcagcaggggcccaggttggaacaggggctcagggagctgtgggactctgtccttcgtgcttcctgccttctgccggagctgctgtctgccctgcaccgcctggttggcctgcaggctgccctctggttgagtgctgaccgtcttggggacctggccttgttactagagaccctgaatggcagccagagtggagcctctaaggatctgctgttacttctgaaaacttggagtcccccagctgaggaattagatgctccattgaccctgcaggatgcccagggattgaaggatgtcctcctgacagcatttgcctaccgccaaggtctccaggagctgatcacagggaacccagacaaggcactaagcagccttcatgaagcggcctcaggcctgtgtccacggcctgtgttggtccaggtgtacacagcactggggtcctgtcaccgtaagatgggaaatccacagagagcactgttgtacttggttgcagccctgaaagagggatcagcctggggtcctccacttctggaggcctctaggctctatcagcaactgggggacacaacagcagagctggagagtctggagctgctagttgaggccttgaatgtcccatgcagttccaaagccccgcagtttctcattgaggtagaattactactgccaccacctgacctagcctcaccccttcattgtggcactcagagccagaccaagcacatactagcaagcaggtgcctacagacggggagggcaggagacgctgcagagcattacttggacctgctggccctgttgctggatagctcggagccaaggttctccccacccccctcccctccagggccctgtatgcctgaggtgtttttggaggcagcggtagcactgatccaggcaggcagagcccaagatgccttgactctatgtgaggagttgctcagccgcacatcatctctgctacccaagatgtcccggctgtgggaagatgccagaaaaggaaccaaggaactgccatactgcccactctgggtctctgccacccacctgcttcagggccaggcctgggttcaactgggtgcccaaaaagtggcaattagtgaatttagcaggtgcctcgagctgctcttccgggccacacctgaggaaaaagaacaaggggcagctttcaactgtgagcagggatgtaagtcagatgcggcactgcagcagcttcgggcagccgccctaattagtcgtggactggaatgggtagccagcggccaggataccaaagccttacaggacttcctcctcagtgtgcagatgtgcccaggtaatcgagacacttactttcacctgcttcagactctgaagaggctagatcggagggatgaggccactgcactctggtggaggctggaggcccaaactaaggggtcacatgaagatgctctgtggtctctccccctgtacctagaaagctatttgagctggatccgtccctctgatcgtgacgccttccttgaagaatttcggacatctctgccaaagtcttgtgacctgtagctgccacgttttgaagagcttgagctgggtccccagtgggctgtctctctgtggggagggctttctgcttcaccatcattaggaatgtgaccattcctatataattcctggactggtgagattggtggtaggcctgtgaaatttgccctagttactaccattctcgttttggaggaaacaatctctgccaccaccaagtcattgactttgctcgaggcaccttttttcctgtttctccttttctgttgtcgagtaaaatttcatatttat

SEQ ID NO: 1638 - DNA, 868 bp, Homo sapiens
  source 1..868: mol_type = genomic DNA
cctttctcgaggctgtggcctccgcgagagccgagcgggccgcaccgccggccgtgcgactgccccagtcagacacgaccccggcttctagcccgcctaagcctgtttggggttgctgactcgtttcctccccgagtttcccgcgggaactaactcttcaagaggaccaaccgcagcccagagcttcgcagacccggccaaccagaggcgagcctcggccaccatgtcccgccagaccacctctgtgggctccagctgcctggacctgtggagggaaaagaatgaccggctcgttcgacaggccaaggtggctcagaactccggtctgactctgaggcgacagcagttggctcaggatgcactggaagggctcagagggctcctccatagtctgcaagggctccctgcagctgttcctgttcttcccttggagctgactgtcacctgcaacttcattatcctgagggcaagcttggcccagggtttcacagaggatcaggcccaggatatccagcggagcctagagagagtgctggagacacaggagcagcaggggcccaggttggaacaggggctcagggagctgtgggactctgtccttcgtgcttcctgccttctgccggagctgctgtctgccctgcaccgcctggttggcctgcaggctgccctctggttgagtgctgaccgtcttggggacctggccttgttactagagaccctgaatggcagccagagtggagcctctaaggatctgctgttacttctgaaaacttggagtcccccagctgaggaattagatgctccattgaccctgcaggatgcccagggattgaaggatgtcctcctgacagcatttgcctaccgccaa

SEQ ID NO: 1639 - DNA, 1971 bp, Homo sapiens
  source 1..1971: mol_type = genomic DNA
gcaccgccggccgtgcgactgccccagtcagacacgaccccggcttctagcccgcctaagcctgtttggggttgctgactcgtttcctccccgagtttcccgcgggaactaactcttcaagaggaccaaccgcagcccagagcttcgcagacccggccaaccagaggcgagcctcggccaccatgtcccgccagaccacctctgtgggctccagctgcctggacctgtggagggaaaagaatgaccggctcgttcgacaggccaaggtggctcagaactccggtctgactctgaggcgacagcagttggctcaggatgcactggaagggctcagagggctcctccatagtctgcaagggctccctgcagctgttcctgttcttcccttggagctgactgtcacctgcaacttcattatcctgagggcaagcttggcccagggtttcacagaggatcaggcccaggatatccagcggagcctagagagagtgctggagacacaggagcagcaggggcccaggttggaacaggggctcagggagctgtgggactctgtccttcgtgcttcctgccttctgccggagctgctgtctgccctgcaccgcctggttggcctgcaggctgccctctggttgagtgctgaccgtcttggggacctggccttgttactagagaccctgaatggcagccagagtggagcctctaaggatctgctgttacttctgaaaacttggagtcccccagctgaggaattagatgctccattgaccctgcaggatgcccagggattgaaggatgtcctcctgacagcatttgcctaccgccaaggtctccaggagctgatcacagggaacccagacaaggcactaagcagccttcatgaagcggcctcaggcctgtgtccacggcctgtgttggtccaggtgtacacagcactggggtcctgtcaccgtaagatgggaaatccacagagagcactgttgtacttggttgcagccctgaaagagggatcagcctggggtcctccacttctggaggcctctaggctctatcagcaactgggggacacaacagcagagctggagagtctggagctgctagttgaggccttgaatgtcccatgcagttccaaagccccgcagtttctcattgaggtagaattactactgccaccacctgacctagcctcaccccttcattgtggcactcagagccagaccaagcacatactagcaagcaggtgcctacagacggggagggcaggagacgctgcagagcattacttggacctgctggccctgttgctggatagctcggagccaaggttctccccacccccctcccctccagggccctgtatgcctgaggtgtttttggaggcagcggtagcactgatccaggcaggcagagcccaagatgccttgactctatgtgaggagttgctcagccgcacatcatctctgctacccaagatgtcccggctgtgggaagatgccagaaaaagaacaaggggcagctttcaactgtgagcagggatgtaagtcagatgcggcactgcagcagcttcgggcagccgccctaattagtcgtggactggaatgggtagccagcggccaggataccaaagccttacaggacttcctcctcagtgtgcagatgtgcccaggtaatcgagacacttactttcacctgcttcagactctgaagaggctagatcggagggatgaggccactgcactctggtggaggctggaggcccaaactaaggggtcacatgaagatgctctgtggtctctccccctgtacctagaaagctatttgagctggatccgtccctctgatcgtgacgccttccttgaagaatttcggacatctctgccaaagtcttgtgacctgtagctgccacgttttgaagagcttgagctgggtccccagtgggctgtctctctgtggggagggctttctgcttca

SEQ ID NO: 1640 - DNA, 983 bp, Homo sapiens
  source 1..983: mol_type = genomic DNA
atgctgggcatctggaccctcctacctctggttcttacgtctgttgctagattatcgtccaaaagtgttaatgcccaagtgactgacatcaactccaagggattggaattgaggaagactgttactacagttgagactcagaacttggaaggcctgcatcatgatggccaattctgccataagccctgtcctccaggtgaaaggaaagctagggactgcacagtcaatggggatgaaccagactgcgtgccctgccaagaagggaaggagtacacagacaaagcccatttttcttccaaatgcagaagatgtagattgtgtgatgaaggacatggcttagaagtggaaataaactgcacccggacccagaataccaagtgcagatgtaaaccaaactttttttgtaactctactgtatgtgaacactgtgacccttgcaccaaatgtgaacatggaatcatcaaggaatgcacactcaccagcaacaccaagtgcaaagaggaaggatccagatctaacttggggtggctttgtcttcttcttttgccaattccactaattgtttgggtgaagagaaaggaagtacagaaaacatgcagaaagcacagaaaggaaaaccaaggttctcatgaatctccaactttaaatcctatgttgacttgagtaaatatatcaccactattgctggagtcatgacactaagtcaagttaaaggctttgttcgaaagaatggtgtcaatgaagccaaaatagatgagatcaagaatgacaatgtccaagacacagcagaacagaaagttcaactgcttcgtaattggcatcaacttcatggaaagaaagaagcgtatgacacattgattaaagatctcaaaaaagccaatctttgtactcttgcagagaaaattcagactatcatcctcaaggacattactagtgactcagaaaattcaaacttcagaaatgaaatccaaagcttggtctag

SEQ ID NO: 1641 - DNA, 2563 bp, Homo sapiens
  source 1..2563: mol_type = genomic DNA
gcaagagtgacacacaggtgttcaaagacgcttctggggagtgagggaagcggtttacgagtgacttggctggagcctcaggggcgggcactggcacggaacacaccctgaggccagccctggctgcccaggcggagctgcctcttctcccgcgggttggtggacccgctcagtacggagttggggaagctctttcacttcggaggattgctcaacaaccatgctgggcatctggaccctcctacctctggttcttacgtctgttgctagattatcgtccaaaagtgttaatgcccaagtgactgacatcaactccaagggattggaattgaggaagactgttactacagttgagactcagaacttggaaggcctgcatcatgatggccaattctgccataagccctgtcctccaggtgaaaggaaagctagggactgcacagtcaatggggatgaaccagactgcgtgccctgccaagaagggaaggagtacacagacaaagcccatttttcttccaaatgcagaagatgtagattgtgtgatgaaggacatggcttagaagtggaaataaactgcacccggacccagaataccaagtgcagatgtaaaccaaactttttttgtaactctactgtatgtgaacactgtgacccttgcaccaaatgtgaacatggaatcatcaaggaatgcacactcaccagcaacaccaagtgcaaagaggaaggatccagatctaacttggggtggctttgtcttcttcttttgccaattccactaattgtttgggtgaagagaaaggaagtacagaaaacatgcagaaagcacagaaaggaaaaccaaggttctcatgaatctccaactttaaatcctgaaacagtggcaataaatttatctgatgttgacttgagtaaatatatcaccactattgctggagtcatgacactaagtcaagttaaaggctttgttcgaaagaatggtgtcaatgaagccaaaatagatgagatcaagaatgacaatgtccaagacacagcagaacagaaagttcaactgcttcgtaattggcatcaacttcatggaaagaaagaagcgtatgacacattgattaaagatctcaaaaaagccaatctttgtactcttgcagagaaaattcagactatcatcctcaaggacattactagtgactcagaaaattcaaacttcagaaatgaaatccaaagcttggtctagagtgaaaaacaacaaattcagttctgagtatatgcaattagtgtttgaaaagattcttaatagctggctgtaaatactgcttggttttttactgggtacattttatcatttattagcgctgaagagccaacatatttgtagatttttaatatctcatgattctgcctccaaggatgtttaaaatctagttgggaaaacaaacttcatcaagagtaaatgcagtggcatgctaagtacccaaataggagtgtatgcagaggatgaaagattaagattatgctctggcatctaacatatgattctgtagtatgaatgtaatcagtgtatgttagtacaaatgtctatccacaggctaaccccactctatgaatcaatagaagaagctatgaccttttgctgaaatatcagttactgaacaggcaggccactttgcctctaaattacctctgataattctagagattttaccatatttctaaactttgtttataactctgagaagatcatatttatgtaaagtatatgtatttgagtgcagaatttaaataaggctctacctcaaagacctttgcacagtttattggtgtcatattatacaatatttcaattgtgaattcacatagaaaacattaaattataatgtttgactattatatatgtgtatgcattttactggctcaaaactacctacttctttctcaggcatcaaaagcattttgagcaggagagtattactagagctttgccacctctccatttttgccttggtgctcatcttaatggcctaatgcacccccaaacatggaaatatcaccaaaaaatacttaatagtccaccaaaaggcaagactgcccttagaaattctagcctggtttggagatactaactgctctcagagaaagtagctttgtgacatgtcatgaacccatgtttgcaatcaaagatgataaaatagattcttatttttcccccacccccgaaaatgttcaataatgtcccatgtaaaacctgctacaaatggcagcttatacatagcaatggtaaaatcatcatctggatttaggaattgctcttgtcatacccccaagtttctaagatttaagattctccttactactatcctacgtttaaatatctttgaaagtttgtattaaatgtgaattttaagaaataatatttatatttctgtaaatgtaaactgtgaagatagttataaactgaagcagatacctggaaccacctaaagaacttccatttatggaggatttttttgccccttgtgtttggaattataaaatataggtaaaagtacgtaattaaataatgtttttggta

SEQ ID NO: 1642 - DNA, 1044 bp, Homo sapiens
  source 1..1044: mol_type = genomic DNA
ggctgcccaggcggagctgcctcttctcccgcgggttggtggacccgctcagtacggagttggggaagctctttcacttcggaggattgctcaacaaccatgctgggcatctggaccctcctacctctggttcttacgtctgttgctagattatcgtccaaaagtgttaatgcccaagtgactgacatcaactccaagggattggaattgaggaagactgttactacagttgagactcagaacttggaaggcctgcatcatgatggccaattctgccataagccctgtcctccaggtgaaaggaaagctagggactgcacagtcaatggggatgaaccagactgcgtgccctgccaagaagggaaggagtacacagacaaagcccatttttcttccaaatgcagaagatgtagattgtgtgatgaaggacatggcttagaagtggaaataaactgcacccggacccagaataccaagtgcagatgtaaaccaaactttttttgtaactctactgtatgtgaacactgtgacccttgcaccaaatgtgaacatggaatcatcaaggaatgcacactcaccagcaacaccaagtgcaaagaggaagtgaagagaaaggaagtacagaaaacatgcagaaagcacagaaaggaaaaccaaggttctcatgaatctccaactttaaatcctgaaacagtggcaataaatttatctgatgttgacttgagtaaatatatcaccactattgctggagtcatgacactaagtcaagttaaaggctttgttcgaaagaatggtgtcaatgaagccaaaatagatgagatcaagaatgacaatgtccaagacacagcagaacagaaagttcaactgcttcgtaattggcatcaacttcatggaaagaaagaagcgtatgacacattgattaaagatctcaaaaaagccaatctttgtactcttgcagagaaaattcagactatcatcctcaaggacattactagtgactcagaaaattcaaacttcagaaatgaaatccaaagcttggtctag

SEQ ID NO: 1643 - DNA, 1006 bp, Homo sapiens
  source 1..1006: mol_type = genomic DNA
atgctgggcatctggaccctcctacctctggttcttacgtctgttgctagattatcgtccaaaagtgttaatgcccaagtgactgacatcaactccaagggattggaattgaggaagactgttactacagttgagactcagaacttggaaggcctgcatcatgatggccaattctgccataagccctgtcctccaggtgaaaggaaagctagggactgcacagtcaatggggatgaaccagactgcgtgccctgccaagaagggaaggagtacacagacaaagcccatttttcttccaaatgcagaagatgtagattgtgtgatgaaggacatggcttagaagtggaaataaactgcacccggacccagaataccaagtgcagatgtaaaccaaactttttttgtaactctactgtatgtgaacactgtgacccttgcaccaaatgtgaacatggaatcatcaaggaatgcacactcaccagcaacaccaagtgcaaagaggaaggatccagatctaacttggggtggctttgtcttcttcttttgccaattccactaattgtttgggtgaagagaaaggaagtacagaaaacatgcagaaagcacagaaaggaaaaccaaggttctcatgaatctccaactttaaatcctgaaacagtggcaataaatttatctgatgttgacttgagtaaatatcaccactattgctggagtcatgacactaagtcaagttaaaggctttgttcgaaagaatggtgtcaatgaagccaaaatagatgagatcaagaatgacaatgtccaagacacagcagaacagaaagttcaactgcttcgtaattggcatcaacttcatggaaagaaagaagcgtatgacacattgattaaagatctcaaaaaagccaatctttgtactcttgcagagaaaattcagactatcatcctcaaggacattactagtgactcagaaaattcaaacttcagaaatgaaatccaaagcttggtctag

SEQ ID NO: 1644 - DNA, 4641 bp, Homo sapiens
  source 1..4641: mol_type = genomic DNA
gcctagggaagggacactgattgttcaccatcatatcccagtatctagcacagtgcctaagggataggaggggctcagtaaatatctcttgcaaggatgttgttaaattgtaaactctgccaaggcctttatgttgaatgaatgaatgaacgaatgaatgaatgcctctaactcttcataaaataaacactttttggaaaaaattgctcatggcagacgtcagatgtaaccacactgataactggaaagaaaaatgaatttagatgggttttagagatagaacaatgtttctaatattcaagcagtccataaatcccttatacttaatgttaaaattcaggatatgatacctaaagaaaggttttactgtacttggatcaaggcacctaccaactttttctctactcataggcaaagtcactaccctgtttaaggaggtctttggacgtttccatctcaagaaacagctcttcaatctctcccttgtattccaccttccagaaccacccagaaattccagtaaagtcttattgacctgattgtctgtcctcttcgctgagttccttttgaatgcagcaaattgctgtgcccttttctgacttccatttcacttttatccagcttcataggagcttaggcccctgcttgttgaggagggcgttcagttagtgctgagactacctgaataggtctggttctagctactcacaactcagagaggtagtgaatgctaggaggtaggaagaaggacattcaaccagaatactaaaattgcatttagatagtccagaaattagacagttggcacagcattagaattccccatttatccttacaatagtttgctgagaatgatggttgggaattgaacaatgagaacacttggacacaggaagaggaacatcacacaccggggcctgttgtggggtggggagagcggggagggatagcattaggagatatacctaatgtaaatgacaagttaatgggtacagcacaccaacatggcacgtgtatacatatgtaacaaacctgcacgttgtgcacatgtaccctagaacttaaagtataataaaaaagtgtgtgtgtgtgtgtgtgtgtgtatatatataaagaattccccacttaatatttatacatccaaaaactgacaaaaataatgtctgaactcatgtctgacattcagattcctccgcccaaaggcaataaataaaataatactaagatgtaaaggcaaaccttgtcttctgtcatgatctacagatggcacaaataatagacattttcccgaataatggcgtctgattttcaagcaatgcttagccaattgtagatttgggcagaaaaagtttgtaccaagcatttgagctggaaaaggcagatatttttcttgacctcacttttcctaaagttcacaacttctgctacttaaatgagtatctcatctctaagtgtgtgaagtaacagatgatgtatctgtttttcatcctcaaagagttaacttgataaaataagtacagctaaggacaaacacaaacacaaaatgagaaaacttcatgcagtatgttttgtgttttgtaaagggtgccaatggcatggagccatctgattctgttgcagtctttggcaacacggcccatttaaattcaagttaggatctgagtgtttgggtaaacagaataagctaagaatgagtggcagacatatttcctcaaatcccatctgatacaggtttagatccagattttgtcatttgactaactccttccttttttagatgatttggatttgcctttttttcttataataaaagtcataatgccaaccactttaagagttcttttgctgctcttttttgttgctatctttttgtaactaataggacacgtgtaagactataatacaaacaggagtcctagcatgtaatggctttagcaatttgtgcaatatccctctttttgtccttcctgcatattttctccctagaaagcagccaagaattggtgttcagagggtgatgctctgatggtgagcagatctacagtttgcctaacagtttatttaagccaaatttatagtttctgaagcgctagaaggctgctgtccaaggggactacttttttttttttttttagatggagtcttgctctgtcgccaggctggagtgcagaggcgtgatctcagctcactgcaacttctgcctccccagttcatgctattctcctgcttcagtctcctaaggagctgggactacaggctcacaccaccacgcccagttaatttttgtatttttagtagagacagggtttcaccatgttggccaggatggtctcaatctcttgaccttgtgatccacccgcctcagcctcccaaagtgctgagattacaggcatgagccaccacgcccagccagggactacttattaactggccatttaaaatgaaatgaaacaaggtcctcaattgctaacgattaaggggagaggagtgtaaattcagctattgtcttgtcttcaggcagcaggaaattaagggattggtaactgttatttgtaatagtaattgatgtcacaaaaggagttttgagaacagggagtttaggaaaaaaattgatctccttttatttttagtctgttaatatttaatgtaatatttgatacagttcgatttagatttactgttctttgatctatttttattttttgccttttttgttgttctctttcttctctcctgccttcttttatattgtttaattttttttctaaatttcattgtaatttatctattagctttttaactatatcttttggcattatttttacaaagttgctctagggattacaatatacatccttaaatactcaccatctacttcatggaaattactgtaaccttacaaatgtataaatcgattttacccttgttcatcccattataatgtatattataagcctcatacaatggtatgatttttactttttctctgcgttgtttctagttaactatatgtgctatcaaagtgagaccccatttatcttttaatctgtttctgattgtttttccagtgtctacttaactgagactcttacaggtaattttgtaggatactaggtgttttagatggcaaatataaagattgtgtttgtgtatgtgtatgtgtttatatgtgagggccaatctattgaaaagaaacactgcagaatactaaagcaaaattgaaaccatttagagtttgtagttgttttattttaaaagctaaccttgtaagtacttagtctttcaaaaaataattttaacttctatgttttatttttctattttaatttttcctgggccttgcctcccaatcctctcaccttccctttcttctgtgtgacctatagattcagaaattcctttctgggataatttctggcactgctttggagatggagcccctgaaaattggctatggaccaaatggattcccactcttggggatctctaggtcatcatcaccatctgaacagctctgagagagacaagaagtggaatggagaaggtgattagatgctcagagtgtgtgcacaaggctggcacgcccagggtcttcctcatggcactaacagtctactgaaaggtggaacagagacaagcctatcaacacctacaagactggtggttcttacgtctgttgctagattatcgtccaaaagtgttaatgcccaagtgactgacatcaactccaagggattggaattgaggaagactgttactacagttgagactcagaacttggaaggcctgcatcatgatggccaattctgccataagccctgtcctccaggtgaaaggaaagctagggactgcacagtcaatggggatgaaccagactgcgtgccctgccaagaagggaaggagtacacagacaaagcccatttttcttccaaatgcagaagatgtagattgtgtgatgaaggacatggcttagaagtggaaataaactgcacccggacccagaataccaagtgcagatgtaaaccaaactttttttgtaactctactgtatgtgaacactgtgacccttgcaccaaatgtgaacatggaatcatcaaggaatgcacactcaccagcaacaccaagtgcaaagaggaaggatccagatctaacttggggtggctttgtcttcttcttttgccaattccactaattgtttgggtgaagagaaaggaagtacagaaaacatgcagaaagcacagaaaggaaaaccaaggttctcatgaatctccaactttaaatcctgtaggtattgaaatagatttttcagatgttgacttgagtaaatatatcaccactattgctggagtcatgacactaagtcaagttaaaggctttgttcgaaagaatggtgtcaatgaagccaaaatagatgagatcaagaatgacaatgtccaagacacagcagaacagaaagttcaactgcttcgtaattggcatcaacttcatggaaagaaagaagcgtatgacacattgattaaagatctcaaaaaagccaatctttgtactcttgcagagaaaattcagactatcatcctcaaggacattactagtgactcagaaaattcaaacttcagaaatgaaatccaaagcttggtctag

SEQ ID NO: 1645 - DNA, 1841 bp, Homo sapiens
  source 1..1841: mol_type = genomic DNA
gacgatacgccgggcgcaggcgcagaagccgcgcccgtccgcggcgccgccagccagggcggaaacggctgcggcttcgctagggacgcatgcgcgggtcccttagttttcgcgagataacggtcgaaaacgcgctcttgtcgatttcctgtagtgaatcaggcaccggagtgcaggttcgggggtggaatccttgggccgctgggcaagcggcgagacctggccagggccagcgagccgaggacagagggcgcacggagggccgggccgcagccccggccgcttgcagaccccgccatggacccgttcctggtgctgctgcactcggtgtcgtccagcctgtcgagcagcgagctgaccgagctcaagttcctatgcctcgggcgcgtgggcaagcgcaagctggagcgcgtgcagagcggcctagacctcttctccatgctgctggagcagaacgacctggagcccgggcacaccgagctcctgcgcgagctgctcgcctccctgcggcgccacgacctgctgcggcgcgtcgacgacttcgaggcgggggcggcggccggggccgcgcctggggaagaagacctgtgtgcagcatttaacgtcatatgtgataatgtggggaaagattggagaaggctggctcgtcagctcaaagtctcagacaccaagatcgacagcatcgaggacagatacccccgcaacctgacagagcgtgtgcgggagtcactgagaatctggaagaacacagagaaggagaacgcaacagtggcccacctggtgggggctctcaggtcctgccagatgaacctggtggctgacctggtacaagaggttcagcaggcccgtgacctccagaacaggagtggggccatgtccccgatgtcatggaactcagacgcatctacctccgaagcgtcctgatgggccgctgctttgcgctggtggaccacaggcatctacacagcctggactttggttctctccaggaaggtagcccagcactgtgaagacccagcaggaagccaggctgagtgagccacagaccacctgcttctgaactcaagctgcgtttattaatgcctctcccgcaccaggccgggcttgggccctgcacagatatttccatttcttcctcactatgacactgagcaagatcttgtctccactaaatgagctcctgcgggagtagttggaaagttggaaccgtgtccagcacagaaggaatctgtgcagatgagcagtcacactgttactccacagcggaggagaccagctcagaggcccaggaatcggagcgaagcagagaggtggagaactgggatttgaacccccgccatccttcaccagagcccatgctcaaccactgtggcgttctgctgcccctgcagttggcagaaaggatgttttgtcccatttccttggaggccaccgggacagacctggacactagggtcaggcggggtgctgtggtggggagaggcatggctggggtgggggtggggagacctggttggccgtggtccagctcttggcccctgtgtgagttgagtctcctctctgagactgctaagtaggggcagtgatggttgccaggacgaattgagataatatctgtgaggtgctgatgagtgattgacacacagcactctctaaatcttccttgtgaggattatgggtcctgcaattctacagtttcttactgttttgtatcaaaatcactatctttctgataacagaattgccaaggcagcgggatctcgtatctttaaaaagcagtcctcttattcctaaggtaatcctattaaaacacagctttacaacttccatactacaaaaaa

SEQ ID NO: 1646 - DNA, 1846 bp, Homo sapiens
  source 1..1846: mol_type = genomic DNA
agagagagagagatagagaaagagaaagacagaggtgtttcccttagctatggaaactctataagagagatccagcttgcctcctcttgagcagtcagcaacagggtcccgtccttgacacctcagcctctacaggactgagaagaagtaaaaccgtttgctggggctggcctgactcaccagctgccatgcagcagcccttcaattacccatatccccagatctactgggtggacagcagtgccagctctccctgggcccctccaggcacagttcttccctgtccaacctctgtgcccagaaggcctggtcaaaggaggccaccaccaccaccgccaccgccaccactaccacctccgccgccgccgccaccactgcctccactaccgctgccacccctgaagaagagagggaaccacagcacaggcctgtgtctccttgtgatgtttttcatggttctggttgccttggtaggattgggcctggggatgtttcagctcttccacctacagaaggagctggcagaactccgagaggccaccccagtccaccccctgaaaaaaaggagctgaggaaagtggcccatttaacaggcaagtccaactcaaggtccatgcctctggaatgggaagacacctatggaattgtcctgctttctggagtgaagtataagaagggtggccttgtgatcaatgaaactgggctgtactttgtatattccaaagtatacttccggggtcaatcttgcaacaacctgcccctgagccacaaggtctacatgaggaactctaagtatccccaggatctggtgatgatggaggggaagatgatgagctactgcactactgggcagatgtgggcccgcagcagctacctgggggcagtgttcaatcttaccagtgctgatcatttatatgtcaacgtatctgagctctctctggtcaattttgaggaatctcagacgtttttcggcttatataagctctaagagaagcactttgggattctttccattatgattctttgttacaggcaccgagaatgttgtattcagtgagggtcttcttacatgcatttgaggtcaagtaagaagacatgaaccaagtggaccttgagaccacagggttcaaaatgtctgtagctcctcaactcacctaatgtttatgagccagacaaatggaggaatatgacggaagaacatagaactctgggctgccatgtgaagagggagaagcatgaaaaagcagctaccaggtgttctacactcatcttagtgcctgagagtatttaggcagattgaaaaggacaccttttaactcacctctcaaggtgggccttgctacctcaagggggactgtctttcagatacatggttgtgacctgaggatttaagggatggaaaaggaagactagaggcttgcataataagctaaagaggctgaaagaggccaatgccccactggcagcatcttcacttctaaatgcatatcctgagccatcggtgaaactaacagataagcaagagagatgttttggggactcatttcattcctaacacagcatgtgtatttccagtgcaattgtaggggtgtgtgtgtgtgtgtgtgtgtgtgtgtgtgtatgactaaagagagaatgtagatattgtgaagtacatattaggaaaatatgggttgcatttggtcaagattttgaatgcttcctgacaatcaactctaatagtgcttaaaaatcattgattgtcagctactaatgatgttttcctataatataataaatatttatgtagatgtgcatttttgtgaaatgaaaacatgtaataaaaagtatatgttaggatacaaat

SEQ ID NO: 1647 - DNA, 1888 bp, Homo sapiens
  source 1..1888: mol_type = genomic DNA
agagagagatagagaaagagaaagacagaggtgtttcccttagctatggaaactctataagagagatccagcttgcctcctcttgagcagtcagcaacagggtcccgtccttgacacctcagcctctacaggactgagaagaagtaaaaccgtttgctggggctggcctgactcaccagctgccatgcagcagcccttcaattacccatatccccagatctactgggtggacagcagtgccagctctccctgggcccctccaggcacagttcttccctgtccaacctctgtgcccagaaggcctggtcaaaggaggccaccaccaccaccgccaccgccaccactaccacctccgccgccgccgccaccactgcctccactaccgctgccacccctgaagaagagagggaaccacagcacaggcctgtgtctccttgtgatgtttttcatggttctggttgccttggtaggattgggcctggggatgtttcagctcttccacctacagaaggagctggcagaactccgagagtctaccagccagatgcacacagcatcatctttggagaagcaaataggccaccccagtccaccccctgaaaaaaaggagctgaggaaagtggcccatttaacaggcaagtccaactcaaggtccatgcctctggaatgggaagacacctatggaattgtcctgctttctggagtgaagtataagaagggtggccttgtgatcaatgaaactgggctgtactttgtatattccaaagtatacttccggggtcaatcttgcaacaacctgcccctgagccacaaggtctacatgaggaactctaagtatccccaggatctggtgatgatggaggggaagatgatgagctactgcactactgggcagatgtgggcccgcagcagctacctgggggcagtgttcaatcttaccagtgctgatcatttatatgtcaacgtatctgagctctctctggtcaattttgaggaatctcagacgtttttcggcttatataagctctaagagaagcactttgggattctttccattatgattctttgttacaggcaccgagaatgttgtattcagtgagggtcttcttacatgcatttgaggtcaagtaagaagacatgaaccaagtggaccttgagaccacagggttcaaaatgtctgtagctcctcaactcacctaatgtttatgagccagacaaatggaggaatatgacggaagaacatagaactctgggctgccatgtgaagagggagaagcatgaaaaagcagctaccaggtgttctacactcatcttagtgcctgagagtatttaggcagattgaaaaggacaccttttaactcacctctcaaggtgggccttgctacctcaagggggactgtctttcagatacatggttgtgacctgaggatttaagggatggaaaaggaagactagaggcttgcataataagctaaagaggctgaaagaggccaatgccccactggcagcatcttcacttctaaatgcatatcctgagccatcggtgaaactaacagataagcaagagagatgttttggggactcatttcattcctaacacagcatgtgtatttccagtgcaattgtaggggtgtgtgtgtgtgtgtgtgtgtgtgtgtgtgtatgactaaagagagaatgtagatattgtgaagtacatattaggaaaatatgggttgcatttggtcaagattttgaatgcttcctgacaatcaactctaatagtgcttaaaaatcattgattgtcagctactaatgatgttttcctataatataataaatatttatgtagatgtgcatttttgtgaaatgaaaacatgtaataaaaagtatatgttaggatacaaat

SEQ ID NO: 1648 - DNA, 14758 bp, Homo sapiens
  source 1..14758: mol_type = genomic DNA
ctgggcggccgggcgcggggagagggcgcgggagcggctcgtgcggcaggtaccatgcggacgcgcgagcccggcgagggccccggcaggcccggtccctgctcgggggcgcgctgagacggcgggtgagctccacgagagcgccgtcgccacttcgggccaactttgcgattcccgacagttaagcaatggggagacatttggctttgctcctgcttctgctccttctcttccaacattttggagacagtgatggcagccaacgacttgaacagactcctctgcagtttacacacctcgagtacaacgtcaccgtgcaggagaactctgcagctaagacttatgtggggcatcctgtcaagatgggtgtttacattacacatccagcgtgggaagtaaggtacaaaattgtttccggagacagtgaaaacctgttcaaagctgaagagtacattctcggagacttttgctttctaagaataaggaccaaaggaggaaatacagctattcttaatagagaagtgaaggatcactacacattgatagtgaaagcacttgaaaaaaatactaatgtggaggcgcgaacaaaggtcagggtgcaggtgctggatacaaatgacttgagaccgttattctcacccacctcatacagcgtttctttacctgaaaacacagctataaggaccagtatcgcaagagtcagcgccacggatgcagacataggaaccaacggggaattttactacagttttaaagatcgaacagatatgtttgctattcacccaaccagtggtgtgatagtgttaactggtagacttgattacctagagaccaagctctatgagatggaaatcctcgctgcggaccgtggcatgaagttgtatgggagcagtggcatcagcagcatggccaagctaacggtgcacatcgaacaggccaatgaatgtgctccggtgataacagcagtgacattgtcaccatcagaactggacagggacccagcatatgcaattgtgacagtggatgactgcgatcagggtgccaatggtgacatagcatctttaagcatcgtggcaggtgaccttctccagcagtttagaacagtgaggtcctttccagggagtaaggagtataaagtcaaagccatcggtggcattgattgggacagtcatcctttcggctacaatctcacactacaggctaaagataaaggaactccgccccagttctcttctgttaaagtcattcacgtgacttctccacagttcaaagccgggccagtcaagtttgaaaaggatgtttacagagcagaaataagtgaatttgctcctcccaacacacctgtggtcatggtaaaggccattcctgcttattcccatttgaggtatgtttttaaaagtacacctggaaaagctaaattcagtttaaattacaacactggtctcatttctattttagaaccagttaaaagacagcaggcagcccattttgaacttgaagtaacaacaagtgacagaaaagcgtccaccaaggtcttggtgaaagtcttaggtgcaaatagcaatccccctgaatttacccagacagcgtacaaagctgcttttgatgagaacgtgcccattggtactactgtcatgagcctgagtgccgtagaccctgatgagggtgagaacgggtacgtgacatacagtatcgcaaatttaaatcatgtgccgtttgcgattgaccatttcactggtgccgtgagtacgtcagaaaacctggactacgaactgatgcctcgggtttatactctgaggattcgtgcatcagactggggcttgccgtaccgccgggaagtcgaagtccttgctacaattactctcaataacttgaatgacaacacacctttgtttgagaaaataaattgtgaagggacaattcccagagatctaggcgtgggagagcaaataaccactgtttctgctattgatgcagatgaacttcagttggtacagtatcagattgaagctggaaatgaactggatttctttagtttaaaccccaactcgggggtattgtcattaaagcgatcgctaatggatggcttaggtgcaaaggtgtctttccacagtctgagaatcacagctacagatggagaaaattttgccacaccattatatatcaacataacagtggctgccagtcacaagctggtaaacttgcagtgtgaagagactggtgttgccaaaatgctggcagagaagctcctgcaggcaaataaattacacaaccagggagaggtggaggatattttcttcgattctcactctgtcaatgctcacataccgcagtttagaagcactcttccgactggtattcaggtaaaggaaaaccagcctgtgggttccagtgtaattttcatgaactccactgaccttgacactggcttcaatggaaaactggtctatgctgtttctggaggaaatgaggatagttgcttcatgattgatatggaaacaggaatgctgaaaattttatctcctcttgaccgtgaaacaacagacaaatacaccctgaatattaccgtctatgaccttgggataccccagaaggctgcgtggcgtcttctacatgtcgtggttgtcgatgccaatgataatccacccgagtttttacaggagagctattttgtggaagtgagtgaagacaaggaggtacatagtgaaatcatccaggttgaagccacagataaagacctggggcccaacggacacgtgacgtactcaattgttacagacacagacacattttcaattgacagcgtgacgggtgttgttaacatcgcacgccctctggatcgagagctgcagcatgagcactccttaaagattgaggccagggaccaagccagagaagagcctcagctgttctccactgtcgttgtgaaagtatcactagaagatgttaatgacaacccacctacatttattccacctaattatcgtgtgaaagtccgagaggatcttccagaaggaaccgtcatcatgtggttagaagcccacgatcctgatttaggtcagtctggtcaggtgagatacagccttctggaccacggagaaggaaacttcgatgtggataaactcagtggagcagttaggatcgtccagcagttggactttgagaagaagcaagtgtataatctcactgtgagggccaaagacaagggaaagccagtttctctgtcttctacttgctatgttgaagttgaggtggttgatgtgaatgagaacctgcacccacccgtgttttccagctttgtggaaaaggggacagtgaaagaagatgcacctgttggttcattggtaatgacggtgtcggctcatgatgaggacgccagaagagatggggagatccgatactccattagagatggctctggcgttggtgttttcaaaataggtgaagagacaggtgtcatagagacgtcagatcgactggaccgtgaatcgacctcccattattggctaacagtctttgcaaccgatcagggtgtcgtgcctctttcatcgttcatagagatctacatagaggttgaggatgtcaatgacaatgcaccacagacatcagagcctgtttattacccagaaatcatggaaaattctcctaaagatgtatctgtggtccagatcgaggcatttgatccagattcgagctctaatgacaagctcatgtacaaaattacaagtggaaatccacaaggattcttttcaatacatcctaaaacaggtctcatcacaactacgtcaaggaagctagaccgagaacagcaagatgaacacatattagaggttactgtgacagacaatggtagtccccccaaatcaaccattgcaagagtcattgtgaaaatccttgatgaaaatgacaacaaacctcagtttctgcaaaagttctacaaaatcagactccctgagcgggaaaagccagaccgagaaagaaatgccagacgggagccgctctatcacgtcatagccaccgacaaggatgagggccccaatgcagaaatctcctacagcatcgaagacgggaatgagcatggcaaatttttcatcgaaccgaaaactggagtggtttcgtccaagaggttttcagcagctggagaatatgatattctttcaattaaggcagttgacaatggtcgccctcaaaagtcatcaaccaccagactccatattgaatggatctccaagcccaaaccgtccctggagcccatttcatttgaagaatcattttttacctttactgtgatggaaagtgaccccgttgctcacatgattggagtaatatctgtggagcctcctggcatacccctttggtttgacatcactggtggcaactacgacagtcacttcgatgtggacaagggaactggaaccatcattgttgccaaacctcttgatgcagaacagaagtcaaactacaacctcacagtcgaggctacagatggaaccaccactatcctcactcaggtattcatcaaagtaatagacacaaatgaccatcgtcctcagttttctacatcaaagtatgaagttgttattcctgaagatacagcgccagaaacagaaattttgcaaatcagtgctgtggatcaggatgagaaaaacaaactaatctacactctgcagagcagtagagatccactgagtctcaagaaatttcgtcttgatcctgcaaccggctctctctatacttctgagaaactggatcatgaagctgttccagcacacctcacggtcatggtacgagatcaagatgtgcctgtaaaacgcaactttgcaaggattgtggtcaatgtcagcgacacgaatgaccacgccccgtggttcaccgcttcctcctacaaagggcgggtttatgaatcggcagccgttggctcagttgtgttgcaggtgacggctctggacaaggacaaagggaaaaatgctgaagtgctgtactcgatcgagtcaggtacttttggaaatattggaaattcttttatgattgatcctgtcttgggctctattaaaactgccaaagaattagatcgaagtaaccaagcggagtatgatttaatggtaaaagctacagataagggcagtccaccaatgagtgaaataacttctgtgcgtatctttgtcacaattgctgacaacgcctctccgaagtttacatcaaaagaatattctgttgaacttagtgaaactgtcagcattgggagtttcgttgggatggttacagcccatagtcaatcatcagtggtgtatgaaataaaagatggaaatacaggtgatgcttttgatattaatccacattctggaactatcatcactcagaaagccctggactttgaaactttgcccatttacacattgataatacaaggaactaacatggctggtttgtccactaatacaacggttctagttcacttgcaggatgagaatgacaacgcgccagtttttatgcaggcagaatatacaggactcattagtgaatcagcctcaattaacagcgtggtcctaacagacaggaatgtcccactggtgattcgagcagctgatgctgataaagactcaaatgctttgcttgtatatcacattgttgaaccatctgtacacacatattttgctattgattctagcactggtgctattcatacagtactaagtctggactatgaagaaacaagtatttttcactttaccgtccaagtgcatgacatgggaaccccacgtttatttgctgagtatgcagcgaatgtaacagtacatgtaattgacattaatgactgcccccctgtgtttgccaagccattatatgaagcatctcttttgttaccaacatacaaaggagtaaaagtcatcacagtaaatgctacagatgctgattcaagtgcattctcacagttgatttactccatcaccgaaggcaacatcggggagaagttttctatggactacaagactggtgctctcactgtccaaaacacaactcagttaagaagccgctacgagctaaccgttagagcttccgatggcagatttgccggccttacctctgtcaaaattaatgtgaaagaaagcaaagaaagtcacctaaagtttacccaggatgtctactctgcggtagtgaaagagaattccaccgaggccgaaacattagctgtcattactgctattgggaatccaatcaatgagcctttgttttatcacatcctcaacccagatcgcagatttaaaataagccgcacttcaggagttctgtcaaccactggcacgcccttcgatcgtgagcagcaggaggcgtttgatgtggttgtagaagtgacagaggaacataagccttctgcagtggcccacgttgtcgtgaaggtcattgtagaagaccaaaatgataatgcgccggtgtttgtcaaccttccctactacgccgttgttaaagtggacactgaggtgggccatgtcattcgctatgtcactgctgtagacagagacagtggcagaaacggggaagtgcattactacctcaaggaacatcatgaacactttcaaattggacccttgggtgaaatttcactgaaaaagcaatttgagcttgacaccttaaataaagaatatcttgttacagtggttgcaaaagatggagggaacccggccttttcagcggaagttatcgttccgatcactgtcatgaataaagccatgcctgtgtttgaaaaacctttctacagtgcagagattgcagagagcatccaggtgcacagccctgtggtccacgtgcaggctaacagcccggaaggcctgaaagtgttctacagcatcacagacggagaccctttcagccagttcactattaacttcaatactggagttatcaatgtcatagctcctctggactttgaggcccacccggcatataagctgagcatacgcgcaactgactccttgacgggcgctcatgctgaagtatttgtggacatcatagtagacgacatcaatgataaccctcctgtgtttgctcagcagtcttatgcggtgaccctgtctgaggcatctgtaattggaacgtctgttgttcaagttagagccaccgattctgattcagaaccaaatagaggaatctcataccagatgtttgggaatcacagcaagagtcatgatcattttcatgtagacagcagcactggcctcatctcactactcagaaccctggattacgagcagtcccggcagcacacgatttttgtgagggcagttgatggtggtatgcccacgctgagcagtgatgtgattgtcacggtggacgttaccgacctcaatgataatccaccactctttgaacaacagatttatgaagccagaattagcgagcacgcccctcatgggcatttcgtgacctgtgtaaaagcctatgatgcagacagttcagacatagacaagttgcagtattccattctgtctggcaatgatcataaacattttgtcattgacagtgcaacagggattatcaccctctcaaacctgcaccggcacgccctgaagccattttacagtcttaacctgtcagtgtctgatggagtttttagaagttccacccaggttcatgtaactgtaattggaggcaatttgcacagtcctgctttccttcagaacgaatatgaagtggaactagctgaaaacgctcccctacataccctggtgatggaggtgaaaactacggatggggattctggtatttatggtcacgttacttaccatattgtaaatgactttgccaaagacagattttacataaatgagagaggacagatatttactttggaaaaacttgatcgagaaaccccggcggagaaagtgatctcagtccgtttaatggctaaggatgctggaggaaaagttgctttctgcaccgtgaatgtcatccttacagatgacaatgacaatgcaccacaatttcgagcaaccaaatacgaagtgaatatcgggtccagtgctgctaaagggacttcagtcgttaaagttcttgcaagtgatgccgatgagggctccaatgccgacatcacctatgccattgaagcagactctgaaagtgtaaaagagaatttggaaattaacaaactgtccggcgtaatcactacaaaggagagcctcattggcttggaaaatgaattcttcactttctttgttagagctgtggataatgggtctccatcaaaagaatctgttgttcttgtctatgttaaaatccttccaccggaaatgcagcttccaaaattttcagaacctttctatacctttacagtgtcagaggacgtgcctattggaacagagatagatctcatccgagcagaacatagtgggactgttctttacagcctggtcaaagggaatactccagaaagcaatagggatgagtcctttgtgattgacagacagagcgggagactgaagttggagaagagtcttgatcatgagacaactaagtggtatcagttttccatactggccaggtgcactcaagatgaccatgagatggtggcttctgtagatgttagtatccaagtgaaagatgcaaatgacaacagcccggtctttgaatctagtccatatgaggcattcattgttgaaaacctgccagggggaagtagagtaattcagatcagggcatctgatgctgactcaggaaccaacggccaagttatgtatagcctggatcagtcacaaagtgtggaagtcattgaatcctttgccattaacatggaaacaggctggattacaactttaaaggaacttgaccatgaaaagagagacaattaccagattaaagtggttgcatcagatcatggtgaaaagatccagctatcctccacagccattgtggatgttaccgtcaccgatgtcaacgatagtccaccacgattcacggccgagatctataaagggactgtgagtgaggatgacccccaaggtggggtgattgccatcttaagtaccacggatgctgattctgaagagatcaacagacaagttacatatttcataacaggaggggatcctttaggacagtttgccgttgaaactatacagaatgaatggaaggtatatgtgaagaaacctctagacagggaaaaaagggacaattaccttcttactatcacggcaactgatggcaccttctcatcaaaagcgatagttgaagtgaaagttctggatgcaaatgacaacagtccagtttgtgaaaagactttatattcagacactattcctgaagacgtccttcctggaaaattgatcatgcagatctctgctacagacgcagacatccgctctaacgctgaaattacttacacgttattgggttcaggtgcagaaaaattcaaactaaatccagacacaggtgaactgaaaacgtcaaccccccttgatcgtgaggagcaagctgtttatcatcttctcgtcagggccacagatggaggaggaagattctgccaagccagtattgtgctcacgctagaagatgtgaacgataacgcccccgaattctctgccgatccttatgccatcaccgtgtttgaaaacacagagccgggaacgctgctgacaagagtgcaggccacagatgccgacgcaggattaaatcggaagattttatactcactgattgactctgctgatgggcagttctccattaacgaattatctggaattattcagttagaaaaacctttggacagagaactccaggcagtatacaccctctctttgaaagctgtggatcaaggcttgccaaggaggctgactgccactggcactgtgattgtatcagttcttgacataaatgacaacccccctgtgtttgagtaccgtgaatatggtgccaccgtgtctgaggacattcttgttggaactgaagttcttcaagtgtatgcagcaagtcgggatattgaagcaaatgcagaaatcacctactcaataataagtggaaatgaacatgggaaattcagcatagattctaaaacaggggccgtatttatcattgagaatctggattatgagagctctcatgagtattacctaacagtagaggccactgatggaggcacgccttcactgagcgacgttgccactgtgaacgttaatgtaacagatatcaacgataatacccctgtgttcagccaagacacctacacgacagtcatcagtgaagatgccgttcttgagcagtctgtcatcacggttatggccgatgatgccgatggaccttccaacagccacatccactactcaattatagatggcaaccaaggaagctcgttcacaattgaccccgtcaggggagaagtcaaagtgaccaaacttctcgaccgagaaacgatttcaggttacacgctcacggttcaagcttctgataatggcagtccacccagagtcaacacgacgaccgtgaacatcgatgtgtccgatgtcaatgacaacgcgcccgtcttctccaggggaaactacagtgtcattatccaggaaaataagccagtgggcttcagcgtgctgcagctggtagtaacagatgaggattcttcccataacggtccacccttcttctttactattgtaactggaaatgatgagaaggcttttgaagttaacccgcaaggagtcctcctgacatcatctgccatcaagaggaaggagaaagatcattacttactgcaggtgaaggtggcagataatggaaagcctcagttgtcatctttgacatacattgacattagggtaattgaggagagcatctatccgcctgcgattttgcccctggagattttcatcacctcttctggagaagaatactcaggtggcgtcattgggaagatccatgccacagaccaggacgtgtatgatactctaacctacagtctcgaccctcagatggacaacctgttctctgtttccagcacagggggcaagctgatagcacacaaaaagctagacatagggcaataccttctcaatgtcagcgtaacagatgggaagttcacgacggtggccgacatcacagtgcatatcagacaagtcacacaggagatgttgaaccacaccatcgcgatccgctttgccaacctcactccggaagaattcgttggtgactactggcgcaacttccagcgagctttacggaacatcctgggtgtgaggaggaacgacatacagattgttagtttgcagtcctctgaacctcacccacatctggacgtcttactttttgtagagaaaccaggtagtgctcagatctcaacaaaacaacttctgcacaagattaactcttccgtgactgacattgaggaaatcattggagttaggatactgaatgtattccagaaactctgcgcgggactggactgcccctggaagttctgcgatgaaaaggtgtctgtggatgaaagtgtgatgtcaacacacagcacagccagactgagttttgtgactccccgccaccacagggcagcggtgtgtctctgcaaagagggaaggtgcccacctgtccaccatggctgtgaagatgatccgtgccctgagggatccgaatgtgtgtctgatccctgggaggagaaacacacctgtgtctgtcccagcggcaggtttggtcagtgcccagggagttcatctatgacactgactggaaacagctacgtgaaataccgtctgacggaaaatgaaaacaaattagagatgaaactgaccatgaggctcagaacatattccacgcatgcggttgtcatgtatgctcgaggaactgactatagcatcttggagattcatcatggaaggctgcagtacaagtttgactgtggaagtggccctggaattgtctctgttcagagcattcaggtcaatgatgggcagtggcacgcagtggccctggaagtgaatggaaactatgctcgcttggttctagaccaagttcatactgcatcgggcacagccccagggactctgaaaaccctgaacctggataactatgtgttttttggtggccacatccgtcagcagggaacaaggcatggaagaagtcctcaagttggtaatggtttcaggggttgtatggactccatttatttgaatgggcaggagctccctttaaacagcaaacccagaagctatgcacacatcgaagagtcggtggatgtatctccaggctgcttcctgacggccacggaagactgcgccagcaacccttgccagaatggaggcgtttgcaatccgtcacctgctggaggttattactgcaaatgcagtgccttgtacatagggacccactgtgagataagcgtcaatccgtgttcctccaagccatgcctctatgggggcacgtgtgttgtcgacaacggaggctttgtttgccagtgtagaggattatatactggtcagaggtgtcagcttagtccatactgcaaagatgaaccctgtaagaatggcggaacatgctttgacagtttggatggcgccgtttgtcagtgtgattcgggttttaggggagaaaggtgtcagagtgatatcgacgagtgctctggaaacccttgcctgcacggggccctctgtgagaacacgcacggctcctatcactgcaactgcagccacgagtacaggggacgtcactgcgaggatgctgcgcccaaccagtatgtgtccacgccgtggaacattgggttggcggaaggaattggaatcgttgtgtttgttgcagggatatttttactggtggtggtgtttgttctctgccgtaagatgattagtcggaaaaagaagcatcaggctgaacctaaagacaagcacctgggacccgctacggctttcttgcaaagaccgtattttgattccaagctaaataagaacatttactcagacataccaccccaggtgcctgtccggcctatttcctacaccccgagtattccaagtgactcaagaaacaatctggaccgaaattccttcgaaggatctgctatcccagagcatcccgaattcagcacttttaaccccgagtctgtgcacgggcaccgaaaagcagtggcggtctgcagcgtggcgccaaacctgcctcccccacccccttcaaactccccttctgacagcgactccatccagaagcctagctgggactttgactatgacacaaaagtggtggatcttgatccctgtctttccaagaagcctctagaggaaaagccttcccagccatacagtgcccgggaaagcctgtctgaagtgcagtctctgagctccttccagtccgaatcgtgcgatgacaatgggtatcactgggatacatcagattggatgccaagcgttcctctgccggacatacaagagttccccaactatgaggtgattgatgagcagacacccctgtactcagcagatccaaacgccatcgatacggactattaccctggaggctacgacatcgaaagtgattttcctccacccccagaagacttccccgcagctgatgagctaccaccgttaccgcccgaattcagcaatcagtttgaatccatccaccctcctagagacatgcctgccgcgggtagcttgggttcttcatcaagaaaccggcagaggttcaacttgaatcagtatttgcccaatttttatcccctcgatatgtctgaacctcaaacaaaaggcactggtgagaatagtacttgtagagaaccccatgccccttacccgccagggtatcaaagacacttcgaggcgcccgctgtcgagagcatgcccatgtctgtgtacgcctccaccgcctcctgctctgacgtgtcagcctgctgcgaagtggagtccgaggtcatgatgagtgactatgagagcggggacgacggccacttcgaagaggtgacgatcccgcccctggattcccagcagcacacggaagtctgactctcaactccccccaaagtgcctgactttagtgaacctagaggtgatgtgagtaatccgcgctgttctttgcagcagtgcttccaagctttttttggtgagccgaatgggcatggctgcgctggatcctgcgcctctggacgtgctagccatttccagtgtcccaactactgtcatcgtgaggttttcatcggctgtgccatttcccaacgtcttttgggatttacatctgtctgtgttaaaataatcaaacgaaaaatcagtcctgtgttgtcagcatgattcatgtatttatatagatttgattattttaattttcctgtctcttttttttgtaaattttatgtacagatttgatttttcatagttttaactagatttccaagatattttgtgcatttgtttcaactgaattttggtggtgtcagtgccattatctagcaccctgatttttttttttttactataaccagggtttcattctgtctttttccactgaagtgtgacattttgttagtacatttcagtgtagtcattcatttctagctgtacataggatgaaggagagatcagatacatgaacatgtcttacatgggttgctgtatttagaattataaacatttttcattattggaaagtgtaacggggaccttctgcatacctgtttagaaccaaaaccaccatgacacagtttttatagtgtctgtatatttgtgatgcaatggtcttgtaaaggtttttaatgaaaactaccattagccagtctttcttactgacaataaattattaataaaat

SEQ ID NO: 1649 - DNA, 14786 bp, Homo sapiens
  source 1..14786: mol_type = genomic DNA
agcgtgaggcgccggcgccgagctgggcggccgggcgcggggagagggcgcgggagcggctcgtgcggcaggtaccatgcggacgcgcgagcccggcgagggccccggcaggcccggtccctgctcgggggcgcgctgagacggcgggtgagctccacgagagcgccgtcgccacttcgggccaactttgcgattcccgacagttaagcaatggggagacatttggctttgctcctgcttctgctccttctcttccaacattttggagacagtgatggcagccaacgacttgaacagactcctctgcagtttacacacctcgagtacaacgtcaccgtgcaggagaactctgcagctaagacttatgtggggcatcctgtcaagatgggtgtttacattacacatccagcgtgggaagtaaggtacaaaattgtttccggagacagtgaaaacctgttcaaagctgaagagtacattctcggagacttttgctttctaagaataaggaccaaaggaggaaatacagctattcttaatagagaagtgaaggatcactacacattgatagtgaaagcacttgaaaaaaatactaatgtggaggcgcgaacaaaggtcagggtgcaggtgctggatacaaatgacttgagaccgttattctcacccacctcatacagcgtttctttacctgaaaacacagctataaggaccagtatcgcaagagtcagcgccacggatgcagacataggaaccaacggggaattttactacagttttaaagatcgaacagatatgtttgctattcacccaaccagtggtgtgatagtgttaactggtagacttgattacctagagaccaagctctatgagatggaaatcctcgctgcggaccgtggcatgaagttgtatgggagcagtggcatcagcagcatggccaagctaacggtgcacatcgaacaggccaatgaatgtgctccggtgataacagcagtgacattgtcaccatcagaactggacagggacccagcatatgcaattgtgacagtggatgactgcgatcagggtgccaatggtgacatagcatctttaagcatcgtggcaggtgaccttctccagcagtttagaacagtgaggtcctttccagggagtaaggagtataaagtcaaagccatcggtggcattgattgggacagtcatcctttcggctacaatctcacactacaggctaaagataaaggaactccgccccagttctcttctgttaaagtcattcacgtgacttctccacagttcaaagccgggccagtcaagtttgaaaaggatgtttacagagcagaaataagtgaatttgctcctcccaacacacctgtggtcatggtaaaggccattcctgcttattcccatttgaggtatgtttttaaaagtacacctggaaaagctaaattcagtttaaattacaacactggtctcatttctattttagaaccagttaaaagacagcaggcagcccattttgaacttgaagtaacaacaagtgacagaaaagcgtccaccaaggtcttggtgaaagtcttaggtgcaaatagcaatccccctgaatttacccagacagcgtacaaagctgcttttgatgagaacgtgcccattggtactactgtcatgagcctgagtgccgtagaccctgatgagggtgagaacgggtacgtgacatacagtatcgcaaatttaaatcatgtgccgtttgcgattgaccatttcactggtgccgtgagtacgtcagaaaacctggactacgaactgatgcctcgggtttatactctgaggattcgtgcatcagactggggcttgccgtaccgccgggaagtcgaagtccttgctacaattactctcaataacttgaatgacaacacacctttgtttgagaaaataaattgtgaagggacaattcccagagatctaggcgtgggagagcaaataaccactgtttctgctattgatgcagatgaacttcagttggtacagtatcagattgaagctggaaatgaactggatttctttagtttaaaccccaactcgggggtattgtcattaaagcgatcgctaatggatggcttaggtgcaaaggtgtctttccacagtctgagaatcacagctacagatggagaaaattttgccacaccattatatatcaacataacagtggctgccagtcacaagctggtaaacttgcagtgtgaagagactggtgttgccaaaatgctggcagagaagctcctgcaggcaaataaattacacaaccagggagaggtggaggatattttcttcgattctcactctgtcaatgctcacataccgcagtttagaagcactcttccgactggtattcaggtaaaggaaaaccagcctgtgggttccagtgtaattttcatgaactccactgaccttgacactggcttcaatggaaaactggtctatgctgtttctggaggaaatgaggatagttgcttcatgattgatatggaaacaggaatgctgaaaattttatctcctcttgaccgtgaaacaacagacaaatacaccctgaatattaccgtctatgaccttgggataccccagaaggctgcgtggcgtcttctacatgtcgtggttgtcgatgccaatgataatccacccgagtttttacaggagagctattttgtggaagtgagtgaagacaaggaggtacatagtgaaatcatccaggttgaagccacagataaagacctggggcccaacggacacgtgacgtactcaattgttacagacacagacacattttcaattgacagcgtgacgggtgttgttaacatcgcacgccctctggatcgagagctgcagcatgagcactccttaaagattgaggccagggaccaagccagagaagagcctcagctgttctccactgtcgttgtgaaagtatcactagaagatgttaatgacaacccacctacatttattccacctaattatcgtgtgaaagtccgagaggatcttccagaaggaaccgtcatcatgtggttagaagcccacgatcctgatttaggtcagtctggtcaggtgagatacagccttctggaccacggagaaggaaacttcgatgtggataaactcagtggagcagttaggatcgtccagcagttggactttgagaagaagcaagtgtataatctcactgtgagggccaaagacaagggaaagccagtttctctgtcttctacttgctatgttgaagttgaggtggttgatgtgaatgagaacctgcacccacccgtgttttccagctttgtggaaaaggggacagtgaaagaagatgcacctgttggttcattggtaatgacggtgtcggctcatgatgaggacgccagaagagatggggagatccgatactccattagagatggctctggcgttggtgttttcaaaataggtgaagagacaggtgtcatagagacgtcagatcgactggaccgtgaatcgacctcccattattggctaacagtctttgcaaccgatcagggtgtcgtgcctctttcatcgttcatagagatctacatagaggttgaggatgtcaatgacaatgcaccacagacatcagagcctgtttattacccagaaatcatggaaaattctcctaaagatgtatctgtggtccagatcgaggcatttgatccagattcgagctctaatgacaagctcatgtacaaaattacaagtggaaatccacaaggattcttttcaatacatcctaaaacaggtctcatcacaactacgtcaaggaagctagaccgagaacagcaagatgaacacatattagaggttactgtgacagacaatggtagtccccccaaatcaaccattgcaagagtcattgtgaaaatccttgatgaaaatgacaacaaacctcagtttctgcaaaagttctacaaaatcagactccctgagcgggaaaagccagaccgagaaagaaatgccagacgggagccgctctatcacgtcatagccaccgacaaggatgagggccccaatgcagaaatctcctacagcatcgaagacgggaatgagcatggcaaatttttcatcgaaccgaaaactggagtggtttcgtccaagaggttttcagcagctggagaatatgatattctttcaattaaggcagttgacaatggtcgccctcaaaagtcatcaaccaccagactccatattgaatggatctccaagcccaaaccgtccctggagcccatttcatttgaagaatcattttttacctttactgtgatggaaagtgaccccgttgctcacatgattggagtaatatctgtggagcctcctggcatacccctttggtttgacatcactggtggcaactacgacagtcacttcgatgtggacaagggaactggaaccatcattgttgccaaacctcttgatgcagaacagaagtcaaactacaacctcacagtcgaggctacagatggaaccaccactatcctcactcaggtattcatcaaagtaatagacacaaatgaccatcgtcctcagttttctacatcaaagtatgaagttgttattcctgaagatacagcgccagaaacagaaattttgcaaatcagtgctgtggatcaggatgagaaaaacaaactaatctacactctgcagagcagtagagatccactgagtctcaagaaatttcgtcttgatcctgcaaccggctctctctatacttctgagaaactggatcatgaagctgttcaccagcacaccctcacggtcatggtacgagatcaagatgtgcctgtaaaacgcaactttgcaaggattgtggtcaatgtcagcgacacgaatgaccacgccccgtggttcaccgcttcctcctacaaagggcgggtttatgaatcggcagccgttggctcagttgtgttgcaggtgacggctctggacaaggacaaagggaaaaatgctgaagtgctgtactcgatcgagtcaggaaatattggaaattcttttatgattgatcctgtcttgggctctattaaaactgccaaagaattagatcgaagtaaccaagcggagtatgatttaatggtaaaagctacagataagggcagtccaccaatgagtgaaataacttctgtgcgtatctttgtcacaattgctgacaacgcctctccgaagtttacatcaaaagaatattctgttgaacttagtgaaactgtcagcattgggagtttcgttgggatggttacagcccatagtcaatcatcagtggtgtatgaaataaaagatggaaatacaggtgatgcttttgatattaatccacattctggaactatcatcactcagaaagccctggactttgaaactttgcccatttacacattgataatacaaggaactaacatggctggtttgtccactaatacaacggttctagttcacttgcaggatgagaatgacaacgcgccagtttttatgcaggcagaatatacaggactcattagtgaatcagcctcaattaacagcgtggtcctaacagacaggaatgtcccactggtgattcgagcagctgatgctgataaagactcaaatgctttgcttgtatatcacattgttgaaccatctgtacacacatattttgctattgattctagcactggtgctattcatacagtactaagtctggactatgaagaaacaagtatttttcactttaccgtccaagtgcatgacatgggaaccccacgtttatttgctgagtatgcagcgaatgtaacagtacatgtaattgacattaatgactgcccccctgtgtttgccaagccattatatgaagcatctcttttgttaccaacatacaaaggagtaaaagtcatcacagtaaatgctacagatgctgattcaagtgcattctcacagttgatttactccatcaccgaaggcaacatcggggagaagttttctatggactacaagactggtgctctcactgtccaaaacacaactcagttaagaagccgctacgagctaaccgttagagcttccgatggcagatttgccggccttacctctgtcaaaattaatgtgaaagaaagcaaagaaagtcacctaaagtttacccaggatgtctactctgcggtagtgaaagagaattccaccgaggccgaaacattagctgtcattactgctattgggaatccaatcaatgagcctttgttttatcacatcctcaacccagatcgcagatttaaaataagccgcacttcaggagttctgtcaaccactggcacgcccttcgatcgtgagcagcaggaggcgtttgatgtggttgtagaagtgacagaggaacataagccttctgcagtggcccacgttgtcgtgaaggtcattgtagaagaccaaaatgataatgcgccggtgtttgtcaaccttccctactacgccgttgttaaagtggacactgaggtgggccatgtcattcgctatgtcactgctgtagacagagacagtggcagaaacggggaagtgcattactacctcaaggaacatcatgaacactttcaaattggacccttgggtgaaatttcactgaaaaagcaatttgagcttgacaccttaaataaagaatatcttgttacagtggttgcaaaagatggagggaacccggccttttcagcggaagttatcgttccgatcactgtcatgaataaagccatgcctgtgtttgaaaaacctttctacagtgcagagattgcagagagcatccaggtgcacagccctgtggtccacgtgcaggctaacagcccggaaggcctgaaagtgttctacagcatcacagacggagaccctttcagccagttcactattaacttcaatactggagttatcaatgtcatagctcctctggactttgaggcccacccggcatataagctgagcatacgcgcaactgactccttgacgggcgctcatgctgaagtatttgtggacatcatagtagacgacatcaatgataaccctcctgtgtttgctcagcagtcttatgcggtgaccctgtctgaggcatctgtaattggaacgtctgttgttcaagttagagccaccgattctgattcagaaccaaatagaggaatctcataccagatgtttgggaatcacagcaagagtcatgatcattttcatgtagacagcagcactggcctcatctcactactcagaaccctggattacgagcagtcccggcagcacacgatttttgtgagggcagttgatggtggtatgcccacgctgagcagtgatgtgattgtcacggtggacgttaccgacctcaatgataatccaccactctttgaacaacagatttatgaagccagaattagcgagcacgcccctcatgggcatttcgtgacctgtgtaaaagcctatgatgcagacagttcagacatagacaagttgcagtattccattctgtctggcaatgatcataaacattttgtcattgacagtgcaacagggattatcaccctctcaaacctgcaccggcacgccctgaagccattttacagtcttaacctgtcagtgtctgatggagtttttagaagttccacccaggttcatgtaactgtaattggaggcaatttgcacagtcctgctttccttcagaacgaatatgaagtggaactagctgaaaacgctcccctacataccctggtgatggaggtgaaaactacggatggggattctggtatttatggtcacgttacttaccatattgtaaatgactttgccaaagacagattttacataaatgagagaggacagatatttactttggaaaaacttgatcgagaaaccccggcggagaaagtgatctcagtccgtttaatggctaaggatgctggaggaaaagttgctttctgcaccgtgaatgtcatccttacagatgacaatgacaatgcaccacaatttcgagcaaccaaatacgaagtgaatatcgggtccagtgctgctaaagggacttcagtcgttaaagttcttgcaagtgatgccgatgagggctccaatgccgacatcacctatgccattgaagcagactctgaaagtgtaaaagagaatttggaaattaacaaactgtccggcgtaatcactacaaaggagagcctcattggcttggaaaatgaattcttcactttctttgttagagctgtggataatgggtctccatcaaaagaatctgttgttcttgtctatgttaaaatccttccaccggaaatgcagcttccaaaattttcagaacctttctatacctttacagtgtcagaggacgtgcctattggaacagagatagatctcatccgagcagaacatagtgggactgttctttacagcctggtcaaagggaatactccagaaagcaatagggatgagtcctttgtgattgacagacagagcgggagactgaagttggagaagagtcttgatcatgagacaactaagtggtatcagttttccatactggccaggtgcactcaagatgaccatgagatggtggcttctgtagatgttagtatccaagtgaaagatgcaaatgacaacagcccggtctttgaatctagtccatatgaggcattcattgttgaaaacctgccagggggaagtagagtaattcagatcagggcatctgatgctgactcaggaaccaacggccaagttatgtatagcctggatcagtcacaaagtgtggaagtcattgaatcctttgccattaacatggaaacaggctggattacaactttaaaggaacttgaccatgaaaagagagacaattaccagattaaagtggttgcatcagatcatggtgaaaagatccagctatcctccacagccattgtggatgttaccgtcaccgatgtcaacgatagtccaccacgattcacggccgagatctataaagggactgtgagtgaggatgacccccaaggtggggtgattgccatcttaagtaccacggatgctgattctgaagagatcaacagacaagttacatatttcataacaggaggggatcctttaggacagtttgccgttgaaactatacagaatgaatggaaggtatatgtgaagaaacctctagacagggaaaaaagggacaattaccttcttactatcacggcaactgatggcaccttctcatcaaaagcgatagttgaagtgaaagttctggatgcaaatgacaacagtccagtttgtgaaaagactttatattcagacactattcctgaagacgtccttcctggaaaattgatcatgcagatctctgctacagacgcagacatccgctctaacgctgaaattacttacacgttattgggttcaggtgcagaaaaattcaaactaaatccagacacaggtgaactgaaaacgtcaaccccccttgatcgtgaggagcaagctgtttatcatcttctcgtcagggccacagatggaggaggaagattctgccaagccagtattgtgctcacgctagaagatgtgaacgataacgcccccgaattctctgccgatccttatgccatcaccgtgtttgaaaacacagagccgggaacgctgctgacaagagtgcaggccacagatgccgacgcaggattaaatcggaagattttatactcactgattgactctgctgatgggcagttctccattaacgaattatctggaattattcagttagaaaaacctttggacagagaactccaggcagtatacaccctctctttgaaagctgtggatcaaggcttgccaaggaggctgactgccactggcactgtgattgtatcagttcttgacataaatgacaacccccctgtgtttgagtaccgtgaatatggtgccaccgtgtctgaggacattcttgttggaactgaagttcttcaagtgtatgcagcaagtcgggatattgaagcaaatgcagaaatcacctactcaataataagtggaaatgaacatgggaaattcagcatagattctaaaacaggggccgtatttatcattgagaatctggattatgagagctctcatgagtattacctaacagtagaggccactgatggaggcacgccttcactgagcgacgttgccactgtgaacgttaatgtaacagatatcaacgataatacccctgtgttcagccaagacacctacacgacagtcatcagtgaagatgccgttcttgagcagtctgtcatcacggttatggccgatgatgccgatggaccttccaacagccacatccactactcaattatagatggcaaccaaggaagctcgttcacaattgaccccgtcaggggagaagtcaaagtgaccaaacttctcgaccgagaaacgatttcaggttacacgctcacggttcaagcttctgataatggcagtccacccagagtcaacacgacgaccgtgaacatcgatgtgtccgatgtcaatgacaacgcgcccgtcttctccaggggaaactacagtgtcattatccaggaaaataagccagtgggcttcagcgtgctgcagctggtagtaacagatgaggattcttcccataacggtccacccttcttctttactattgtaactggaaatgatgagaaggcttttgaagttaacccgcaaggagtcctcctgacatcatctgccatcaagaggaaggagaaagatcattacttactgcaggtgaaggtggcagataatggaaagcctcagttgtcatctttgacatacattgacattagggtaattgaggagagcatctatccgcctgcgattttgcccctggagattttcatcacctcttctggagaagaatactcaggtggcgtcattgggaagatccatgccacagaccaggacgtgtatgatactctaacctacagtctcgaccctcagatggacaacctgttctctgtttccagcacagggggcaagctgatagcacacaaaaagctagacatagggcaataccttctcaatgtcagcgtaacagatgggaagttcacgacggtggccgacatcacagtgcatatcagacaagtcacacaggagatgttgaaccacaccatcgcgatccgctttgccaacctcactccggaagaattcgttggtgactactggcgcaacttccagcgagctttacggaacatcctgggtgtgaggaggaacgacatacagattgttagtttgcagtcctctgaacctcacccacatctggacgtcttactttttgtagagaaaccaggtagtgctcagatctcaacaaaacaacttctgcacaagattaactcttccgtgactgacattgaggaaatcattggagttaggatactgaatgtattccagaaactctgcgcgggactggactgcccctggaagttctgcgatgaaaaggtgtctgtggatgaaagtgtgatgtcaacacacagcacagccagactgagttttgtgactccccgccaccacagggcagcggtgtgtctctgcaaagagggaaggtgcccacctgtccaccatggctgtgaagatgatccgtgccctgagggatccgaatgtgtgtctgatccctgggaggagaaacacacctgtgtctgtcccagcggcaggtttggtcagtgcccagggagttcatctatgacactgactggaaacagctacgtgaaataccgtctgacggaaaatgaaaacaaattagagatgaaactgaccatgaggctcagaacatattccacgcatgcggttgtcatgtatgctcgaggaactgactatagcatcttggagattcatcatggaaggctgcagtacaagtttgactgtggaagtggccctggaattgtctctgttcagagcattcaggtcaatgatgggcagtggcacgcagtggccctggaagtgaatggaaactatgctcgcttggttctagaccaagttcatactgcatcgggcacagccccagggactctgaaaaccctgaacctggataactatgtgttttttggtggccacatccgtcagcagggaacaaggcatggaagaagtcctcaagttggtaatggtttcaggggttgtatggactccatttatttgaatgggcaggagctccctttaaacagcaaacccagaagctatgcacacatcgaagagtcggtggatgtatctccaggctgcttcctgacggccacggaagactgcgccagcaacccttgccagaatggaggcgtttgcaatccgtcacctgctggaggttattactgcaaatgcagtgccttgtacatagggacccactgtgagataagcgtcaatccgtgttcctccaagccatgcctctatgggggcacgtgtgttgtcgacaacggaggctttgtttgccagtgtagaggattatatactggtcagaggtgtcagcttagtccatactgcaaagatgaaccctgtaagaatggcggaacatgctttgacagtttggatggcgccgtttgtcagtgtgattcgggttttaggggagaaaggtgtcagagtgatatcgacgagtgctctggaaacccttgcctgcacggggccctctgtgagaacacgcacggctcctatcactgcaactgcagccacgagtacaggggacgtcactgcgaggatgctgcgcccaaccagtatgtgtccacgccgtggaacattgggttggcggaaggaattggaatcgttgtgtttgttgcagggatatttttactggtggtggtgtttgttctctgccgtaagatgattagtcggaaaaagaagcatcaggctgaacctaaagacaagcacctgggacccgctacggctttcttgcaaagaccgtattttgattccaagctaaataagaacatttactcagacataccaccccaggtgcctgtccggcctatttcctacaccccgagtattccaagtgactcaagaaacaatctggaccgaaattccttcgaaggatctgctatcccagagcatcccgaattcagcacttttaaccccgagtctgtgcacgggcaccgaaaagcagtggcggtctgcagcgtggcgccaaacctgcctcccccacccccttcaaactccccttctgacagcgactccatccagaagcctagctgggactttgactatgacacaaaagtggtggatcttgatccctgtctttccaagaagcctctagaggaaaagccttcccagccatacagtgcccgggaaagcctgtctgaagtgcagtctctgagctccttccagtccgaatcgtgcgatgacaatgggtatcactgggatacatcagattggatgccaagcgttcctctgccggacatacaagagttccccaactatgaggtgattgatgagcagacacccctgtactcagcagatccaaacgccatcgatacggactattaccctggaggctacgacatcgaaagtgattttcctccacccccagaagacttccccgcagctgatgagctaccaccgttaccgcccgaattcagcaatcagtttgaatccatccaccctcctagagacatgcctgccgcgggtagcttgggttcttcatcaagaaaccggcagaggttcaacttgaatcagtatttgcccaatttttatcccctcgatatgtctgaacctcaaacaaaaggcactggtgagaatagtacttgtagagaaccccatgccccttacccgccagggtatcaaagacacttcgaggcgcccgctgtcgagagcatgcccatgtctgtgtacgcctccaccgcctcctgctctgacgtgtcagcctgctgcgaagtggagtccgaggtcatgatgagtgactatgagagcggggacgacggccacttcgaagaggtgacgatcccgcccctggattcccagcagcacacggaagtctgactctcaactccccccaaagtgcctgactttagtgaacctagaggtgatgtgagtaatccgcgctgttctttgcagcagtgcttccaagctttttttggtgagccgaatgggcatggctgcgctggatcctgcgcctctggacgtgctagccatttccagtgtcccaactactgtcatcgtgaggttttcatcggctgtgccatttcccaacgtcttttgggatttacatctgtctgtgttaaaataatcaaacgaaaaatcagtcctgtgttgtcagcatgattcatgtatttatatagatttgattattttaattttcctgtctcttttttttgtaaattttatgtacagatttgatttttcatagttttaactagatttccaagatattttgtgcatttgtttcaactgaattttggtggtgtcagtgccattatctagcaccctgatttttttttttttactataaccagggtttcattctgtctttttccactgaagtgtgacattttgttagtacatttcagtgtagtcattcatttctagctgtacataggatgaaggagagatcagatacatgaacatgtcttacatgggttgctgtatttagaattataaacatttttcattattggaaagtgtaacggggaccttctgcatacctgtttagaaccaaaaccaccatgacacagtttttatagtgtctgtatatttgtgatgcaatggtcttgtaaaggtttttaatgaaaactaccattagccagtctttcttactgacaataaattattaataaaatacttgagcttta

SEQ ID NO: 1650 - DNA, 1852 bp, Homo sapiens
  source 1..1852: mol_type = genomic DNA
aagggggagggagtggggaaagaggcagcgagtcgccgcagccggcggccgcaactcctcaactcggcggctggctgcctgggcacgtcctgacaaacttggctgctcccgggccctcgttccggccccgcgcactctcttttcgcctgcgtttggtgcttaagtttgccctggtcggaagcctccggagatgcggccgcctgggtcccggcggcacggacgttggcactctggttagggacatgctgaagatcccggggaggcaaagttggtacttcaaacccggctcttaacacatatctacaccgcgaggggatcacggagctgccgaggactttagagcccagggccgaggactcggctagactgattcccgacagttaagcaatggggagacatttggctttgctcctgcttctgctccttctcttccaacattttggagacagtgatggcagccaacgacttgaacagactcctctgcagtttacacacctcgagtacaacgtcaccgtgcaggagaactctgcagctaagacttatgtggggcatcctgtcaagatgggtgtttacattacacatccagcgtgggaagtaaggtacaaaattgtttccggagacagtgaaaacctgttcaaagctgaagagtacattctcggagacttttgctttctaagaataaggaccaaaggaggaaatacagctattcttaatagagaagtgaaggatcactacacattgatagtgaaagcacttgaaaaaaatactaatgtggaggcgcgaacaaaggtcagggtgcaggtgctggatacaaatgacttgagaccgttattctcacccacctcatacagcgtttctttacctgaaaacacagctataaggaccagtatcgcaagagtcagcgccacggatgcagacataggaaccaacggggaattttactacagttttaaagatcgaacagatatgtttgctattcacccaaccagtggtgtgatagtgttaactggtagacttgattacctagagaccaagctctatgagatggaaatcctcgctgcggaccgtggcatgaagttgtatgggagcagtggcatcagcagcatggccaagctaacggtgcacatcgaacaggccaatgaatgtgctccggtgataacagcagtgacattgtcaccatcagaactggacagggacccagcatatgcaattgtgacagtggatgactgcgatcagggtgccaatggtgacatagcatctttaagcatcgtggcaggtgaccttctccagcagtttagaacagtgaggtcctttccagggagtaaggagtataaagtcaaagccatcggtggcattgattgggacagtcatcctttcggctacaatctcacactacaggctaaagataaaggaactccgccccagttctcttctgttaaagtcattcacgtgacttctccacagttcaaagccgggccagtcaagtttgaaaaggatgtttacagagcagaaataagtgaatttgctcctcccaacacacctgtggtcatggtaaaggccattcctgcttattcccatttgaggtatgtttttaaaagtacacctggaaaagctaaattcagtttaaattacaacactggtctcatttctattttagaaccagttaaaagacagcaggcagcccattttgaacttgaagtaacaacaagtgacagaaaagcgtccaccaaggtcttggtgaaagtcttaggtgcaaatagcaatccccctgaatttacccagacagcgtacaaagctgcttttgatgagaacgtgcccattggtactactgtcatgagcctgagtgccgtag

SEQ ID NO: 1651 - DNA, 941 bp, Homo sapiens
  source 1..941: mol_type = genomic DNA
aaaaggaagttatctggactcaagagggtcacagcaccctcctgaaaactgcagcttccttctcaccttgaagaataatcctagaaaactcacaaaatgtgtgatgcttttgtaggtacctggaaacttgtctccagtgaaaactttgatgattatatgaaagaagtaggagtgggctttgccaccaggaaagtggctggcatggccaaacctaacatgatcatcagtgtgaatggggatgtgatcaccattaaatctgaaagtacctttaaaaatactgagatttccttcatactgggccaggaatttgacgaagtcactgcagatgacaggaaagtcaagagcaccataaccttagatgggggtgtcctggtacatgtgcagaaatgggatggaaaatcaaccaccataaagagaaaacgagaggatgataaactggtggtggaatgcgtcatgaaaggcgtcacttccacgagagtttatgagagagcataagccaagggacgttgacctggactgaagttcgcattgaactctacaacattctgtgggatatattgttcaaaaagatattgttgttttccatgatttagcaagcaactaattttctcccaagctgattttattcaatatggttacgttggttaaataaactttttttagatttagaaggtgatgtaatgatgtattcattgtgcttatgatgtattcttagtcataactgagtgaaggaaatgggaaatttgcattatttctttgttctgatatgaataataacatatttcataataattcaaggtaaaaagggatatctatggatttccctaggtaggagataacaagtatgtaccattactgaatattaaatccttctttaccatagctacagttaagtaggtgtatctcagaaacctaaggtagttttaaatgtagtgaaattg

SEQ ID NO: 1652 - DNA, 8457 bp, Homo sapiens
  source 1..8457: mol_type = genomic DNA
gagagacggcagcggccccggcctccctctccgccgcgcttcagcctcccgctccgccgcgctccagcctcgctctccgccgcccgcaccgccgcccgcgccctcaccagagcagccatggaggaggtggtgattgccggcatgtccgggaagctgccagagtcggagaacttgcaggagttctgggacaacctcatcggcggtgtggacatggtcacggacgatgaccgtcgctggaaggcggggctctacggcctgccccggcggtccggcaagctgaaggacctgtctaggtttgatgcctccttcttcggagtccaccccaagcaggcacacacgatggaccctcagctgcggctgctgctggaagtcacctatgaagccatcgtggacggaggcatcaacccagattcactccgaggaacacacactggcgtctgggtgggcgtgagcggctctgagacctcggaggccctgagccgagaccccgagacactcgtgggctacagcatggtgggctgccagcgagcgatgatggccaaccggctctccttcttcttcgacttcagagggcccagcatcgcactggacacagcctgctcctccagcctgatggccctgcagaacgcctaccaggccatccacagcgggcagtgccctgccgccatcgtggggggcatcaatgtcctgctgaagcccaacacctccgtgcagttcttgaggctggggatgctcagccccgagggcacctgcaaggccttcgacacagcggggaatgggtactgccgctcggagggtgtggtggccgtcctgctgaccaagaagtccctggcccggcgggtgtacgccaccatcctgaacgccggcaccaatacagatggcttcaaggagcaaggcgtgaccttcccctcaggggatatccaggagcagctcatccgctcgttgtaccagtcggccggagtggcccctgagtcatttgaatacatcgaagcccacggcacaggcaccaaggtgggcgacccccaggagctgaatggcatcacccgagccctgtgcgccacccgccaggagccgctgctcatcggctccaccaagtccaacatggggcacccggagccagcctcggggctggcagccctggccaaggtgctgctgtccctggagcacgggctctgggcccccaacctgcacttccatagccccaaccctgagatcccagcgctgttggatgggcggctgcaggtggtggaccagcccctgcccgtccgtggcggcaacgtgggcatcaactcctttggcttcgggggctccaacgtgcacatcatcctgaggcccaacacgcagccgccccccgcacccgccccacatgccaccctgccccgtctgctgcgggccagcggacgcacccctgaggccgtgcagaagctgctggagcagggcctccggcacagccaggacctggctttcctgagcatgctgaacgacatcgcggctgtccccgccaccgccatgcccttccgtggctacgctgtgctgggtggtgagcgcggtggcccagaggtgcagcaggtgcccgctggcgagcgcccgctctggttcatctgctctgggatgggcacacagtggcgcgggatggggctgagcctcatgcgcctggaccgcttccgagattccatcctacgctccgatgaggctgtgaagccattcggcctgaaggtgtcacagctgctgctgagcacagacgagagcacctttgatgacatcgtccattcgtttgtgagcctgactgccatccagataggcctcatagacctgctgagctgcatggggctgaggccagatggcatcgtcggccactccctgggggaggtggcctgtggctacgccgacggctgcctgtcccaggaggaggccgtcctcgctgcctactggaggggacagtgcatcaaagaagcccatctcccgccgggcgccatggcagccgtgggcttgtcctgggaggagtgtaaacagcgctgccccccgggcgtggtgcccgcctgccacaactccaaggacacagtcaccatctcgggacctcaggccccggtgtttgagttcgtggagcagctgaggaaggagggtgtgtttgccaaggaggtgcggaccggcggtatggccttccactcctacttcatggaggccatcgcacccccactgctgcaggagctcaagaaggtgatccgggagccgaagccacgttcagcccgctggctcagcacctctatccccgaggcccagtggcacagcagcctggcacgcacgtcctccgccgagtacaatgtcaacaacctggtgagccctgtgctgttccaggaggccctgtggcacgtgcctgagcacgcggtggtgctggagatcgcgccccacgccctgctgcaggctgtcctgaagcgtggcctgaagccgagctgcaccatcatccccctgatgaagaaggatcacagggacaacctggagttcttcctggccggcatcggcaggctgcacctctcaggcatcgacgccaaccccaatgccttgttcccacctgtggagttcccagctccccgaggaactcccctcatctccccactcatcaagtgggaccacagcctggcctgggacgtgccggccgccgaggacttccccaacggttcaggttccccctcagccgccatctacaacatcgacaccagctccgagtctcctgaccactacctggtggaccacaccctcgacggtcgcgtcctcttccccgccactggctacctgagcatagtgtggaagacgctggcccgcgccctgggcctgggcgtcgagcagctgcctgtggtgtttgaggatgtggtgctgcaccaggccaccatcctgcccaagactgggacagtgtccctggaggtacggctcctggaggcctcccgtgccttcgaggtgtcagagaacggcaacctggtagtgagtgggaaggtgtaccagtgggatgaccctgaccccaggctcttcgaccacccggaaagccccacccccaaccccacggagcccctcttcctggcccaggctgaagtttacaaggagctgcgtctgcgtggctacgactacggccctcatttccagggcatcctggaggccagcctggaaggtgactcggggaggctgctgtggaaggataactgggtgagcttcatggacaccatgctgcagatgtccatcctgggctcggccaagcacggcctgtacctgcccacccgtgtcaccgccatccacatcgaccctgccacccacaggcagaagctgtacacactgcaggacaaggcccaagtggctgacgtggtggtgagcaggtggctgagggtcacagtggccggaggcgtccacatctccgggctccacactgagtcggccccgcggcggcagcaggagcagcaggtgcccatcctggagaagttttgcttcactccccacacggaggaggggtgcctgtctgagcgcgctgccctgcaggaggagctgcaactgtgcaaggggctggtgcaggcactgcagaccaaggtgacccagcaggggctgaagatggtggtgcccggactggatggggcccagatcccccgggacccctcacagcaggaactgccccggctgttgtcggctgcctgcaggcttcagctcaacgggaacctgcagctggagctggcgcaggtgctggcccaggagaggcccaagctgccagaggaccctctgctcagcggcctcctggactccccggcactcaaggcctgcctggacactgccgtggagaacatgcccagcctgaagatgaaggtggtggaggtgctggctggccacggtcacctgtattcccgcatcccaggcctgctcagcccccatcccctgctgcagctgagctacacggccaccgaccgccacccccaggccctggaggctgcccaggccgagctgcagcagcacgacgttgcccagggccagtgggatcccgcagaccctgcccccagcgccctgggcagcgccgacctcctggtgtgcaactgtgctgtggctgccctcggggacccggcctcagctctcagcaacatggtggctgccctgagagaagggggctttctgctcctgcacacactgctccgggggcaccccctcggggacatcgtggccttcctcacctccactgagccgcagtatggccagggcatcctgagccaggacgcgtgggagagcctcttctccagggtgtcgctgcgcctggtgggcctgaagaagtccttctacggctccacgctcttcctgtgccgccggcccaccccgcaggacagccccatcttcctgccggtggacgataccagcttccgctgggtggagtctctgaagggcatcctggctgacgaagactcttcccggcctgtgtggctgaaggccatcaactgtgccacctcgggcgtggtgggcttggtgaactgtctccgccgagagcccggcgggaaccgcctccggtgtgtgctgctctccaacctcagcagcacctcccacgtcccggaggtggacccgggctccgcagaactgcagaaggtgttgcagggagacctggtgatgaacgtctaccgcgacggggcctggggggctttccgccacttcctgctggaggaggacaagcctgaggagccgacggcacatgcctttgtgagcaccctcacccggggggacctgtcctccatccgctgggtctgctcctcgctgcgccatgcccagcccacctgccctggcgcccagctctgcacggtctactacgcctccctcaacttccgcgacatcatgctggccactggcaagctgtcccctgatgccatcccagggaagtggacctcccaggacagcctgctaggtatggagttctcgggccgagacgccagcggcaagcgtgtgatgggactggtgcctgccaagggcctggccacctctgtcctgctgtcaccggacttcctctgggatgtgccttccaactggacgctggaggaggcggcctcggtgcctgtcgtctacagcacggcctactacgcgctggtggtgcgtgggcgggtgcgccccggggagacgctgctcatccactcgggctcgggcggcgtgggccaggccgccatcgccatcgccctcagtctgggctgccgcgtcttcaccaccgtggggtcggctgagaagcgggcgtacctccaggccaggttcccccagctcgacagcaccagcttcgccaactcccgggacacatccttcgagcagcatgtgctgtggcacacgggcgggaagggcgttgacctggtcttgaactccttggcggaagagaagctgcaggccagcgtgaggtgcttggctacgcacggtcgcttcctggaaattggcaaattcgacctttctcagaaccacccgctcggcatggctatcttcctgaagaacgtgacattccacggggtcctactggatgcgttcttcaacgagagcagtgctgactggcgggaggtgtgggcgcttgtgcaggccggcatccgggatggggtggtacggcccctcaagtgcacggtgttccatggggcccaggtggaggacgccttccgctacatggcccaagggaagcacattggcaaagtcgtcgtgcaggtgcttgcggaggagccggaggcagtgctgaagggggccaaacccaagctgatgtcggccatctccaagaccttctgcccggcccacaagagctacatcatcgctggtggtctgggtggcttcggcctggagttggcgcagtggctgatacagcgtggggtgcagaagctcgtgttgacttctcgctccgggatccggacaggctaccaggccaagcaggtccgccggtggaggcgccagggcgtacaggtgcaggtgtccaccagcaacatcagctcactggagggggcccggggcctcattgccgaggcggcgcagcttgggcccgtgggcggcgtcttcaacctggccgtggtcttgagagatggcttgctggagaaccagaccccagagttcttccaggacgtctgcaagcccaagtacagcggcaccctgaacctggacagggtgacccgagaggcgtgccctgagctggactactttgtggtcttctcctctgtgagctgcgggcgtggcaatgcgggacagagcaactacggctttgccaattccgccatggagcgtatctgtgagaaacgccggcacgaaggcctcccaggcctggccgtgcagtggggcgccatcggcgacgtgggcattttggtggagacgatgagcaccaacgacacgatcgtcagtggcacgctgccccagcgcatggcgtcctgcctggaggtgctggacctcttcctgaaccagccccacatggtcctgagcagctttgtgctggctgagaaggctgcggcctatagggacagggacagccagcgggacctggtggaggccgtggcacacatcctgggcatccgcgacttggctgctgtcaacctggacagctcactggcggacctgggcctggactcgctcatgagcgtggaggtgcgccagacgctggagcgtgagctcaacctggtgctgtccgtgcgcgaggtgcggcaactcacgctccggaaactgcaggagctgtcctcaaaggcggatgaggccagcgagctggcatgccccacgcccaaggaggatggtctggcccagcagcagactcagctgaacctgcgctccctgctggtgaacccggagggccccaccctgatgcggctcaactccgtgcagagctcggagcggcccctgttcctggtgcacccaatcgagggctccaccaccgtgttccacagcctggcctcccggctcagcatccccacctatggcctgcagtgcacccgagctgcgccccttgacagcatccacagcctggctgcctactacatcgactgcatcaggcaggtgcagcccgagggcccctaccgcgtggccggctactcctacggggcctgcgtggcctttgaaatgtgctcccagctgcaggcccagcagagcccagcccccacccacaacagcctcttcctgttcgacggctcgcccacctacgtactggcctacacccagagctaccgggcaaagctgaccccaggctgtgaggctgaggctgagacggaggccatatgcttcttcgtgcagcagttcacggacatggagcacaacagggtgctggaggcgctgctgccgctgaagggcctagaggagcgtgtggcagccgccgtggacctgatcatcaagagccaccagggcctggaccgccaggagctgagctttgcggcccggtccttctactacaagctgcgtgccgctgagcagtacacacccaaggccaagtaccatggcaacgtgatgctactgcgcgccaagacgggtggcgcctacggcgaggacctgggcgcggactacaacctctcccaggtatgcgacgggaaagtatccgtccacgtcatcgagggtgaccaccgcacgctgctggagggcagcggcctggagtccatcatcagcatcatccacagctccctggctgagccacgcgtgagcgtgcgggagggctaggcccgtgcccccgcctgccaccggaggtcactccaccatccccaccccaccccaccccacccccgccatgcaacgggattgaagggtcctgccggtgggaccctgtccggcccagtgccactgccccccgaggctgctagatgtaggtgttaggcatgtcccacccacccgccgcctcccacggcacctcggggacaccagagctgccgacttggagactcctggtctgtgaagagccggtggtgcccgtgcccgcaggaactgggctgggcctcgtgcgcccgtggggtctgcgcttggtctttctgtgcttggatttgcatatttattgcattgctggtagagacccccaggcctgtccaccctgccaagactcctcaggcagcgtgtgggtcccgcactctgcccccatttccccgatgtcccctgcgggcgcgggcagccacccaagcctgctggctgcggccccctctcggccaggcattggctcagcccgctgagtggggggtcgtgggccagtccccgaggagctgggcccctgcacaggcacacagggcccggccacacccagcggccccccgcacagccacccgtggggtgctgcccttatgcccggcgccgggcaccaactccatgtttggtgtttgtctgtgtttgtttttcaagaaatgattcaaattgctgcttggattttgaaatttactgtaactgtcagtgtacacgtctggaccccgtttcatttttacaccaatttggtaaaaatgctgctctcagcctcccacaattaaaccgcatgtgatctcc

SEQ ID NO: 1653 - DNA, 7844 bp, Homo sapiens
  source 1..7844: mol_type = genomic DNA
gagagacggcagcggccccggcctccctctccgccgcgcttcagcctcccgctccgccgcgctccagcctcgctctccgccgcccgcaccgccgcccgcgccctcaccagagcagccatggaggaggtggtgattgccggcatgtccgggaagctgccagagtcggagaacttgcaggagttctgggacaacctcatcggcggtgtggacatggtcacggacgatgaccgtcgctggaaggcggggctctacggcctgccccggcggtccggcaagctgaaggacctgtctaggtttgatgcctccttcttcggagtccaccccaagcaggcacacacgatggaccctcagctgcggctgctgctggaagtcacctatgaagccatcgtggacggaggcatcaacccagattcactccgaggaacacacactggcgtctgggtgggcgtgagcggctctgagacctcggaggccctgagccgagaccccgagacactcgtgggctacagcatggtgggctgccagcgagcgatgatggccaaccggctctccttcttcttcgacttcagagggcccagcatcgcactggacacagcctgctcctccagcctgatggccctgcagaacgcctaccaggccatccacagcgggcagtgccctgccgccatcgtggggggcatcaatgtcctgctgaagcccaacacctccgtgcagttcttgaggctggggatgctcagccccgagggcacctgcaaggccttcgacacagcggggaatgggtactgccgctcggagggtgtggtggccgtcctgctgaccaagaagtccctggcccggcgggtgtacgccaccatcctgaacgccggcaccaatacagatggcttcaaggagcaaggcgtgaccttcccctcaggggatatccaggagcagctcatccgctcgttgtaccagtcggccggagtggcccctgagtcatttgaatacatcgaagcccacggcacaggcaccaaggtgggcgacccccaggagctgaatggcatcacccgagccctgtgcgccacccgccaggagccgctgctcatcggctccaccaagtccaacatggggcacccggagccagcctcggggctggcagccctggccaaggtgctgctgtccctggagcacgggctctgggcccccaacctgcacttccatagccccaaccctgagatcccagcgctgttggatgggcggctgcaggtggtggaccagcccctgcccgtccgtggcggcaacgtgggcatcaactcctttggcttcgggggctccaacgtgcacatcatcctgaggcccaacacgcagccgccccccgcacccgccccacatgccaccctgccccgtctgctgcgggccagcggacgcacccctgaggccgtgcagaagctgctggagcagggcctccggcacagccaggacctggctttcctgagcatgctgaacgacatcgcggctgtccccgccaccgccatgcccttccgtggctacgctgtgctgggtggtgagcgcggtggcccagaggtgcagcaggtgcccgctggcgagcgcccgctctggttcatctgctctgggatgggcacacagtggcgcgggatggggctgagcctcatgcgcctggaccgcttccgagattccatcctacgctccgatgaggctgtgaagccattcggcctgaaggtgtcacagctgctgctgagcacagacgagagcacctttgatgacatcgtccattcgtttgtgagcctgactgccatccagataggcctcatagacctgctgagctgcatggggctgaggccagatggcatcgtcggccactccctgggggaggtggcctgtggctacgccgacggctgcctgtcccaggaggaggccgtcctcgctgcctactggaggggacagtgcatcaaagaagcccatctcccgccgggcgccatggcagccgtgggcttgtcctgggaggagtgtaaacagcgctgccccccgggcgtggtgcccgcctgccacaactccaaggacacagtcaccatctcgggacctcaggccccggtgtttgagttcgtggagcagctgaggaaggagggtgtgtttgccaaggaggtgcggaccggcggtatggccttccactcctacttcatggaggccatcgcacccccactgctgcaggagctcaagaaggtgatccgggagccgaagccacgttcagcccgctggctcagcacctctatccccgaggcccagtggcacagcagcctggcacgcacgtcctccgccgagtacaatgtcaacaacctggtgagccctgtgctgttccaggaggccctgtggcacgtgcctgagcacgcggtggtgctggagatcgcgccccacgccctgctgcaggctgtcctgaagcgtggcctgaagccgagctgcaccatcatccccctgatgaagaaggatcacagggacaacctggagttcttcctggccggcatcggcaggctgcacctctcaggcatcgacgccaaccccaatgccttgttcccacctgtggagttcccagctccccgaggaactcccctcatctccccactcatcaagtgggaccacagcctggcctgggacgtgccggccgccgaggacttccccaacggttcaggttccccctcagccgccatctacaacatcgacaccagctccgagtctcctgaccactacctggtggaccacaccctcgacggtcgcgtcctcttccccgccactggctacctgagcatagtgtggaagacgctggcccgcgccctgggcctgggcgtcgagcagctgcctgtggtgtttgaggatgtggtgctgcaccaggccaccatcctgcccaagactgggacagtgtccctggaggtacggctcctggaggcctcccgtgccttcgaggtgtcagagaacggcaacctggtagtgagtgggaaggtgtaccagtgggatgaccctgaccccaggctcttcgaccacccggaaagccccacccccaaccccacggagcccctcttcctggcccaggctgaagtttacaaggagctgcgtctgcgtggctacgactacggccctcatttccagggcatcctggaggccagcctggaaggtgactcggggaggctgctgtggaaggataactgggtgagcttcatggacaccatgctgcagatgtccatcctgggctcggccaagcacggcctgtacctgcccacccgtgtcaccgccatccacatcgaccctgccacccacaggcagaagctgtacacactgcaggacaaggcccaagtggctgacgtggtggtgagcaggtggctgagggtcacagtggccggaggcgtccacatctccgggctccacactgagtcggccccgcggcggcagcaggagcagcaggtgcccatcctggagaagttttgcttcactccccacacggaggaggggtgcctgtctgagcgcgctgccctgcaggaggagctgcaactgtgcaaggggctggtgcaggcactgcagaccaaggtgacccagcaggggctgaagatggtggtgcccggactggatggggcccagatcccccgggacccctcacagcaggaactgccccggctgttgtcggctgcctgcaggcttcagctcaacgggaacctgcagctggagctggcgcaggtgctggcccaggagaggcccaagctgccagaggaccctctgctcagcggcctcctggactccccggcactcaaggcctgcctggacactgccgtggagaacatgcccagcctgaagatgaaggtggtggaggtgctggctggccacggtcacctgtattcccgcatcccaggcctgctcagcccccatcccctgctgcagctgagctacacggccaccgaccgccacccccaggccctggaggctgcccaggccgagctgcagcagcacgacgttgcccagggccagtgggatcccgcagaccctgcccccagcgccctgggcagcgccgacctcctggtgtgcaactgtgctgtggctgccctcggggacccggcctcagctctcagcaacatggtggctgccctgagagaagggggctttctgctcctgcacacactgctccgggggcaccccctcggggacatcgtggccttcctcacctccactgagccgcagtatggccagggcatcctgagccaggacgcgtgggagagcctcttctccagggtgtcgctgcgcctggtgggcctgaagaagtccttctacggctccacgctcttcctgtgccgccggcccaccccgcaggacagccccatcttcctgccggtggacgataccagcttccgctgggtggagtctctgaagggcatcctggctgacgaagactcttcccggcctgtgtggctgaaggccatcaactgtgccacctcgggcgtggtgggcttggtgaactgtctccgccgagagcccggcgggaaccgcctccggtgtgtgctgctctccaacctcagcagcacctcccacgtcccggaggtggacccgggctccgcagaactgcagaaggtgttgcagggagacctggtgatgaacgtctaccgcgacggggcctggggggctttccgccacttcctgctggaggaggacaagcctgaggagccgacggcacatgcctttgtgagcaccctcacccggggggacctgtcctccatccgctgggtctgctcctcgctgcgccatgcccagcccacctgccctggcgcccagctctgcacggtctactacgcctccctcaacttccgcgacatcatgctggccactggcaagctgtcccctgatgccatcccagggaagtggacctcccaggacagcctgctaggtatggagttctcgggccgagacgccagcggcaagcgtgtgatgggactggtgcctgccaagggcctggccacctctgtcctgctgtcaccggacttcctctgggatgtgccttccaactggacgctggaggaggcggcctcggtgcctgtcgtctacagcacggcctactacgcgctggtggtgcgtgggcgggtgcgccccggggagacgctgctcatccactcgggctcgggcggcgtgggccaggccgccatcgccatcgccctcagtctgggctgccgcgtcttcaccaccgtggggtcggctgagaagcgggcgtacctccaggccaggttcccccagctcgacagcaccagcttcgccaactcccgggacacatccttcgagcagcatgtgctgtggcacacgggcgggaagggcgttgacctggtcttgaactccttggcggaagagaagctgcaggccagcgtgaggtgcttggctacgcacggtcgcttcctggaaattggcaaattcgacctttctcagaaccacccgctcggcatggctatcttcctgaagaacgtgacattccacggggtcctactggatgcgttcttcaacgagagcagtgctgactggcgggaggtgtgggcgcttgtgcaggccggcatccgggatggggtggtacggcccctcaagtgcacggtgttccatggggcccaggtggaggacgccttccgctacatggcccaagcgaaggcctcccaggcctggccgtgcagtggggcgccatcggcgacgtgggcattttggtggagacgatgagcaccaacgacacgatcgtcagtggcacgctgccccagcgcatggcgtcctgcctggaggtgctggacctcttcctgaaccagccccacatggtcctgagcagctttgtgctggctgagaaggctgcggcctatagggacagggacagccagcgggacctggtggaggccgtggcacacatcctgggcatccgcgacttggctgctgtcaacctggacagctcactggcggacctgggcctggactcgctcatgagcgtggaggtgcgccagacgctggagcgtgagctcaacctggtgctgtccgtgcgcgaggtgcggcaactcacgctccggaaactgcaggagctgtcctcaaaggcggatgaggccagcgagctggcatgccccacgcccaaggaggatggtctggcccagcagcagactcagctgaacctgcgctccctgctggtgaacccggagggccccaccctgatgcggctcaactccgtgcagagctcggagcggcccctgttcctggtgcacccaatcgagggctccaccaccgtgttccacagcctggcctcccggctcagcatccccacctatggcctgcagtgcacccgagctgcgccccttgacagcatccacagcctggctgcctactacatcgactgcatcaggcaggtgcagcccgagggcccctaccgcgtggccggctactcctacggggcctgcgtggcctttgaaatgtgctcccagctgcaggcccagcagagcccagcccccacccacaacagcctcttcctgttcgacggctcgcccacctacgtactggcctacacccagagctaccgggcaaagctgaccccaggctgtgaggctgaggctgagacggaggccatatgcttcttcgtgcagcagttcacggacatggagcacaacagggtgctggaggcgctgctgccgctgaagggcctagaggagcgtgtggcagccgccgtggacctgatcatcaagagccaccagggcctggaccgccaggagctgagctttgcggcccggtccttctactacaagctgcgtgccgctgagcagtacacacccaaggccaagtaccatggcaacgtgatgctactgcgcgccaagacgggtggcgcctacggcgaggacctgggcgcggactacaacctctcccaggtatgcgacgggaaagtatccgtccacgtcatcgagggtgaccaccgcacgctgctggagggcagcggcctggagtccatcatcagcatcatccacagctccctggctgagccacgcgtgagcgtgcgggagggctaggcccgtgcccccgcctgccaccggaggtcactccaccatccccaccccaccccaccccacccccgccatgcaacgggattgaagggtcctgccggtgggaccctgtccggcccagtgccactgccccccgaggctgctagatgtaggtgttaggcatgtcccacccacccgccgcctcccacggcacctcggggacaccagagctgccgacttggagactcctggtctgtgaagagccggtggtgcccgtgcccgcaggaactgggctgggcctcgtgcgcccgtggggtctgcgcttggtctttctgtgcttggatttgcatatttattgcattgctggtagagacccccaggcctgtccaccctgccaagactcctcaggcagcgtgtgggtcccgcactctgcccccatttccccgatgtcccctgcgggcgcgggcagccacccaagcctgctggctgcggccccctctcggccaggcattggctcagcccgctgagtggggggtcgtgggccagtccccgaggagctgggcccctgcacaggcacacagggcccggccacacccagcggccccccgcacagccacccgtggggtgctgcccttatgcccggcgccgggcaccaactccatgtttggtgtttgtctgtgtttgtttttcaagaaatgattcaaattgctgcttggattttgaaatttactgtaactgtcagtgtacacgtctggaccccgtttcatttttacaccaatttggtaaaaatgctgctctcagcctcccacaattaaaccgcatgtgatctcc

SEQ ID NO: 1654 - DNA, 2158 bp, Homo sapiens
  source 1..2158: mol_type = genomic DNA
actcattcataaaacgcttgttataaaagcagtggctgcggcgcctcgtactccaaccgcatctgcagcgagcatctgagaagccaagactgagccggcggccgcggcgcagcgaacgagcagtgaccgtgctcctacccagctctgctccacagcgcccacctgtctccgcccctcggcccctcgcccggctttgcctaaccgccacgatgatgttctcgggcttcaacgcagactacgaggcgtcatcctcccgctgcagcagcgcgtccccggccggggatagcctctcttactaccactcacccgcagactccttctccagcatgggctcgcctgtcaacgcgcaggacttctgcacggacctggccgtctccagtgccaacttcattcccacggtcactgccatctcgaccagtccggacctgcagtggctggtgcagcccgccctcgtctcctccgtggccccatcgcagaccagagcccctcaccctttcggagtccccgccccctccgctggggcttactccagggctggcgttgtgaagaccatgacaggaggccgagcgcagagcattggcaggaggggcaaggtggaacagttatctccagaagaagaagagaaaaggagaatccgaagggaaaggaataagatggctgcagccaaatgccgcaaccggaggagggagctgactgatacactccaagcggagacagaccaactagaagatgagaagtctgctttgcagaccgagattgccaacctgctgaaggagaaggaaaaactagagttcatcctggcagctcaccgacctgcctgcaagatccctgatgacctgggcttcccagaagagatgtctgtggcttcccttgatctgactgggggcctgccagaggttgccaccccggagtctgaggaggccttcaccctgcctctcctcaatgaccctgagcccaagccctcagtggaacctgtcaagagcatcagcagcatggagctgaagaccgagccctttgatgacttcctgttcccagcatcatccaggcccagtggctctgagacagcccgctccgtgccagacatggacctatctgggtccttctatgcagcagactgggagcctctgcacagtggctccctggggatggggcccatggccacagagctggagcccctgtgcactccggtggtcacctgtactcccagctgcactgcttacacgtcttccttcgtcttcacctaccccgaggctgactccttccccagctgtgcagctgcccaccgcaagggcagcagcagcaatgagccttcctctgactcgctcagctcacccacgctgctggccctgtgagggggcagggaaggggaggcagccggcacccacaagtgccactgcccgagctggtgcattacagagaggagaaacacatcttccctagagggttcctgtagacctagggaggaccttatctgtgcgtgaaacacaccaggctgtgggcctcaaggacttgaaagcatccatgtgtggactcaagtccttacctcttccggagatgtagcaaaacgcatggagtgtgtattgttcccagtgacacttcagagagctggtagttagtagcatgttgagccaggcctgggtctgtgtctcttttctctttctccttagtcttctcatagcattaactaatctattgggttcattattggaattaacctggtgctggatattttcaaattgtatctagtgcagctgattttaacaataactactgtgttcctggcaatagtgtgttctgattagaaatgaccaatattatactaagaaaagatacgactttattttctggtagatagaaataaatagctatatccatgtactgtagtttttcttcaacatcaatgttcattgtaatgttactgatcatgcattgttgaggtggtctgaatgttctgacattaacagttttccatgaaaacgttttattgtgtttttaatttatttattaagatggattctcagatatttatatttttattttatttttttctaccttgaggtcttttgacatgtggaaagtgaatttgaatgaaaaatttaagcattgtttgcttattgttccaagacattgtcaataaaagcatttaagttgaatgcga

SEQ ID NO: 1655 - DNA, 1614 bp, Homo sapiens
  source 1..1614: mol_type = genomic DNA
agtggctctactttcagaagaaagtgtctctcttcctgcttaaacctctgtctctgacggtccctgccaatcgctctggtcgaccccaacacactaggaggacagacacaggctccaaactccactaaccagagctgtgattgtgcccgctgagtggactgcgttgtcagggagtgagtgctccatcatcgggagaatccaagcaggaccgccatggaggaaggtcaatattcagagatcgaggagcttcccaggaggcggtgttgcaggcgtgggactcagatcgtgctgctggggctggtgaccgccgctctgtgggctgggctgctgactctgcttctcctgtggcactgggacaccacacagagtctaaaacagctggaagagagggctgcccggaacgtctctcaagtttccaagaacttggaaagccaccacggtgaccagatggcgcagaaatcccagtccacgcagatttcacaggaactggaggaacttcgagctgaacagcagagattgaaatctcaggacttggagctgtcctggaacctgaacgggcttcaagcagatctgagcagcttcaagtcccaggaattgaacgagaggaacgaagcttcagatttgctggaaagactccgggaggaggtgacaaagctaaggatggagttgcaggtgtccagcggctttgtgtgcaacacgtgccctgaaaagtggatcaatttccaacggaagtgctactacttcggcaagggcaccaagcagtgggtccacgcccggtatgcctgtgacgacatggaagggcagctggtcagcatccacagcccggaggagcaggacttcctgaccaagcatgccagccacaccggctcctggattggccttcggaacttggacctgaagggggagtttatctgggtggatgggagccacgtggactacagcaactgggctccaggggagcccaccagccggagccagggcgaggactgcgtgatgatgcggggctccggtcgctggaacgacgccttctgcgaccgtaagctgggcgcctgggtgtgcgaccggctggccacatgcacgccgccagccagcgaaggttccgcggagtccatgggacctgattcaagaccagaccctgacggccgcctgcccaccccctctgcccctctccactcttgagcatggatacagccaggcccagagcaagaccctgaagacccccaaccacggcctaaaagcctctttgtggctgaaaggtccctgtgacattttctgccacccaaacggaggcagctgacacatctcccgctcctctatggcccctgccttcccaggagtacaccccaacagcaccctctccagatgggagtgcccccaacagcaccctctccagatgagagtacaccccaacagcaccctctccagatgagagtacaccccaacagcaccctctccagatgagagtacaccccaacagcaccctctccagatgcagccccatctcctcagcaccccaggacctgagtatccccagctcaggtggtgagtcctcctgtccagcctgcatcaataaaatggggcagtgatggcctcccacatttgtccccttcttgg

SEQ ID NO: 1656 - DNA, 1398 bp, Homo sapiens
  source 1..1398: mol_type = genomic DNA
atgaatcctccaagccaggagatcgaggagcttcccaggaggcggtgttgcaggcgtgggactcagatcgtgctgctggggctggtgaccgccgctctgtgggctgggctgctgactctgcttctcctgtggcactgggacaccacacagagtctaaaacagctggaagagagggctgcccggaacgtctctcaagtttccaagaacttggaaagccaccacggtgaccagatggcgcagaaatcccagtccacgcagatttcacaggaactggaggaacttcgagctgaacagcagagattgaaatctcaggacttggagctgtcctggaacctgaacgggcttcaagcagatctgagcagcttcaagtcccaggaattgaacgagaggaacgaagcttcagatttgctggaaagactccgggaggaggtgacaaagctaaggatggagttgcaggtgtccagcggctttgtgtgcaacacgtgccctgaaaagtggatcaatttccaacggaagtgctactacttcggcaagggcaccaagcagtgggtccacgcccggtatgcctgtgacgacatggaagggcagctggtcagcatccacagcccggaggagcaggacttcctgaccaagcatgccagccacaccggctcctggattggccttcggaacttggacctgaagggggagtttatctgggtggatgggagccacgtggactacagcaactgggctccaggggagcccaccagccggagccagggcgaggactgcgtgatgatgcggggctccggtcgctggaacgacgccttctgcgaccgtaagctgggcgcctgggtgtgcgaccggctggccacatgcacgccgccagccagcgaaggttccgcggagtccatgggacctgattcaagaccagaccctgacggccgcctgcccaccccctctgcccctctccactcttgagcatggatacagccaggcccagagcaagaccctgaagacccccaaccacggcctaaaagcctctttgtggctgaaaggtccctgtgacattttctgccacccaaacggaggcagctgacacatctcccgctcctctatggcccctgccttcccaggagtacaccccaacagcaccctctccagatgggagtgcccccaacagcaccctctccagatgagagtacaccccaacagcaccctctccagatgagagtacaccccaacagcaccctctccagatgagagtacaccccaacagcaccctctccagatgcagccccatctcctcagcaccccaggacctgagtatccccagctcaggtggtgagtcctcctgtccagcctgcatcaataaaatggggcagtgatggcctcccacatttgtccccttcttgg

SEQ ID NO: 1657 - DNA, 2180 bp, Homo sapiens
  source 1..2180: mol_type = genomic DNA
cttcaatatcttgcatgttacagatttcactgctcccaccagcttggagacaacatgtggttcttgacaactctgctcctttgggttccagttgatgggcaagtggacaccacaaaggcagtgatcactttgcagcctccatgggtcagcgtgttccaagaggaaaccgtaaccttgcactgtgaggtgctccatctgcctgggagcagctctacacagtggtttctcaatggcacagccactcagacctcgacccccagctacagaatcacctctgccagtgtcaatgacagtggtgaatacaggtgccagagaggtctctcagggcgaagtgaccccatacagctggaaatccacagaggctggctactactgcaggtctccagcagagtcttcacggaaggagaacctctggccttgaggtgtcatgcgtggaaggataagctggtgtacaatgtgctttactatcgaaatggcaaagcctttaagtttttccactggaattctaacctcaccattctgaaaaccaacataagtcacaatggcacctaccattgctcaggcatgggaaagcatcgctacacatcagcaggaatatctgtcactgtgaaagagctatttccagctccagtgctgaatgcatctgtgacatccccactcctggaggggaatctggtcaccctgagctgtgaaacaaagttgctcttgcagaggcctggtttgcagctttacttctccttctacatgggcagcaagaccctgcgaggcaggaacacatcctctgaataccaaatactaactgctagaagagaagactctgggttatactggtgcgaggctgccacagaggatggaaatgtccttaagcgcagccctgagttggagcttcaagtgcttggcctccagttaccaactcctgtctggtttcatgtccttttctatctggcagtgggaataatgtttttagtgaacactgttctctgggtgacaatacgtaaagaactgaaaagaaagaaaaagtgggatttagaaatctctttggattctggtcatgagaagaaggtaatttccagccttcaagaagacagacatttagaagaagagctgaaatgtcaggaacaaaaagaagaacagctgcaggaaggggtgcaccggaaggagccccagggggccacgtagcagcggctcagtgggtggccatcgatctggaccgtcccctgcccacttgctccccgtgagcactgcgtacaaacatccaaaagttcaacaacaccagaactgtgtgtctcatggtatgtaactcttaaagcaaataaatgaactgacttcaactgggatacatttggaaatgtggtcatcaaagatgacttgaaatgaggcctactctaaagaattcttgaaaaacttacaagtcaagcctagcctgataatcctattacatagtttgaaaaatagtattttatttctcagaacaaggtaaaaaggtgagtgggtgcatatgtacagaagattaagacagagaaacagacagaaagagacacacacacagccaggagtgggtagatttcagggagacaagagggaatagtatagacaataaggaaggaaatagtacttacaaatgactcctaagggactgtgagactgagagggctcacgcctctgtgttcaggatacttagttcatggcttttctctttgactttactaaaagagaatgtctccatacgcgttctaggcatacaagggggtaactcatgatgagaaatggatgtgttattcttgccctctcttttgaggctctctcataacccctctatttctagagacaacaaaaatgctgccagtcctaggcccctgccctgtaggaaggcagaatgtaactgttctgtttgtttaacgattaagtccaaatctccaagtgcggcactgcaaagagacgcttcaagtggggagaagcggcgataccatagagtccagatcttgcctccagagatttgctttaccttcctgattttctggttactaattagcttcaggatacgctgctctcatacttgggctgtagtttggagacaaaatattttcctgccactgtgtaacatagctgaggtaaaaactgaactatgtaaatgactctactaaaagtttagggaaaaaaaacaggaggagtatgacaca

SEQ ID NO: 1658 - DNA, 795 bp, Homo sapiens
  source 1..795: mol_type = genomic DNA
ggagccaccagcagaacctcttcaatatcttgcatgttacagatttcactgctcccaccagcttggagacaacatgtggttcttgacaactctgctcctttggggctggctactactgcaggtctccagcagagtcttcacggaaggagaacctctggccttgaggtgtcatgcgtggaaggataagctggtgtacaatgtgctttactatcgaaatggcaaagcctttaagtttttccactggaattctaacctcaccattctgaaaaccaacataagtcacaatggcacctaccattgctcaggcatgggaaagcatcgctacacatcagcaggaatatctgtcactgtgaaagagctatttccagctccagtgctgaatgcatctgtgacatccccactcctggaggggaatctggtcaccctgagctgtgaaacaaagttgctcttgcagaggcctggtttgcagctttacttctccttctacatgggcagcaagaccctgcgaggcaggaacacatcctctgaataccaaatactaactgctagaagagaagactctgggttatactggtgcgaggctgccacagaggatggaaatgtccttaagcgcagccctgagttggagcttcaagtgcttggcctccagttaccaactcctgtctggtttcatgtccttttctatctggcagtgggaataatgtttttagtgaacactgttctctgggtgacaatacgtaaagaactgaaaagaaagaaaaagtgggatttagaaatctctttggattctggtca

SEQ ID NO: 1659 - DNA, 2829 bp, Homo sapiens
  source 1..2829: mol_type = genomic DNA
cctccacaggcccgccccggggcctgggccaactgaaaccgcgggaggaggaagcgcggaatcaggaactggccggggtccgcaccgggcctgagtcggtccgaggccgtcccaggagcagctgcccgtgcggaacagcactatgggcttctcttccgagctgtgcagcccccagggccacggggtcctgcagcaaatgcaggaggccgagcttcgtctactggagggcatgagaaagtggatggcccagcgggtcaagagtgacagggagtatgcaggactgcttcaccacatgtccctgcaggacagtgggggccagagccgggccatcagccctgacagccccatcagtcagtcctgggctgagatcaccagccaaactgagggcctgagccgcttgctgcggcagcacgcagaggatctgaactcagggcccctgagcaagctgagcctgctcatccgggaacggcagcagcttcgcaagacctacagcgagcagtggcagcagctgcagcaggagctcaccaagacccacagccaggacattgagaagctgaagagccagtaccgagctctggcacgggacagtgcccaagccaagcgcaagtaccaggaggccagcaaagacaaggaccgtgacaaggctaaggacaagtatgtgcgcagcctgtggaagctctttgctcaccacaaccgctatgtgctgggcgtgcgggctgcgcagctacaccaccagcaccaccaccagctcctgctgcccggcctgctgcggtcactgcaggacctgcacgaggagatggcttgcatcctgaaggagatcctgcaggaatacctggagattagcagcctggtgcaggatgaggtggtggccattcaccgggagatggctgcagctgctgcccgcatccagcctgaggctgagtaccaaggcttcctgcgacagtatgggtccgcacctgacgtcccaccctgtgtcacgttcgatgagtcactgcttgaggagggtgaaccgctggagcctggggagctccagctgaacgagctgactgtggagagcgtgcagcacacgctgacctcagtgacagatgagctggctgtggccaccgagatggtgttcaggcggcaggagatggttacgcagctgcaacaggagctccggaatgaagaggagaacacccacccccgggagcgggtgcagctgctgggcaagaggcaagtgctgcaagaagcactgcaggggctgcaggtagcgctgtgcagccaggccaagctgcaggcccagcaggagttgctgcagaccaagctggagcacctgggccccggcgagcccccgcctgtgctgctcctgcaggatgaccgccactccacgtcgtcctcggagcaggagcgagaggggggaaggacacccacgctggagatccttaagagccacatctcaggaatcttccgccccaagttctcgctccctccaccgctgcagctcattccggaggtgcagaagcccctgcatgagcagctgtggtaccacggggccatcccgagggcagaggtggctgagctgctggtgcactctggggacttcctggtgcgggagagccagggcaagcaggagtacgtgctgtcggtgctgtgggatggtctgccccggcacttcatcatccagtccttggataacctgtaccgactggaaggggaaggctttcctagcattcctttgctcatcgaccacctactgagcacccagcagcccctcaccaagaagagtggtgttgtcctgcacagggctgtgcccaaggacaagtgggtgctgaaccatgaggacctggtgttgggtgagcagattggacgggggaactttggcgaagtgttcagcggacgcctgcgagccgacaacaccctggtggcggtgaagtcttgtcgagagacgctcccacctgacctcaaggccaagtttctacaggaagcgaggatcctgaagcagtacagccaccccaacatcgtgcgtctcattggtgtctgcacccagaagcagcccatctacatcgtcatggagcttgtgcaggggggcgacttcctgaccttcctccgcacggagggggcccgcctgcgggtgaagactctgctgcagatggtgggggatgcagctgctggcatggagtacctggagagcaagtgctgcatccaccgggacctggctgctcggaactgcctggtgacagagaagaatgtcctgaagatcagtgactttgggatgtcccgagaggaagccgatggggtctatgcagcctcagggggcctcagacaagtccccgtgaagtggaccgcacctgaggcccttaactacggccgctactcctccgaaagcgacgtgtggagctttggcatcttgctctgggagaccttcagcctgggggcctccccctatcccaacctcagcaatcagcagacacgggagtttgtggagaaggggggccgtctgccctgcccagagctgtgtcctgatgccgtgttcaggctcatggagcagtgctgggcctatgagcctgggcagcggcccagcttcagcaccatctaccaggagctgcagagcatccgaaagcggcatcggtgaggctgggacccccttctcaagctggtggcctctgcaggcctaggtgcagctcctcagcggctccagctcatatgctgacagctcttcacagtcctggactcctgccaccagcatccacactgccggcaggatgcagcgccgtgtcctctctgtgtccctgctgctgccagggcttcctcttccgggcagaaacaataaaaccacttgtgcccactgaa

SEQ ID NO: 1660 - DNA, 2302 bp, Homo sapiens
  source 1..2302: mol_type = genomic DNA
atgggcttctcttccgagctgtgcagcccccagggccacggggtcctgcagcaaatgcaggaggccgagcttcgtctactggagggcatgagaaagtggatggcccagcgggtcaagagtgacagggagtatgcaggactgcttcaccacatgtccctgcaggacagtgggggccagagccgggccatcagccctgacagccccatcagtcagacccacagccaggacattgagaagctgaagagccagtaccgagctctggcacgggacagtgcccaagccaagcgcaagtaccaggaggccagcaaagacaaggaccgtgacaaggctaaggacaagtatgtgcgcagcctgtggaagctctttgctcaccacaaccgctatgtgctgggcgtgcgggctgcgcagctacaccaccagcaccaccaccagctcctgctgcccggcctgctgcggtcactgcaggacctgcacgaggagatggcttgcatcctgaaggagatcctgcaggaatacctggagattagcagcctggtgcaggatgaggtggtggccattcaccgggagatggctgcagctgctgcccgcatccagcctgaggctgagtaccaaggcttcctgcgacagtatgggtccgcacctgacgtcccaccctgtgtcacgttcgatgagtcactgcttgaggagggtgaaccgctggagcctggggagctccagctgaacgagctgactgtggagagcgtgcagcacacgctgacctcagtgacagatgagctggctgtggccaccgagatggtgttcaggcggcaggagatggttacgcagctgcaacaggagctccggaatgaagaggagaacacccacccccgggagcgggtgcagctgctgggcaagaggcaagtgctgcaagaagcactgcaggggctgcaggtagcgctgtgcagccaggccaagctgcaggcccagcaggagttgctgcagaccaagctggagcacctgggccccggcgagcccccgcctgtgctgctcctgcaggatgaccgccactccacgtcgtcctcggagcaggagcgagaggggggaaggacacccacgctggagatccttaagagccacatctcaggaatcttccgccccaagttctcgctccctccaccgctgcagctcattccggaggtgcagaagcccctgcatgagcagctgtggtaccacggggccatcccgagggcagaggtggctgagctgctggtgcactctggggacttcctggtgcgggagagccagggcaagcaggagtacgtgctgtcggtgctgtgggatggtctgccccggcacttcatcatccagtccttggataacctgtaccgactggaaggggaaggctttcctagcattcctttgctcatcgaccacctactgagcacccagcagcccctcaccaagaagagtggtgttgtcctgcacagggctgtgcccaaggacaagtgggtgctgaaccatgaggacctggtgttgggtgagcagattggacgggggaactttggcgaagtgttcagcggacgcctgcgagccgacaacaccctggtggcggtgaagtcttgtcgagagacgctcccacctgacctcaaggccaagtttctacaggaagcgaggatcctgaagcagtacagccaccccaacatcgtgcgtctcattggtgtctgcacccagaagcagcccatctacatcgtcatggagcttgtgcaggggggcgacttcctgaccttcctccgcacggagggggcccgcctgcgggtgaagactctgctgcagatggtgggggatgcagctgctggcatggagtacctggagagcaagtgctgcatccaccgggacctggctgctcggaactgcctggtgacagagaagaatgtcctgaagatcagtgactttgggatgtcccgagaggaagccgatggggtctatgcagcctcagggggcctcagacaagtccccgtgaagtggaccgcacctgaggcccttaactacggccgctactcctccgaaagcgacgtgtggagctttggcatcttgctctgggagaccttcagcctgggggcctccccctatcccaacctcagcaatcagcagacacgggagtttgtggagaaggggggccgtctgccctgcccagagctgtgtcctgatgccgtgttcaggctcatggagcagtgctgggcctatgagcctgggcagcggcccagcttcagcaccatctaccaggagctgcagagcatccgaaagcggcatcggtgaggctggg

SEQ ID NO: 1661 - DNA, 2133 bp, Homo sapiens
  source 1..2133: mol_type = genomic DNA
ggaatcaggaactggccggggtccgcaccgggcctgagtcggtccgaggccgtcccaggagcagctgcccgtgcggaacagcactatgggcttctcttccgagctgtgcagcccccagggccacggggtcctgcagcaaatgcaggaggccgagcttcgtctactggagggcatgagaaagtggatggcccagcgggtcaagagtgacagggagtatgcaggactgcttcaccacatgtccctgcaggacagtgggggccagagccgggccatcagccctgacagccccatcagtcagacccacagccaggacattgagaagctgaagagccagtaccgagctctggcacgggacagtgcccaagccaagcgcaagtaccaggaggccagcaaagacaaggaccgtgacaaggctaaggacaagtatgtgcgcagcctgtggaagctctttgctcaccacaaccgctatgtgctgggcgtgcgggctgcgcagctacaccaccagcaccaccaccagctcctgctgcccggcctgctgcggtcactgcaggacctgcacgaggagatggcttgcatcctgaaggagatcctgcaggaatacctggagattagcagcctggtgcaggatgaggtggtggccattcaccgggagatggctgcagctgctgcccgcatccagcctgaggctgagtaccaaggcttcctgcgacagtatgggtccgcacctgacgtcccaccctgtgtcacgttcgatgagtcactgcttgaggagggtgaaccgctggagcctggggagctccagctgaacgagctgactgtggagagcgtgcagcacacgctgacctcagtgacagatgagctggctgtggccaccgagatggtgttcaggcggcaggagatggttacgcagctgcaacaggagctccggaatgaagaggagaacacccacccccgggagcgggtgcagctgctgggcaagaggcaagtgctgcaagaagcactgcaggggctgcaggtagcgctgtgcagccaggccaagctgcaggcccagcaggagttgctgcagaccaagctggagcacctgggccccggcgagcccccgcctgtgctgctcctgcaggatgaccgccactccacgtcgtcctcggagcaggagcgagaggggggaaggacacccacgctggagatccttaagagccacatctcaggaatcttccgccccaagttctcgaacctgtaccgactggaaggggaaggctttcctagcattcctttgctcatcgaccacctactgagcacccagcagcccctcaccaagaagagtggtgttgtcctgcacagggctgtgcccaaggacaagtgggtgctgaaccatgaggacctggtgttgggtgagcagattggacgggggaactttggcgaagtgttcagcggacgcctgcgagccgacaacaccctggtggcggtgaagtcttgtcgagagacgctcccacctgacctcaaggccaagtttctacaggaagcgagaagcagcccatctacatcgtcatggagcttgtgcagggggtcctccccacctgcagggggcgacttcctgaccttcctccgcacggagggggcccgcctgcgggtgaagactctgctgcagatggtgggggatgcagctgctggcatggagtacctggagagcaagtgctgcatccaccgggacctggctgctcggaactgcctggtgacagagaagaatgtcctgaagatcagtgactttgggatgtcccgagaggaagccgatggggtctatgcagcctcagggggcctcagacaagtccccgtgaagtggaccgcacctgaggcccttaactacggccgctactcctccgaaagcgacgtgtggagctttggcatcttgctctgggagaccttcagcctgggggcctccccctatcccaacctcagcaatcagcagacacgggagtttgtggagaaggggggccgtctgccctgcccagagctgtgtcctgatgccgtgttcaggctcatggagcagtgctgggcctatgagcctgggcagcggcccagcttcagcaccatctaccaggagctgcagagcatccgaaagcggcatcggtgagg

SEQ ID NO: 1662 - DNA, 2327 bp, Homo sapiens
  source 1..2327: mol_type = genomic DNA
aaaccgcgggaggaggaagcgcggaatcaggaactggccggggtccgcaccgggcctgagtcggtccgaggccgtcccaggagcagctgcccgtgcggaacagcactatgggcttctcttccgagctgtgcagcccccagggccacggggtcctgcagcaaatgcaggaggccgagcttcgtctactggagggcatgagaaagtggatggcccagcgggtcaagagtgacagggagtatgcaggactgcttcaccacatgtccctgcaggacagtgggggccagagccgggccatcagccctgacagccccatcagtcagacccacagccaggacattgagaagctgaagagccagtaccgagctctggcacgggacagtgcccaagccaagcgcaagtaccaggaggccagcaaagacaaggaccgtgacaaggctaaggacaagtatgtgcgcagcctgtggaagctctttgctcaccacaaccgctatgtgctgggcgtgcgggctgcgcagctacaccaccagcaccaccaccagctcctgctgcccggcctgctgcggtcactgcaggacctgcacgaggagatggcttgcatcctgaaggagatcctgcaggaatacctggagattagcagcctggtgcaggatgaggtggtggccattcaccgggagatggctgcagctgctgcccgcatccagcctgaggctgagtaccaaggcttcctgcgacagtatgggtccgcacctgacgtcccaccctgtgtcacgttcgatgagtcactgcttgaggagggtgaaccgctggagcctggggagctccagctgaacgagctgactgtggagagcgtgcagcacacgctgacctcagtgacagatgagctggctgtggccaccgagatggtgttcaggcggcaggagatggttacgcagctgcaacaggagctccggaatgaagaggagaacacccacccccgggagcgggtgcagctgctgggcaagaggcaagtgctgcaagaagcactgcaggggctgcaggtagcgctgtgcagccaggccaagctgcaggcccagcaggagttgctgcagaccaagctggagcacctgggccccggcgagcccccgcctgtgctgctcctgcaggatgaccgccactccacgtcgtcctcggagcaggagcgagaggggggaaggacacccacgctggagatccttaagagccacatctcaggaatcttccgccccaagttctcgaacctgtaccgactggaaggggaaggctttcctagcattcctttgctcatcgaccacctactgagcacccagcagcccctcaccaagaagagtggtgttgtcctgcacagggctgtgcccaaggacaagtgggtgctgaaccatgaggacctggtgttgggtgagcagattggacgggggaactttggcgaagtgttcagcggacgcctgcgagccgacaacaccctggtggcggtgaagtcttgtcgagagacgctcccacctgacctcaaggccaagtttctacaggaagcgaggatcctgaagcagtacagccaccccaacatcgtgcgtctcattggtgtctgcacccagaagcagcccatctacatcgtcatggagcttgtgcaggggggcgacttcctgaccttcctccgcacggagggggcccgcctgcgggtgaagactctgctgcagatggtgggggatgcagctgctggcatggagtacctggagagcaagtgctgcatccaccgggacctggctgctcggaactgcctggtgacagagaagaatgtcctgaagatcagtgactttgggatgtcccgagaggaagccgatggggtctatgcagcctcagggggcctcagacaagtccccgtgaagtggaccgcacctgaggcccttaactacggccgctactcctccgaaagcgacgtgtggagctttggcatcttgctctgggagaccttcagcctgggggcctccccctatcccaacctcagcaatcagcagacacgggagtttgtggagaaggggggccgtctgccctgcccagagctgtgtcctgatgccgtgttcaggctcatggagcagtgctgggcctatgagcctgggcagcggcccagcttcagcaccatctaccaggagctgcagagcatccgaaagcggcatcggtgaggctgggacccccttctcaagctggtggcctctgcaggcctaggtgcagctcctcagcggctccagctcatatgctgacagctcttcacagtcctggactcctgccaccagcatccacactgccggcaggatgca

SEQ ID NO: 1663 - DNA, 485 bp, Homo sapiens
  source 1..485: mol_type = genomic DNA
agtgtgaagaactgggcctattgtgtcttcctgggctgaagtgatctggtcgccacaggctatagggctgaggcctaaggtggagggaggcctgactgaatcaagatgacttcttgtggggagcctgagtcccaaatggaaaactccacgcctgtccgctccccaacccctgccccttgatttccccaggtctcccttgggacaggaagcccctgcctgggggtaggaggatggggacaaaaccactaggatctgtatccgagaagcagtctctgttcgggatatttacttggaaattttattcaaatggaagctggcgcctgagcctctccttagggaattccgtgagaacagcactatgggcttctcttccgagctgtgcagcccccagggccacggggtcctgcagcaaatgcaggaggccgagcttcgtctactggagggcatgagaaagtggatggcccagcgggtcaagagtgacaggg

SEQ ID NO: 1664 - DNA, 544 bp, Homo sapiens
  source 1..544: mol_type = genomic DNA
agctggggcaggcttggcctgtcgaggacctgggcaagggtgtccctgtaaggggtggtgggtggaagggcctggggagggaggctccaggttggctcctgttcccgaacgtgcggaggagaccctgacgctaaggaagcaatgagggccagtccccaggccaggctgctgctgggtacccatggctgcgtaacagcactatgggcttctcttccgagctgtgcagcccccagggccacggggtcctgcagcaaatgcaggaggccgagcttcgtctactggagggcatgagaaagtggatggcccagcgggtcaagagtgacagggagtatgcaggactgcttcaccacatgtccctgcaggacagtgggggccagagccgggccatcagccctgacagccccatcagtcagtcctgggctgagatcaccagccaaactgagggcctgagccgcttgctgcggcagcacgcagaggatctgaactcagggcccctgagcaagctgagcctgctcatccgggaacggcagcagcttcgcaagac

SEQ ID NO: 1665 - DNA, 2266 bp, Homo sapiens
  source 1..2266: mol_type = genomic DNA
atgggcttctcttccgagctgtgcagcccccagggccacggggtcctgcagcaaatgcaggaggccgagcttcgtctactggagggcatgagaaagtggatggcccagcgggtcaagagtgacagggagtatgcaggactgcttcaccacatgtccctgcaggacagtgggggccagagccgggccatcagccctgacagccccatcagtcagtcctgggctgagatcaccagccaaactgagggcctgagccgcttgctgcggcagcacgcagaggatctgaactcagggcccctgagcaagctgagcctgctcatccgggaacggcagcagcttcgcaagacctacagcgagcagtggcagcagctgcagcaggagctcaccaagacccacagccaggacattgagaagctgaagagccagtaccgagctctggcacgggacagtgcccaagccaagcgcaagtaccaggaggccagcaaagacaaggaccgtgacaaggctaaggacaagtatgtgcgcagcctgtggaagctctttgctcaccacaaccgctatgtgctgggcgtgcgggctgcgcagctacaccaccagcaccaccaccagctcctgctgcccggcctgctgcggtcactgcaggacctgcacgaggagatggcttgcatcctgaaggagatcctgcaggaatacctggagattagcagcctggtgcaggatgaggtggtggccattcaccgggagatggctgcagctgctgcccgcatccagcctgaggctgagtaccaaggcttcctgcgacagtatgggtccgcacctgacgtcccaccctgtgtcacgttcgatgagtcactgcttgaggagggtgaaccgctggagcctggggagctccagctgaacgagctgactgtggagagcgtgcagcacacgctgacctcagtgacagatgagctggctgtggccaccgagatggtgttcaggcggcaggagatggttacgcagctgcaacaggagctccggaatgaagaggagaacacccacccccgggagcgggtgcagctgctgggcaagaggcaagtgctgcaagaagcactgcaggggctgcaggtagcgctgtgcagccaggccaagctgcaggcccagcaggagttgctgcagaccaagctggagcacctgggccccggcgagcccccgcctgtgctgctcctgcaggatgaccgccactccacgtcgtcctcggagcaggagcgagaggggggaaggacacccacgctggagatccttaagagccacatctcaggaatcttccgccccaagttctcgaacctgtaccgactggaaggggaaggctttcctagcattcctttgctcatcgaccacctactgagcacccagcagcccctcaccaagaagagtggtgttgtcctgcacagggctgtgcccaaggacaagtgggtgctgaaccatgaggacctggtgttgggtgagcagattggacgggggaactttggcgaagtgttcagcggacgcctgcgagccgacaacaccctggtggcggtgaagtcttgtcgagagacgctcccacctgacctcaaggccaagtttctacaggaagcgaggatcctgaagcagtacagccaccccaacatcgtgcgtctcattggtgtctgcacccagaagcagcccatctacatcgtcatggagcttgtgcaggggggcgacttcctgaccttcctccgcacggagggggcccgcctgcgggtgaagactctgctgcagatggtgggggatgcagctgctggcatggagtacctggagagcaagtgctgcatccaccgggacctggctgctcggaactgcctggtgacagagaagaatgtcctgaagatcagtgactttgggatgtcccgagaggaagccgatggggtctatgcagcctcagggggcctcagacaagtccccgtgaagtggaccgcacctgaggcccttaactacggccgctactcctccgaaagcgacgtgtggagctttggcatcttgctctgggagaccttcagcctgggggcctccccctatcccaacctcagcaatcagcagacacgggagtttgtggagaaggggggccgtctgccctgcccagagctgtgtcctgatgccgtgttcaggctcatggagcagtgctgggcctatgagcctgggcagcggcccagcttcagcaccatctaccaggagctgcagagcatccgaaagcggcatcggtgaggctggg

SEQ ID NO: 1666 - DNA, 2085 bp, Homo sapiens
  source 1..2085: mol_type = genomic DNA
atgggcttctcttccgagctgtgcagcccccagggccacggggtcctgcagcaaatgcaggaggccgagcttcgtctactggagggcatgagaaagtggatggcccagcgggtcaagagtgacagggagtatgcaggactgcttcaccacatgtccctgcaggacagtgggggccagagccgggccatcagccctgacagccccatcagtcagacccacagccaggacattgagaagctgaagagccagtaccgagctctggcacgggacagtgcccaagccaagcgcaagtaccaggaggccagcaaagacaaggaccgtgacaaggctaaggacaagtatgtgcgcagcctgtggaagctctttgctcaccacaaccgctatgtgctgggcgtgcgggctgcgcagctacaccaccagcaccaccaccagctcctgctgcccggcctgctgcggtcactgcaggacctgcacgaggagatggcttgcatcctgaaggagatcctgcaggaatacctggagattagcagcctggtgcaggatgaggtggtggccattcaccgggagatggctgcagctgctgcccgcatccagcctgaggctgagtaccaaggcttcctgcgacagtatgggtccgcacctgacgtcccaccctgtgtcacgttcgatgagtcactgcttgaggagggtgaaccgctggagcctggggagctccagctgaacgagctgactgtggagagcgtgcagcacacgctgacctcagtgacagatgagctggctgtggccaccgagatggtgttcaggcggcaggagatggttacgcagctgcaacaggagctccggaatgaagaggagaacacccacccccgggagcgggtgcagctgctgggcaagaggcaagtgctgcaagaagcactgcaggggctgcaggtagcgctgtgcagccaggccaagctgcaggcccagcaggagttgctgcagaccaagctggagcacctgggccccggcgagcccccgcctgtgctgctcctgcaggatgaccgccactccacgtcgtcctcggagcaggagcgagaggggggaaggacacccacgctggagatccttaagagccacatctcaggaatcttccgccccaagttctcgaacctgtaccgactggaaggggaaggctttcctagcattcctttgctcatcgaccacctactgagcacccagcagcccctcaccaagaagagtggtgttgtcctgcacagggctgtgcccaaggacaagtgggtgctgaaccatgaggacctggtgttgggtgagcagattggacgggggaactttggcgaagtgttcagcggacgcctgcgagccgacaacaccctggtggcggtgaagtcttgtcgagagacgctcccacctgacctcaaggccaagtttctacaggaagcgaggatcctgaagcagtacagccaccccaacatcgtgcgtctcattggtgtctgcacccagaagcagcccatctacatcgtcatggagcttgtgcaggggggcgacttcctgaccttcctccgcacggagggggcccgcctgcgggtgaagactctgctgcagatggtgggggatgcagctgctggcatggagtacctggagagcaagtgctgcatccaccgggacctggctgctcggaactgcctggtgacagagaagaatgtcctgaagatcagtgactttgggatgtcccgagaggaagccgatggggtctatgcagcctcagggggcctcagacaagtccccgtgaagtggaccgcacctgaggcccttaactacggccgctactcctccgaaagcgacgtgtggagctttggcatcttgctctgggagaccttcagcctgggggcctccccctatcccaacctcagcaatcagcagacacgggagtttgtggagaaggggggccgtctgccctgcccagagctgtgtcctgatgccgtgttcaggctcatggagcagtgctgggcctatgagcctgggcagcggcccagcttcagcaccatctaccaggagctgcagagcatccgaaagcggcatcggtga

SEQ ID NO: 1667 - DNA, 587 bp, Homo sapiens
  source 1..587: mol_type = genomic DNA
gagtcggtccgaggccgtcccaggagcagctgcccgtgcgggtacctctagccccggggcctggaggagcggtgggagctgggggcgcggcaggcaggggcagagcaggcgttccgagggccagagacccacccagaacagcactatgggcttctcttccgagctgtgcagcccccagggccacggggtcctgcagcaaatgcaggaggccgagcttcgtctactggagggcatgagaaagtggatggcccagcgggtcaagagtgacagggagtatgcaggactgcttcaccacatgtccctgcaggacagtgggggccagagccgggccatcagccctgacagccccatcagtcagtcctgggctgagatcaccagccaaactgagggcctgagccgcttgctgcggcagcacgcagaggatctgaactcagggcccctgagcaagctgagcctgctcatccgggaacggcagcagcttcgcaagacctacagcgagcagtggcagcagctgcagcaggagctcaccaagacccacagccaggacattgagaagctgaagagccagtaccgagctctggcacggg

SEQ ID NO: 1668 - DNA, 2461 bp, Homo sapiens
  source 1..2461: mol_type = genomic DNA
ccaggagcagctgcccgtgcggaacagcactatgggcttctcttccgagctgtgcagcccccagggccacggggtcctgcagcaaatgcaggaggccgagcttcgtctactggagggcatgagaaagtggatggcccagcgggtcaagagtgacagggagtatgcaggactgcttcaccacatgtccctgcaggacagtgggggccagagccgggccatcagccctgacagccccatcagtcagtcctgggctgagatcaccagccaaactgagggcctgagccgcttgctgcggcagcacgcagaggatctgaactcagggcccctgagcaagctgagcctgctcatccgggaacggcagcagcttcgcaagacctacagcgagcagtggcagcagctgcagcaggagctcaccaagacccacagccaggacattgagaagctgaagagccagtaccgagctctggcacgggacagtgcccaagccaagcgcaagtaccaggaggccagcaaagacaaggaccgtgacaaggctaaggacaagtatgtgcgcagcctgtggaagctctttgctcaccacaaccgctatgtgctgggcgtgcgggctgcgcagctacaccaccagcaccaccaccagctcctgctgcccggcctgctgcggtcactgcaggacctgcacgaggagatggcttgcatcctgaaggagatcctgcaggaatacctggagattagcagcctggtgcaggatgaggtggtggccattcaccgggagatggctgcagctgctgcccgcatccagcctgaggctgagtaccaaggcttcctgcgacagtatgggtccgcacctgacgtcccaccctgtgtcacgttcgatgagtcactgcttgaggagggtgaaccgctggagcctggggagctccagctgaacgagctgactgtggagagcgtgcagcacacgctgacctcagtgacagatgagctggctgtggccaccgagatggtgttcaggcggcaggagatggttacgcagctgcaacaggagctccggaatgaagaggagaacacccacccccgggagcgggtgcagctgctgggcaagaggcaagtgctgcaagaagcactgcaggggctgcaggtagcgctgtgcagccaggccaagctgcaggcccagcaggagttgctgcagaccaagctggagcacctgggccccggcgagcccccgcctgtgctgctcctgcaggatgaccgccactccacgtcgtcctcggagcaggagcgagaggggggaaggacacccacgctggagatccttaagagccacatctcaggaatcttccgccccaagttctcgctccctccaccgctgcagctcattccggaggtgcagaagcccctgcatgagcagctgtggtaccacggggccatcccgagggcagaggtggctgagctgctggtgcactctggggacttcctggtgcgggagagccagggcaagcaggagtacgtgctgtcggtgctgtgggatggtctgccccggcacttcatcatccaggctcacgccccctcagaatggaggctgctgaccccgggtcccctgccctgcagaacctgtaccgactggaaggggaaggctttcctagcattcctttgctcatcgaccacctactgagcacccagcagcccctcaccaagaagagtggtgttgtcctgcacagggctgtgcccaaggacaagtgggtgctgaaccatgaggacctggtgttgggtgagcagattggacgggggaactttggcgaagtgttcagcggacgcctgcgagccgacaacaccctggtggcggtgaagtcttgtcgagagacgctcccacctgacctcaaggccaagtttctacaggaagcgaggatcctgaagcagtacagccaccccaacatcgtgcgtctcattggtgtctgcacccagaagcagcccatctacatcgtcatggagcttgtgcaggggggcgacttcctgaccttcctccgcacggagggggcccgcctgcgggtgaagactctgctgcagatggtgggggatgcagctgctggcatggagtacctggagagcaagtgctgcatccaccgggacctggctgctcggaactgcctggtgacagagaagaatgtcctgaagatcagtgactttgggatgtcccgagaggaagccgatggggtctatgcagcctcagggggcctcagacaagtccccgtgaagtggaccgcacctgaggcccttaactacgggggccgtctgccctgcccagagctgtgtcctgatgccgtgttcaggctcatggagcagtgctgggcctatgagcctgggcagcggcccagcttcagcaccatctaccaggagctgcagagcatccgaaagcggcatcggtgaggctgggacccccttctcaagctggtggcctctgcaggcc

SEQ ID NO: 1669 - DNA, 1096 bp, Homo sapiens
  source 1..1096: mol_type = genomic DNA
aaaccgcgggaggaggaagcgcggaatcaggaactggccggggtccgcaccgggcctgagtcggtccgaggccgtcccaggagcagctgcccgtgcgggtacctctagccccggggcctggaggagcggtgggagctgggggcgcggcaggcaggggcagagcaggcgttccgagggccagagacccacccagaacagcactatgggcttctcttccgagctgtgcagcccccagggccacggggtcctgcagcaaatgcaggaggccgagcttcgtctactggagggcatgagaaagtggatggcccagcgggtcaagagtgacagggagtatgcaggactgcttcaccacatgtccctgcaggacagtgggggccagagccgggccatcagccctgacagccccatcagtcaggtgggtctctatgggactctggtgggtgctggctgtatctgccttctccttcctctcctgggggccctctggggcagtggctggagatctggcaggccaatgcttgggagccattgtgcccccctccctgcctcccccatctgtgctgtatagtcctgggctgagatcaccagccaaactgagggcctgagccgcttgctgcggcagcacgcagaggatctgaactcagggcccctgagcaagctgagcctgctcatccgggaacggcagcagcttcgcaagacctacagcgagcagtggcagcagctgcagcaggagctcaccaagacccacagccaggacattgagaagctgaagagccagtaccgagctctggcacgggacagtgcccaagccaagcgcaagtaccaggaggccagcaaagacaaggaccgtgacaaggctaaggacaagtatgtgcgcagcctgtggaagctctttgctcaccacaaccgctatgtgctgggcgtgcgggctgcgcagctacaccaccagcaccaccaccagctcctgctgcccggcctgctgcggtcactgcaggacctgcacgaggagatggcttgcatcctgaaggagatcctgcaggaatacctggagattagcagcctggtgcaggatgaggtggtggccattcaccgggag

SEQ ID NO: 1670 - DNA, 587 bp, Homo sapiens
  source 1..587: mol_type = genomic DNA
ggaatcaggaactggccggggtccgcaccgggcctgagtcggtccgaggccgtcccaggagcagctgcccgtgcggcactatgggcttctcttccgagctgtgcagcccccagggccacggggtcctgcagcaaatgcaggaggccgagcttcgtctactggagggcatgagaaagtggatggcccagcgggtcaagagtgacagggagtatgcaggactgcttcaccacatgtccctgcaggacagtgggggccagagccgggccatcagccctgacagccccatcagtcagtcctgggctgagatcaccagccaaactgagggcctgagccgcttgctgcggcagcacgcagaggatctgaactcagggcccctgagcaagctgagcctgctcatccgggaacggcagcagcttcgcaagacctacagcgagcagtggcagcagctgcagcaggagctcaccaagacccacagccaggacattgagaagctgaagagccagtaccgagctctggcacgggacagtgcccaagccaagcgcaagtaccaggaggccagcaaagacaaggaccgtgacaaggctaag

SEQ ID NO: 1671 - DNA, 2780 bp, Homo sapiens
  source 1..2780: mol_type = genomic DNA
aagaacgcccccaaaatctgtttctaattttacagaaatcttttgaaacttggcacggtattcaaaagtccgtggaaagaaaaaaaccttgtcctggcttcagcttccaactacaaagacagacttggtccttttcaacggttttcacagatccagtgacccacgctctgaagacagaattagctaactttcaaaaacatctggaaaaatgaagacttgggtaaaaatcgtatttggagttgccacctctgctgtgcttgccttattggtgatgtgcattgtcttacgcccttcaagagttcataactctgaagaaaatacaatgagagcactcacactgaaggatattttaaatggaacattttcttataaaacattttttccaaactggatttcaggacaagaatatcttcatcaatctgcagataacaatatagtactttataatattgaaacaggacaatcatataccattttgagtaatagaaccatgaaaagtgtgaatgcttcaaattacggcttatcacctgatcggcaatttgtatatctagaaagtgattattcaaagctttggagatactcttacacagcaacatattacatctatgaccttagcaatggagaatttgtaagaggaaatgagcttcctcgtccaattcagtatttatgctggtcgcctgttgggagtaaattagcatatgtctatcaaaacaatatctatttgaaacaaagaccaggagatccaccttttcaaataacatttaatggaagagaaaataaaatatttaatggaatcccagactgggtttatgaagaggaaatgcttgctacaaaatatgctctctggtggtctcctaatggaaaatttttggcatatgcggaatttaatgatacggatataccagttattgcctattcctattatggcgatgaacaatatcctagaacaataaatattccatacccaaaggctggagctaagaatcccgttgttcggatatttattatcgataccacttaccctgcgtatgtaggtccccaggaagtgcctgttccagcaatgatagcctcaagtgattattatttcagttggctcacgtgggttactgatgaacgagtatgtttgcagtggctaaaaagagtccagaatgtttcggtcctgtctatatgtgacttcagggaagactggcagacatgggattgtccaaagacccaggagcatatagaagaaagcagaactggatgggctggtggattctttgtttcaacaccagttttcagctatgatgccatttcgtactacaaaatatttagtgacaaggatggctacaaacatattcactatatcaaagacactgtggaaaatgctattcaaattacaagtggcaagtgggaggccataaatatattcagagtaacacaggattcactgttttattctagcaatgaatttgaagaataccctggaagaagaaacatctacagaattagcattggaagctatcctccaagcaagaagtgtgttacttgccatctaaggaaagaaaggtgccaatattacacagcaagtttcagcgactacgccaagtactatgcacttgtctgctacggcccaggcatccccatttccacccttcatgatggacgcactgatcaagaaattaaaatcctggaagaaaacaaggaattggaaaatgctttgaaaaatatccagctgcctaaagaggaaattaagaaacttgaagtagatgaaattactttatggtacaagatgattcttcctcctcaatttgacagatcaaagaagtatcccttgctaattcaagtgtatggtggtccctgcagtcagagtgtaaggtctgtatttgctgttaattggatatcttatcttgcaagtaaggaagggatggtcattgccttggtggatggtcgaggaacagctttccaaggtgacaaactcctctatgcagtgtatcgaaagctgggtgtttatgaagttgaagaccagattacagctgtcagaaaattcatagaaatgggtttcattgatgaaaaaagaatagccatatggggctggtcctatggaggatacgtttcatcactggcccttgcatctggaactggtcttttcaaatgtggtatagcagtggctccagtctccagctgggaatattacgcgtctgtctacacagagagattcatgggtctcccaacaaaggatgataatcttgagcactataagaattcaactgtgatggcaagagcagaatatttcagaaatgtagactatcttctcatccacggaacagcagatgataatgtgcactttcaaaactcagcacagattgctaaagctctggttaatgcacaagtggatttccaggcaatgtggtactctgaccagaaccacggcttatccggcctgtccacgaaccacttatacacccacatgacccacttcctaaagcagtgtttctctttgtcagactaaaaacgatgcagatgcaagcctgtatcagaatctgaaaaccttatataaacccctcagacagtttgcttattttattttttatgttgtaaaatgctagtataaacaaacaaattaatgttgttctaaaggctgttaaaaaaaagatgaggactcagaagttcaagctaaatattgtttacattttctggtactctgtgaaagaagagaaaagggagtcatgcattttgctttggacacagtgttttatcacctgttcatttgaagaaaaataataaagtcagaagttcaa

SEQ ID NO: 1672 - DNA, 2598 bp, Homo sapiens
  source 1..2598: mol_type = genomic DNA
aaaaaaaccttgtcctggcttcagcttccaactacaaagacagacttggtccttttcaacggttttcacagatccagtgacccacgctctgaagacagaattagctaactttcaaaaacatctggaaaaatgaagacttgggtaaaaatcgtatttggagttgccacctctgctgtgcttgccttattggtgatgtgcattgtcttacgcccttcaagagttcataactctgaagaaaatacaatgagagcactcacactgaaggatattttaaatggaacattttcttataaaacattttttccaaactggatttcaggacaagaatatcttcatcaatctgcagataacaatatagtactttataatattgaaacaggacaatcatataccattttgagtaatagaaccatgctttggagatactcttacacagcaacatattacatctatgaccttagcaatggagaatttgtaagaggaaatgagcttcctcgtccaattcagtatttatgctggtcgcctgttgggagtaaattagcatatgtctatcaaaacaatatctatttgaaacaaagaccaggagatccaccttttcaaataacatttaatggaagagaaaataaaatatttaatggaatcccagactgggtttatgaagaggaaatgcttgctacaaaatatgctctctggtggtctcctaatggaaaatttttggcatatgcggaatttaatgatacggatataccagttattgcctattcctattatggcgatgaacaatatcctagaacaataaatattccatacccaaaggctggagctaagaatcccgttgttcggatatttattatcgataccacttaccctgcgtatgtaggtccccaggaagtgcctgttccagcaatgatagcctcaagtgattattatttcagttggctcacgtgggttactgatgaacgagtatgtttgcagtggctaaaaagagtccagaatgtttcggtcctgtctatatgtgacttcagggaagactggcagacatgggattgtccaaagacccaggagcatatagaagaaagcagaactggatgggctggtggattctttgtttcaacaccagttttcagctatgatgccatttcgtactacaaaatatttagtgacaaggatggctacaaacatattcactatatcaaagacactgtggaaaatgctattcaaattacaagtggcaagtgggaggccataaatatattcagagtaacacaggattcactgttttattctagcaatgaatttgaagaataccctggaagaagaaacatctacagaattagcattggaagctatcctccaagcaagaagtgtgttacttgccatctaaggaaagaaaggtgccaatattacacagcaagtttcagcgactacgccaagtactatgcacttgtctgctacggcccaggcatccccatttccacccttcatgatggacgcactgatcaagaaattaaaatcctggaagaaaacaaggaattggaaaatgctttgaaaaatatccagctgcctaaagaggaaattaagaaacttgaagtagatgaaattactttatggtacaagatgattcttcctcctcaatttgacagatcaaagaagtatcccttgctaattcaagtgtatggtggtccctgcagtcagagtgtaaggtctgtatttgctgttaattggatatcttatcttgcaagtaaggaagggatggtcattgccttggtggatggtcgaggaacagctttccaaggtgacaaactcctctatgcagtgtatcgaaagctgggtgtttatgaagttgaagaccagattacagctgtcagaaaattcatagaaatgggtttcattgatgaaaaaagaatagccatatggggctggtcctatggaggatacgtttcatcactggcccttgcatctggaactggtcttttcaaatgtggtatagcagtggctccagtctccagctgggaatattacgcgtctgtctacacagagagattcatgggtctcccaacaaaggatgataatcttgagcactataagaattcaactgtgatggcaagagcagaatatttcagaaatgtagactatcttctcatccacggaacagcagatgataatgtgcactttcaaaactcagcacagattgctaaagctctggttaatgcacaagtggatttccaggcaatgtggtactctgaccagaaccacggcttatccggcctgtccacgaaccacttatacacccacatgacccacttcctaaagcagtgtttctctttgtcagactaaaaacgatgcagatgcaagcctgtatcagaatctgaaaaccttatataaacccctcagacagtttgcttattttattttttatgttgtaaaatgctagtataaacaaacaaattaatgttgttctaaaggctgttaaaaaaaagatgaggactcagaagttcaagctaaatattgtttacattttctggtactctgtgaaagaagagaaaagggagtcatgcattttgctttggacacagtgttttatcacctgttcatttg

SEQ ID NO: 1673 - DNA, 1469 bp, Homo sapiens
  source 1..1469: mol_type = genomic DNA
ggctctgtgttcctgggcctgctgctggctgtccagagtaggggttgcttagagctgtgtgcatccctgcgggtggtgtgggagtgggcggttgtctaaaggcaggtcccctctactgataaacaaggaccggagatagacctagaggctgacattcttggctcccccagcctacaccccccccacctcgatttcccacagagccctagggacgggtagccagctctgtggcatggtatctggaggcaggccagcaacctgatgtgcatgccacggcccgtccctctccccactcagagctgcagtagcctggaggttcagagagccgggctactctgagaagaagacaccaagtggattctgcttcccctgggacagcactgagcgagtgtggagagaggtacagccctcggcctacaagctctttagtcttgaaagcgccacaagcagcagctgctgagccatggctgaaggggaaatcaccaccttcacagccctgaccgagaagtttaatctgcctccagggaattacaagaagcccaaactcctctactgtagcaacgggggccacttcctgaggatccttccggatggcacagtggatgggacaagggacaggagcgaccagcacattcagctgcagctcagtgcggaaagcgtgggggaggtgtatataaagagtaccgagactggccagtacttggccatggacaccgacgggcttttatacggctcacagacaccaaatgaggaatgtttgttcctggaaaggctggaggagaaccattacaacacctatatatccaagaagcatgcagagaagaattggtttgttggcctcaagaagaatgggagctgcaaacgcggtcctcggactcactatggccagaaagcaatcttgtttctccccctgccagtctcttctgattaaagagatctgttctgggtgttgaccactccagagaagtttcgaggggtcctcacctggttgacccaaaaatgttcccttgaccattggctgcgctaacccccagcccacagagcctgaatttgtaagcaacttgcttctaaatgcccagttcacttctttgcagagccttttacccctgcacagtttagaacagagggaccaaattgcttctaggagtcaactggctggccagtctgggtctgggtttggatctccaattgcctcttgcaggctgagtccctccatgcaaaagtggggctaaatgaagtgtgttaaggggtcggctaagtgggacattagtaactgcacactatttccctctactgagtaaaccctatctgtgattcccccaaacatctggcatggctcccttttgtccttcctgtgccctgcaaatattagcaaagaagcttcatgccaggttaggaaggcagcattccatgaccagaaacagggacaaagaaatccccccttcagaacagaggcatttaaaatggaa

SEQ ID NO: 1674 - DNA, 3660 bp, Homo sapiens
  source 1..3660: mol_type = genomic DNA
gaaaaaatactgttggcagcagcacaatgtttgggctaagacctggtcttgaaagcgccacaagcagcagctgctgagccatggctgaaggggaaatcaccaccttcacagccctgaccgagaagtttaatctgcctccagggaattacaagaagcccaaactcctctactgtagcaacgggggccacttcctgaggatccttccggatggcacagtggatgggacaagggacaggagcgaccagcacattcagctgcagctcagtgcggaaagcgtgggggaggtgtatataaagagtaccgagactggccagtacttggccatggacaccgacgggcttttatacggctcacagacaccaaatgaggaatgtttgttcctggaaaggctggaggagaaccattacaacacctatatatccaagaagcatgcagagaagaattggtttgttggcctcaagaagaatgggagctgcaaacgcggtcctcggactcactatggccagaaagcaatcttgtttctccccctgccagtctcttctgattaaagagatctgttctgggtgttgaccactccagagaagtttcgaggggtcctcacctggttgacccaaaaatgttcccttgaccattggctgcgctaacccccagcccacagagcctgaatttgtaagcaacttgcttctaaatgcccagttcacttctttgcagagccttttacccctgcacagtttagaacagagggaccaaattgcttctaggagtcaactggctggccagtctgggtctgggtttggatctccaattgcctcttgcaggctgagtccctccatgcaaaagtggggctaaatgaagtgtgttaaggggtcggctaagtgggacattagtaactgcacactatttccctctactgagtaaaccctatctgtgattcccccaaacatctggcatggctcccttttgtccttcctgtgccctgcaaatattagcaaagaagcttcatgccaggttaggaaggcagcattccatgaccagaaacagggacaaagaaatccccccttcagaacagaggcatttaaaatggaaaagagagattggattttggtgggtaacttagaaggatggcatctccatgtagaataaatgaagaaagggaggcccagccgcaggaaggcagaataaatccttgggagtcattaccacgccttgaccttcccaaggttactcagcagcagagagccctgggtgacttcaggtggagagcactagaagtggtttcctgataacaagcaaggatatcagagctgggaaattcatgtggatctggggactgagtgtgggagtgcagagaaagaaagggaaactggctgaggggataccataaaaagaggatgatttcagaaggagaaggaaaaagaaagtaatgccacacattgtgcttggcccctggtaagcagaggctttggggtcctagcccagtgcttctccaacactgaagtgcttgcagatcatctggggacctggtttgaatggagattctgattcagtgggttgggggcagagtttctgcagttccatcaggtcccccccaggtgcaggtgctgacaatactgctgccttacccgccatacattaaggagcagggtcctggtcctaaagagttattcaaatgaaggtggttcgacgccccgaacctcacctgacctcaactaacccttaaaaatgcacacctcatgagtctacctgagcattcaggcagcactgacaatagttatgcctgtactaaggagcatgattttaagaggctttggcccaatgcctataaaatgcccatttcgaagatatacaaaaacatacttcaaaaatgttaaacccttaccaacagcttttcccaggagaccatttgtattaccattacttgtataaatacacttcctgcttaaacttgacccaggtggctagcaaattagaaacaccattcatctctaacatatgatactgatgccatgtaaaggcctttaataagtcattgaaatttactgtgagactgtatgttttaattgcatttaaaaatatatagcttgaaagcagttaaactgattagtattcaggcactgagaatgatagtaataggatacaatgtataagctactcacttatctgatacttatttacctataaaatgagatttttgttttccactgtgctattacaaattttcttttgaaagtaggaactcttaagcaatggtaattgtgaataaaaattgatgagagtgttagctcctgtttcatatgaaattgaagtaattgttaactaaaaacaattccttagtaactgaactgtcatatttagaatggaaggaaaatgacagtttgtgaaagttcaaagcaatagtgcaattgaagaattgacctaagtaagctgacattatggttaataatagtattttagatttgtgcagcaaaataatttcataacttttttgtttttgttacttggataagatcaatctgttttattttagtaaatctttgcaggcaagttagagaaaatgcagtgtggcttaacgtctctttagtatgaagatttggccagaaaaagatacccagagaggaaatctaagataattataatggtccatactttttattgtatgaatcaaactcaagcataacattggccaaggaaaattaaataccattgctaacttgtgaaatggaagtctgtgatttcggagatgcaaagcattgtagtaaaaacaccaatgtgacctcgaccatctcagcccagatatcattcatatatctgttcaatgactattaaggtgcctactgtgtgctaggcactgtactggatactggggaccttgtctgtctggtttgctgctgtatcttctcccagggcattatatttatgatgaaagatgctgtggattcaattctttcagtcaagaataaacacagactttgtaggttcctgctgaataaagcaaatcccagaaacccagattttggaagaatcagcaaccccagcataaaataaacccctatcaaaatgtcagaggacatggcaaggtaaacttagcattttcaactttagaaccgggtcagcttcagggggactgctttcaaatcagccaaagagcctgtcagatcttcttagaaggaagaggttggtagttccctgctctgttttgaacatgctctagtttattaacctggggacattcccattgctgtcttaagtaagtctcatagccagctcctgtcacgtgactctcatatggattcattttcgggccagctctgaacaaagcatcatgaacatatgtgcttttggtcgtttgcaatgtgatggtggtggaggtaggtattggtttccttggaaggcatgataagaaagattcacaatggccaacagtgtgtatgaacaaaaaactgattggagcatcagctagtactgaaggtccttgctttgtgtcagaggcaaaggaacccaaggcgccaagtcctcagccttgagtgtactgctgacaactaaactcacaggctgcaaagcagacctctgatgaagatgcctgttatttcacatcactgtctttttgtgtatcatagtctgcaccttacaaatattaataaatgttccaataataggtga

SEQ ID NO: 1675 - DNA, 2582 bp, Homo sapiens
  source 1..2582: mol_type = genomic DNA
gactgcaaaaatatgaatgcaccatgccgccacattatctccattcctccagtgcccgcctgacactggccctgaatcagggctggagggggcaggcatttctcatttactaaagtgctggatgcagcccttgaggttcggcagaagcagaaagctgcgtcttgaaagcgccacaagcagcagctgctgagccatggctgaaggggaaatcaccaccttcacagccctgaccgagaagtttaatctgcctccagggaattacaagaagcccaaactcctctactgtagcaacgggggccacttcctgaggatccttccggatggcacagtggatgggacaagggacaggagcgaccagcacattcagctgcagctcagtgcggaaagcgtgggggaggtgtatataaagagtaccgagactggccagtacttggccatggacaccgacgggcttttatacggctcacagacaccaaatgaggaatgtttgttcctggaaaggctggaggagaaccattacaacacctatatatccaagaagcatgcagagaagaattggtttgttggcctcaagaagaatgggagctgcaaacgcggtcctcggactcactatggccagaaagcaatcttgtttctccccctgccagtctcttctgattaaagagatctgttctgggtgttgaccactccagagaagtttcgaggggtcctcacctggttgacccaaaaatgttcccttgaccattggctgcgctaacccccagcccacagagcctgaatttgtaagcaacttgcttctaaatgcccagttcacttctttgcagagccttttacccctgcacagtttagaacagagggaccaaattgcttctaggagtcaactggctggccagtctgggtctgggtttggatctccaattgcctcttgcaggctgagtccctccatgcaaaagtggggctaaatgaagtgtgttaaggggtcggctaagtgggacattagtaactgcacactatttccctctactgagtaaaccctatctgtgattcccccaaacatctggcatggctcccttttgtccttcctgtgccctgcaaatattagcaaagaagcttcatgccaggttaggaaggcagcattccatgaccagaaacagggacaaagaaatccccccttcagaacagaggcatttaaaatggaaaagagagattggattttggtgggtaacttagaaggatggcatctccatgtagaataaatgaagaaagggaggcccagccgcaggaaggcagaataaatccttgggagtcattaccacgccttgaccttcccaaggttactcagcagcagagagccctgggtgacttcaggtggagagcactagaagtggtttcctgataacaagcaaggatatcagagctgggaaattcatgtggatctggggactgagtgtgggagtgcagagaaagaaagggaaactggctgaggggataccataaaaagaggatgatttcagaaggagaaggaaaaagaaagtaatgccacacattgtgcttggcccctggtaagcagaggctttggggtcctagcccagtgcttctccaacactgaagtgcttgcagatcatctggggacctggtttgaatggagattctgattcagtgggttgggggcagagtttctgcagttccatcaggtcccccccaggtgcaggtgctgacaatactgctgccttacccgccatacattaaggagcagggtcctggtcctaaagagttattcaaatgaaggtggttcgacgccccgaacctcacctgacctcaactaacccttaaaaatgcacacctcatgagtctacctgagcattcaggcagcactgacaatagttatgcctgtactaaggagcatgattttaagaggctttggcccaatgcctataaaatgcccatttcgaagatatacaaaaacatacttcaaaaatgttaaacccttaccaacagcttttcccaggagaccatttgtattaccattacttgtataaatacacttcctgcttaaacttgacccaggtggctagcaaattagaaacaccattcatctctaacatatgatactgatgccatgtaaaggcctttaataagtcattgaaatttactgtgagactgtatgttttaattgcatttaaaaatatatagcttgaaagcagttaaactgattagtattcaggcactgagaatgatagtaataggatacaatgtataagctactcacttatctgatacttatttacctataaaatgagatttttgttttccactgtgctattacaaattttcttttgaaagtaggaactcttaagcaatggtaattgtgaataaaaattgatgagagtgttagctcctgtttcatatgaaattgaagtaattgttaactaaaaacaattccttagtaactgaactgtcatatttagaatggaaggaaaatgacagtttgtgaaagttcaaagcaatagtgcaattgaagaattgacctaagtaagctgacattatggttaataatagtattttagatttgtgcagcaaaa

SEQ ID NO: 1676 - DNA, 298 bp, Homo sapiens
  source 1..298: mol_type = genomic DNA
agactcttgggggattccttagtgagtgagttcactgctcaaagaagggctttgccacttctgcagggaagccagccacgggccagcagtcttgaaagcgccacaagcagcagctgctgagccatggctgaaggggaaatcaccaccttcacagccctgaccgagaagtttaatctgcctccagggaattacaagaagcccaaactcctctactgtagcaacgggggccacttcctgaggatccttccggatggcacagtggatgggacaagggacaggagcgaccagcacattcagc

SEQ ID NO: 1677 - DNA, 550 bp, Homo sapiens
  source 1..550: mol_type = genomic DNA
agagagccgggctactctgagaagaagacaccaagtggattctgcttcccctgggacagcactgagcgagtgtggagagaggtacagccctcggcctacaagctctttagagcacaattaaagaagatcaggtctggctgttgctcggcttcctttctcgttgtgactatgagagggaacacagagttgtgtggactcagtcatggcaattaccctcttctttgtcatcacttcttcctgaaatacctgagagaagacaaagtgagtggacataggaagaagatggccatctactagccaaggagagaggcttggaacaagtccttctttcatagcctcagaaggaaccaaccctgctgacaccttgatcttggacttccagccttcaacacttcttgaaagcgccacaagcagcagctgctgagccatggctgaaggggaaatcaccaccttcacagccctgaccgagaagtttaatctgcctccagggaattacaagaagcccaaactcctctactgtagcaacgggggccacttcctgaggatcctt

SEQ ID NO: 1678 - DNA, 683 bp, Homo sapiens
  source 1..683: mol_type = genomic DNA
tacagtgcttgtccttagcctttctgtgggcataccagtgtcagctgcacttgtaggggcccaagtgcctcatgacccactcggcagccttcctctccaggatccccaaggctaggaggccaacctactaacagtcttgaaagcgccacaagcagcagctgctgagccatggctgaaggggaaatcaccaccttcacagccctgaccgagaagtttaatctgcctccagggaattacaagaagcccaaactcctctactgtagcaacgggggccacttcctgaggatccttccggatggcacagtggatgggacaagggacaggagcgaccagcacattcagctgcagctcagtgcggaaagcgtgggggaggtgtatataaagagtaccgagactggccagtacttggccatggacaccgacgggcttttatacggctcacagacaccaaatgaggaatgtttgttcctggaaaggctggaggagaaccattacaacacctatatatccaagaagcatgcagagaagaattggtttgttggcctcaagaagaatgggagctgcaaacgcggtcctcggactcactatggccagaaagcaatcttgtttctccccctgccagtctcttctgattaaagagatctgttctgggtgttgaccactccagagaagtttcgaggggt

SEQ ID NO: 1679 - DNA, 777 bp, Homo sapiens
  source 1..777: mol_type = genomic DNA
tacagtgcttgtccttagcctttctgtgggcataccagtgtcagctgcacttgtaggggcccaagtgcctcatgacccactcggcagccttcctctccaggatccccaaggctaggaggccaacctactaacagcagcctgcctgcagctgtcctggtagaacagtgtggacattgcagaagctgtcactgccccagaaagaaagcaccccagagccaaggcaaagagtcttgaaagcgccacaagcagcagctgctgagccatggctgaaggggaaatcaccaccttcacagccctgaccgagaagtttaatctgcctccagggaattacaagaagcccaaactcctctactgtagcaacgggggccacttcctgaggatccttccggatggcacagtggatgggacaagggacaggagcgaccagcacattcagctgcagctcagtgcggaaagcgtgggggaggtgtatataaagagtaccgagactggccagtacttggccatggacaccgacgggcttttatacggctcacagacaccaaatgaggaatgtttgttcctggaaaggctggaggagaaccattacaacacctatatatccaagaagcatgcagagaagaattggtttgttggcctcaagaagaatgggagctgcaaacgcggtcctcggactcactatggccagaaagcaatcttgtttctccccctgccagtctcttctgattaaagagatctgttctgggtgttgaccactccagagaagtttcgaggggt

SEQ ID NO: 1680 - DNA, 695 bp, Homo sapiens
  source 1..695: mol_type = genomic DNA
tctgagaagaagacaccaagtggattctgcttcccctgggacagcactgagcgagtgtggagagaggtacagccctcggcctacaagctctttagtcttgaaagcgccacaagcagcagctgctgagccatggctgaaggggaaatcaccaccttcacagccctgaccgagaagtttaatctgcctccagggaattacaagaagcccaaactcctctactgtagcaacgggggccacttcctgaggatccttccggatggcacagtggatgggacaagggacaggagcgaccagcacacagacaccaaatgaggaatgtttgttcctggaaaggctggaggagaaccattacaacacctatatatccaagaagcatgcagagaagaattggtttgttggcctcaagaagaatgggagctgcaaacgcggtcctcggactcactatggccagaaagcaatcttgtttctccccctgccagtctcttctgattaaagagatctgttctgggtgttgaccactccagagaagtttcgaggggtcctcacctggttgacccaaaaatgttcccttgaccattggctgcgctaacccccagcccacagagcctgaatttgtaagcaacttgcttctaaatgcccagttcacttctttgcagagccttttacccctgcacagtttagaacagagggaccaa

SEQ ID NO: 1681 - DNA, 2193 bp, Homo sapiens
  source 1..2193: mol_type = genomic DNA
agggagctaaccagcagccaccacctcgagctctctccttgccttgcatcgggtcttacccttccagtatgttccttctgatgagacaatttccagtgccgagagtttcagtacaatgtggaaatggatactgacacattgtgcctcagcctttccccacctgcccggctgctgctgctgctgctttttgttgctgttcttggtgtcttccgtccctgtcacctgccaagcccttggtcaggacatggtgtcaccagaggccaccaactcttcttcctcctccttctcctctccttccagcgcgggaaggcatgtgcggagctacaatcaccttcaaggagatgtccgctggagaaagctattctctttcaccaagtactttctcaagattgagaagaacgggaaggtcagcgggaccaagaaggagaactgcccgtacagcatcctggagataacatcagtagaaatcggagttgttgccgtcaaagccattaacagcaactattacttagccatgaacaagaaggggaaactctatggctcaaaagaatttaacaatgactgtaagctgaaggagaggatagaggaaaatggatacaatacctatgcatcatttaactggcagcataatgggaggcaaatgtatgtggcattgaatggaaaaggagctccaaggagaggacagaaaacacgaaggaaaaacacctctgctcactttcttccaatggtggtacactcatagaggaaggcaacgtttgtggatgcagtagaaccaatggctcttttgccaagaatagtggatattcttcatgaagacagtagattgaaaggcaaagacacgttgcagatgtctgcttgcttaaaagaaagccagcctttgaaggtttttgtattcactgctgacatatgatgttcttttaattagttctgtgtcatgtcttataatcaagatataggcagatcgaatgggatagaagttattcccaagtgaaaaacattgtggctgggttttttgttgttgttgtcaagtttttgtttttaaacctctgagatagaacttaaaggacatagaacaatctgttgaaagaacgatcttcgggaaagttatttatggaatacgaactcatatcaaagacttcattgctcattcaagcctaatgaatcaatgaacagtaatacatgcaagcatttactggaaagcacttgggtcatatcatatgcacaaccaaaggagttctggatgtggtctcatggaataattgaatagaatttaaaaatataaacatgttagtgtgaaactgttctaacaatacaaatagtatggtatgcttgtgcattctgccttcatccctttctatttctttctaagttatttatttaataggatgttaaatatcttttggggttttaaagagtatctcagcagctgtcttctgatttatcttttctttttattcagcacaccacatgcatgttcacgacaaagtgtttttaaaacttggcgaacacttcaaaaataggagttgggattagggaagcagtatgagtgcccgtgtgctatcagttgacttaatttgcacttctgcagtaataaccatcaacaataaatatggcaatgctgtgccatggcttgagtgagagatgtctgctatcatttgaaaacatatattactctcgaggcttcctgtctcaagaaatagaccagaaggccaaattcttctctttcaatacatcagtttgcctccaagaatatactaaaaaaaggaaaattaattgctaaatacatttaaatagcctagcctcattatttactcatgatttcttgccaaatgtcatggcggtaaagaggctgtccacatctctaaaaaccctctgtaaattccacataatgcatctttcccaaaggaactatcaaagaatttggtatgaagcgcaactctcccaggggcttaaactgagcaaatcaaatatatactggtatatgtgtaaccatatacaaaaacctgttctagctgtatgatctagtctttacaaaaccaaataaaacttgttttctgtaaatttaaagagctttacaaagttccataatgtaaccatatcaaaattcattttgttagagcaggtatagaaaagagtacataagagtttaccaatcatcatcacattgtattccactaaataaatacataagcc

SEQ ID NO: 1682 - DNA, 1131 bp, Homo sapiens
  source 1..1131: mol_type = genomic DNA
aattagacagagctagaggcgccggcggaggctgcggccgcaacagccgcggcgaggaagggacctggcagcccccgagctcggtgcaaaggcatcgcgctctctcctcgctcccctgctcccccacccccttctctgcccctttcaccctccctctccctggcgttcccagcagcctagggtttcagatgtcccaccgccggttgaccccctcccccctcttctccacccctgcaaatgaggtttgaccagcagaggcagagcccacctctggcttagaatcactgacatttagactccaggcttcaacctgtttacaagcggactttccaaaggaagggggtgggagatagggccatacaaaacaccagccgccgtcccccaaaacaaaaagtgactttcggcagccttcaaatcggcaggcaccactaaaaacagaaaggaagagagggaagaaaacaacggcgactgggcagctgcctccacttctgacaactccaaagggatatacttgtagaagtggctcgcaggctggggctccgcagagagagaccagaagacctttttggcatctaacatggtgaagaaaggagtaaagaagagaacaaagtaactcctgggggagcgaagagcgctggtgaccaacaccaccaacgccaccaccagctcctgctgctgcggccacccacgtccaccatttaccgggaggctccagaggcgtaggcagcggatccgagaaaggagcgaggggagtcagccggcttttccgaggagttatggatgttggtgcattcacttctggccagatccgcgcccagagggagctaaccagcagccaccacctcgagctctctccttgccttgcatcgggtcttacccttccagtatgttccttctgatgagacaatttccagtgccgagagtttcagtacaatgtggaaatggatactgacacattgtgcctcagcctttccccacctgcccggctgctgctgctgctgctttttgttgctgttcttggtgtcttccgtccctgtcacctgccaagcccttggtcaggacatggtgtcaccagaggccaccaactcttcttcctcctccttctcctctccttccagcgcgggaaggcat

SEQ ID NO: 1683 - DNA, 6775 bp, Homo sapiens
  source 1..6775: mol_type = genomic DNA
cggccccagaaaacccgagcgagtagggggcggcgcgcaggagggaggagaactgggggcgcgggaggctggtgggtgtggggggtggagatgtagaagatgtgacgccgcggcccggcgggtgccagattagcggacgcggtgcccgcggttgcaacgggatcccgggcgctgcagcttgggaggcggctctccccaggcggcgtccgcggagacacccatccgtgaaccccaggtcccgggccgccggctcgccgcgcaccaggggccggcggacagaagagcggccgagcggctcgaggctgggggaccgcgggcgcggccgcgcgctgccgggcgggaggctggggggccggggccggggccgtgccccggagcgggtcggaggccggggccggggccgggggacggcggctccccgcgcggctccagcggctcggggatcccggccgggccccgcagggaccatggcagccgggagcatcaccacgctgcccgccttgcccgaggatggcggcagcggcgccttcccgcccggccacttcaaggaccccaagcggctgtactgcaaaaacgggggcttcttcctgcgcatccaccccgacggccgagttgacggggtccgggagaagagcgaccctcacatcaagctacaacttcaagcagaagagagaggagttgtgtctatcaaaggagtgtgtgctaaccgttacctggctatgaaggaagatggaagattactggcttctaaatgtgttacggatgagtgtttcttttttgaacgattggaatctaataactacaatacttaccggtcaaggaaatacaccagttggtatgtggcactgaaacgaactgggcagtataaacttggatccaaaacaggacctgggcagaaagctatactttttcttccaatgtctgctaagagctgattttaatggccacatctaatctcatttcacatgaaagaagaagtatattttagaaatttgttaatgagagtaaaagaaaataaatgtgtatagctcagtttggataattggtcaaacaattttttatccagtagtaaaatatgtaaccattgtcccagtaaagaaaaataacaaaagttgtaaaatgtatattctcccttttatattgcatctgctgttacccagtgaagcttacctagagcaatgatctttttcacgcatttgctttattcgaaaagaggcttttaaaatgtgcatgtttagaaacaaaatttcttcatggaaatcatatacattagaaaatcacagtcagatgtttaatcaatccaaaatgtccactatttcttatgtcattcgttagtctacatgtttctaaacatataaatgtgaatttaatcaattcctttcatagttttataattctctggcagttccttatgatagagtttataaaacagtcctgtgtaaactgctggaagttcttccacagtcaggtcaattttgtcaaacccttctctgtacccatacagcagcagcctagcaactctgctggtgatgggagttgtattttcagtcttcgccaggtcattgagatccatccactcacatcttaagcattcttcctggcaaaaatttatggtgaatgaatatggctttaggcggcagatgatatacatatctgacttcccaaaagctccaggatttgtgtgctgttgccgaatactcaggacggacctgaattctgattttataccagtctcttcaaaaacttctcgaaccgctgtgtctcctacgtaaaaaaagagatgtacaaatcaataataattacacttttagaaactgtatcatcaaagattttcagttaaagtagcattatgtaaaggctcaaaacattaccctaacaaagtaaagttttcaatacaaattctttgccttgtggatatcaagaaatcccaaaatattttcttaccactgtaaattcaagaagcttttgaaatgctgaatatttctttggctgctacttggaggcttatctacctgtacatttttggggtcagctctttttaacttcttgctgctctttttcccaaaaggtaaaaatatagattgaaaagttaaaacattttgcatggctgcagttcctttgtttcttgagataagattccaaagaacttagattcatttcttcaacaccgaaatgctggaggtgtttgatcagttttcaagaaacttggaatataaataattttataattcaacaaaggttttcacattttataaggttgatttttcaattaaatgcaaatttgtgtggcaggatttttattgccattaacatatttttgtggctgctttttctacacatccagatggtccctctaactgggctttctctaattttgtgatgttctgtcattgtctcccaaagtatttaggagaagccctttaaaaagctgccttcctctaccactttgctggaaagcttcacaattgtcacagacaaagatttttgttccaatactcgttttgcctctatttttcttgtttgtcaaatagtaaatgatatttgcccttgcagtaattctactggtgaaaaacatgcaaagaagaggaagtcacagaaacatgtctcaattcccatgtgctgtgactgtagactgtcttaccatagactgtcttacccatcccctggatatgctcttgttttttccctctaatagctatggaaagatgcatagaaagagtataatgttttaaaacataaggcatttgtctgccatttttcaattacatgctgacttcccttacaattgagatttgcccataggttaaacatggttagaaacaactgaaagcataaaagaaaaatctaggccgggtgcagtggctcatgcctatattccctgcactttgggaggccaaagcaggaggatcgcttgagcccaggagttcaagaccaacctggtgaaaccccgtctctacaaaaaaacacaaaaaatagccaggcatggtggcgtgtacatgtggtctcagatacttgggaggctgaggtgggagggttgatcacttgaggctgagaggtcaaggttgcagtgagccataatcgtgccactgcagtccagcctaggcaacagagtgagactttgtctcaaaaaaagagaaattttccttaataagaaaagtaatttttactctgatgtgcaatacatttgttattaaatttattatttaagatggtagcactagtcttaaattgtataaaatatcccctaacatgtttaaatgtccatttttattcattatgctttgaaaaataattatggggaaatacatgtttgttattaaatttattattaaagatagtagcactagtcttaaatttgatataacatctcctaacttgtttaaatgtccatttttattctttatgtttgaaaataaattatggggatcctatttagctcttagtaccactaatcaaaagttcggcatgtagctcatgatctatgctgtttctatgtcgtggaagcactggatgggggtagtgagcaaatctgccctgctcagcagtcaccatagcagctgactgaaaatcagcactgcctgagtagttttgatcagtttaacttgaatcactaactgactgaaaattgaatgggcaaataagtgcttttgtctccagagtatgcgggagacccttccacctcaagatggatatttcttccccaaggatttcaagatgaattgaaatttttaatcaagatagtgtgctttattctgttgtattttttattattttaatatactgtaagccaaactgaaataacatttgctgttttataggtttgaagaacataggaaaaactaagaggttttgtttttatttttgctgatgaagagatatgtttaaatatgttgtattgttttgtttagttacaggacaataatgaaatggagtttatatttgttatttctattttgttatatttaataatagaattagattgaaataaaatataatgggaaataatctgcagaatgtgggttttcctggtgtttccctctgactctagtgcactgatgatctctgataaggctcagctgctttatagttctctggctaatgcagcagatactcttcctgccagtggtaatacgattttttaagaaggcagtttgtcaattttaatcttgtggatacctttatactcttagggtattattttatacaaaagccttgaggattgcattctattttctatatgaccctcttgatatttaaaaaacactatggataacaattcttcatttacctagtattatgaaagaatgaaggagttcaaacaaatgtgtttcccagttaactagggtttactgtttgagccaatataaatgtttaactgtttgtgatggcagtattcctaaagtacattgcatgttttcctaaatacagagtttaaataatttcagtaattcttagatgattcagcttcatcattaagaatatcttttgttttatgttgagttagaaatgccttcatatagacatagtctttcagacctctactgtcagttttcatttctagctgctttcagggttttatgaattttcaggcaaagctttaatttacactaagcttaggaagtatggctaatgccaacggcagtttttttcttcttaattccacatgactgaggcatatatgatctctgggtaggtgagttgttgtgacaaccacaagcactttttttttttttaaagaaaaaaaggtagtgaatttttaatcatctggactttaagaaggattctggagtatacttaggcctgaaattatatatatttggcttggaaatgtgtttttcttcaattacatctacaagtaagtacagctgaaattcagaggacccataagagttcacatgaaaaaaatcaatttatttgaaaaggcaagatgcaggagagaggaagccttgcaaacctgcagactgctttttgcccaatatagattgggtaaggctgcaaaacataagcttaattagctcacatgctctgctctcacgtggcaccagtggatagtgtgagagaattaggctgtagaacaaatggccttctctttcagcattcacaccactacaaaatcatcttttatatcaacagaagaataagcataaactaagcaaaaggtcaataagtacctgaaaccaagattggctagagatatatcttaatgcaatccattttctgatggattgttacgagttggctatataatgtatgtatggtattttgatttgtgtaaaagttttaaaaatcaagctttaagtacatggacatttttaaataaaatatttaaagacaatttagaaaattgccttaatatcattgttggctaaatagaataggggacatgcatattaaggaaaaggtcatggagaaataatattggtatcaaacaaatacattgatttgtcatgatacacattgaatttgatccaatagtttaaggaataggtaggaaaatttggtttctatttttcgatttcctgtaaatcagtgacataaataattcttagcttattttatatttccttgtcttaaatactgagctcagtaagttgtgttaggggattatttctcagttgagactttcttatatgacattttactatgttttgactacctgactattaaaaataaatagtagatacaattttcataaagtgaagaattatataatcactgctttataactgactttattatatttatttcaaagttcatttaaaggctactattcatcctctgtgatggaatggtcaggaatttgttttctcatagtttaattccaacaacaatattagtcgtatccaaaataacctttaatgctaaactttactgatgtatatccaaagcttctcattttcagacagattaatccagaagcagtcataaacagaagaataggtggtatgttcctaatgatattatttctactaatggaataaactgtaatattagaaattatgctgctaattatatcagctctgaggtaatttctgaaatgttcagactcagtcggaacaaattggaaaatttaaatttttattcttagctataaagcaagaaagtaaacacattaatttcctcaacatttttaagccaattaaaaatataaaagatacacaccaatatcttcttcaggctctgacaggcctcctggaaacttccacatatttttcaactgcagtataaagtcagaaaataaagttaacataactttcactaacacacacatatgtagatttcacaaaatccacctataattggtcaaagtggttgagaatatattttttagtaattgcatgcaaaatttttctagcttccatcctttctccctcgtttcttctttttttgggggagctggtaactgatgaaatcttttcccaccttttctcttcaggaaatataagtggttttgtttggttaacgtgatacattctgtatgaatgaaacattggagggaaacatctactgaatttctgtaatttaaaatattttgctgctagttaactatgaacagatagaagaatcttacagatgctgctataaataagtagaaaatataaatttcatcactaaaatatgctattttaaaatctatttcctatattgtatttctaatcagatgtattactcttattatttctattgtatgtgttaatgattttatgtaaaaatgtaattgcttttcatgagtagtatgaataaaattgattagtttgtgttttcttgtctccca

SEQ ID NO: 1684 - DNA, 5467 bp, Homo sapiens
  source 1..5467: mol_type = genomic DNA
tagctccctctcatgaccattgaatactatacaagcctccttttattctcgctgttgtattcaactaacagctcactggctaagttttaattgcttccaatgaggtcagcaaaggtatttatcgaaaagccctgaataaaaggctcacacacacacacaagcacacacgcgctcacacacagagagaaaatccttctgcctgttgatttatggaaacaattatgattctgctggagaacttttcagctgagaaatagtttgtagctacagtagaaaggctcaagttgcaccaggcagacaacagacatggaattcttatatatccagctgttagcaacaaaacaaaagtcaaatagcaaacagcgtcacagcaactgaacttactacgaactgtttttatgaggatttatcaacagagttatttaaggaggaatcctgtgttgttatcaggaactaaaaggataaggctaacaatttggaaagagcaactactctttcttaaatcaatctacaattcacagataggaagaggtcaatgacctaggagtaacaatcaactcaagattcattttcattatgttattcatgaacacccggagcactacactataatgcacaaatggatactgacatggatcctgccaactttgctctacagatcatgctttcacattatctgtctagtgggtactatatctttagcttgcaatgacatgactccagagcaaatggctacaaatgtgaactgttccagccctgagcgacacacaagaagttatgattacatggaaggaggggatataagagtgagaagactcttctgtcgaacacagtggtacctgaggatcgataaaagaggcaaagtaaaagggacccaagagatgaagaataattacaatatcatggaaatcaggacagtggcagttggaattgtggcaatcaaaggggtggaaagtgaattctatcttgcaatgaacaaggaaggaaaactctatgcaaagaaagaatgcaatgaagattgtaacttcaaagaactaattctggaaaaccattacaacacatatgcatcagctaaatggacacacaacggaggggaaatgtttgttgccttaaatcaaaaggggattcctgtaagaggaaaaaaaacgaagaaagaacaaaaaacagcccactttcttcctatggcaataacttaattgcatatggtatataaagaaccagttccagcagggagatttctttaagtggactgttttctttcttctcaaaattttctttccttttattttttagtaatcaagaaaggctggaaaactactgaaaaactgatcaagctggacttgtgcatttatgtttgttttaagacactgcattaaagaaagatttgaaaagtatacacaaaaatcagatttagtaactaaaggttgtaaaaaattgtaaaactggttgtacaatcatgatgttagtaacagtaatttttttcttaaattaatttacccttaagagtatgttagatttgattatctgataatgattatttaaatattcctatctgcttataaaatggctgctataataataataatacagatgttgttatataaggtatatcagacctacaggcttctggcaggatttgtcagataatcaagccacactaactatggaaaatgagcagcattttaaatgctttctagtgaaaaattataatctacttaaactctaatcagaaaaaaaattctcaaaaaaactattatgaaagtcaataaaatagataatttaacaaaagtacaggattagaacatgcttatacctataaataagaacaaaatttctaatgctgctcaagtggaaagggtattgctaaaaggatgtttccaaaaatcttgtatataagatagcaacagtgattgatgataatactgtacttcatcttacttgccacaaaataacattttataaatcctcaaagtaaaattgagaaatctttaagtttttttcaagtaacataatctatctttgtataattcatatttgggaatatggcttttaataatgttcttcccacaaataatcatgcttttttcctatggttacagcattaaactctattttaagttgtttttgaactttattgttttgttatttaagtttatgttatttataaaaaaaaaaccttaataagctgtatctgtttcatatgcttttaattttaaaggaataacaaaactgtctggctcaacggcaagtttccctcccttttctgactgacactaagtctagcacacagcacttgggccagcaaatcctggaaggcagacaaaaataagagcctgaagcaatgcttacaatagatgtctcacacagaacaatacaaatatgtaaaaaatctttcaccacatattcttgccaattaattggatcatataagtaaaatcattacaaatataagtatttacaggattttaaagttagaatatatttgaatgcatgggtagaaaatatcatattttaaaactatgtatatttaaatttagtaattttctaatctctagaaatctctgctgttcaaaaggtggcagcactgaaagttgttttcctgttagatggcaagagcacaatgcccaaaatagaagatgcagttaagaataaggggccctgaatgtcatgaaggcttgaggtcagcctacagataacaggattattacaaggatgaatttccacttcaaaagtctttcattggcagatcttggtagcactttatatgttcaccaatgggaggtcaatatttatctaatttaaaaggtatgctaaccactgtggttttaatttcaaaatatttgtcattcaagtccctttacataaatagtatttggtaatacatttatagatgagagttatatgaaaaggctaggtcaacaaaaacaatagattcatttaattttcctgtggttgacctatacgaccaggatgtagaaaactagaaagaactgcccttcctcagatatactcttgggagagagcatgaatggtattctgaactatcacctgattcaaggactttgctagctaggttttgaggtcaggcttcagtaactgtagtcttgtgagcatattgagggcagaggaggacttagtttttcatatgtgtttccttagtgcctagcagactatctgttcataatcagttttcagtgtgaattcactgaatgtttatagacaaaagaaaatacacactaaaactaatcttcattttaaaagggtaaaacatgactatacagaaatttaaatagaaatagtgtatatacatataaaatacaagctatgttaggaccaaatgctctttgtctatggagttatacttccatcaaattacatagcaatgctgaattaggcaaaaccaacatttagtggtaaatccattcctggtagtataagtcacctaaaaaagacttctagaaatatgtactttaattatttgtttttctcctatttttaaatttattatgcaaattttagaaaataaaatttgctctagttacacacctttagaattctagaatattaaaactgtaaggggcctccatccctcttactcatttgtagtctaggaaattgagattttgatacacctaaggtcacgcagctgggtagatatacagctgtcacaagagtctagatcagttagcacatgctttctactcttcgattattagtattattagctaatggtctttggcatgtttttgttttttatttctgttgagatatagcctttacatttgtacacaaatgtgactatgtcttggcaatgcacttcatacacaatgactaatctatactgtgatgatttgactcaaaaggagaaaagaaattatgtagttttcaattctgattcctattcaccttttgtttatgaatggaaagctttgtgcaaaatatacatataagcagagtaagccttttaaaaatgttctttgaaagataaaattaaatacatgagtttctaacaattagaaaagaaaaaattaaaacatgaaatgataacaaaagtaaacaaaagatactttcaaagcagtgaacaaaacattttgacataagccataatataaattataatataaaaaataaaaaccatagtataaattgtcagcctttgagttggctacaaattcaatttaatgacagaagagaagggatgctggaggtaaattcttagggtttctatctcatagagtttgctcttctggttctctagactgccaaagaacataaagatgtgcgaggggacctagctgtagtaaaagcaatcctataacaagaaaaactctaaaacagtgccccttacgattttctactgaaatttctctaatagtagaggtgtaaaataagaagttagagaataatgcaaagggggcccaccacagacggaacatttcttttctcttaagactcatgtgatttttgcatcttactccataatatatttgtggttgcgttaatatgacaatgtctgcaattaaacaccagtaagcaaaattgatacatcagaatgacttgcagggcttatcatgcagtttggtttacatccctactccactgccatttacttgagcgtgaatgagacacaaaagattatttgcctcccataatccaactttacacataaataacacaaggctaaagaaaaccagaactcaaattcaccacgcataggagtgataacaaaaatatttaacagtcagtatgggtgattactggccaatcagaatacatcactgatacatcgaaatggatgcaggccactatgactaacttgtgggtatcatttctatgatcaccctaaaacagagttgggaaaatatctattaactggtctctctggtttgaattctcaatatgtatcttaatatgaaatagctcattaaaacttcatgtgtaactatttcagcattgttgtcagctactctttattccacttctgtacagtatttattcaaccaagctgctgctttcaatgaaggtcacttgttccttcagggacacatatactcccacctatcctttaattttgaatggtttgtcaggaaaatttactttctcttgagttgaaaaacttgacaggaagcaagaaataatacagtcctagcctctttccaataacatctgatttctccattctcaaactacacttctcaaggaaccagatatttactctcatctgggaagatgcctcttatgttttccttttacttcctggttatcatgtggttgcattttccaagttcttatcattgaatttatgagagcctatcaaaatttattttctttcatttatattctaataattgaaatgtgagatgaaaataacatttcacttatgaaaaacccttctcttgatgaatccttccatgtgttagttatctattgctgtgtaacaaattaaaacttaatggcttgaaacaaa

SEQ ID NO: 1685 - DNA, 1123 bp, Homo sapiens
  source 1..1123: mol_type = genomic DNA
acacacgcgctcacacacagagagaaaatccttctgcctgttgatttatggaaacaattatgattctgctggagaacttttcagctgagaaatagtttgtagctacagtagaaaggctcaagttgcaccaggcagacaacagacatggaattcttatatatccagctgttagcaacaaaacaaaagtcaaatagcaaacagcgtcacagcaactgaacttactacgaactgtttttatgaggatttatcaacagagttatttaaggaggaatcctgtgttgttatcaggaactaaaaggataaggctaacaatttggaaagagcaactactctttcttaaatcaatctacaattcacagataggaagaggtcaatgacctaggagtaacaatcaactcaagattcattttcattatgttattcatgaacacccggagcactacactataatgcacaaatggatactgacatggatcctgccaactttgctctacagatcatgctttcacattatctgtctagtgggtactatatctttagcttgcaatgacatgactccagagcaaatggctacaaatgtgaactgttccagccctgagcgacacacaagaagttatgattacatggaaggaggggatataagagtgagaagactcttctgtcgaacacagtggtacctgaggatcgataaaagaggcaaagtaaaagggacccaagagatgaagaataattacaatatcatggaaatcaggacagtggcagttggaattgtggcaatcaaaggggtggaaagtgaattctatcttgcaatgaacaaggaaggaaaactctatgcaaagaaagaatgcaatgaagattgtaacttcaaagaactaattctggaaaaccattacaacacatatgcatcagctaaatggacacacaacggaggggaaatgtttgttgccttaaatcaaaaggggattcctgtaagaggaaaaaaaacgaagaaagaacaaaaaacagcccactttcttcctatggcaataacttaattgcatatggtatataaagaaccagttccagcagggagatttctttaagtggacttttcttctctctctctctctctctctctctatat

SEQ ID NO: 1686 - DNA, 1179 bp, Homo sapiens
  source 1..1179: mol_type = genomic DNA
gaatagtctaccccccttgcactctacctgacacagctgcagcctgcaattcactcgcactgcctgggattgcactggatccgtgtgctcagaacaaggtgaacgcccagctgcagccatgaagatctgtagcctcaccctgctctccttcctcctactggctgctcaggtgctcctggtggaggggaaaaaaaaagtgaagaatggacttcacagcaaagtggtctcagaacaaaaggacactctgggcaacacccagattaagcagaaaagcaggcccgggaacaaaggcaagtttgtcaccaaagaccaagccaactgcagatgggctgctactgagcaggaggagggcatctctctcaaggttgagtgcactcaattggaccatgaattttcctgtgtctttgctggcaatccaacctcatgcctaaagctcaaggatgagagagtctattggaaacaagttgcccggaatctgcgctcacagaaagacatctgtagatattccaagacagctgtgaaaaccagagtgtgcagaaaggattttccagaatccagtcttaagctagtcagctccactctatttgggaacacaaagcccaggaaggagaaaacagagatgtcccccagggagcacatcaaaggcaaagagaccaccccctctagcctagcagtgacccagaccatggccaccaaagctcccgagtgtgtggaggacccagatatggcaaaccagaggaagactgccctggagttctgtggagagacttggagctctctctgcacattcttcctcagcatagtgcaggacacgtcatgctaatgaggtcaaaagagaacgggttcccttaagagatgtcatgtcgtaagtccctctgtatactttaaagctctctacagtccccccaaaatatgaacttttgtgcttagtgagtgcaacgaaatatttaaacaagttttgtattttttgcttttgtgttttggaatttgccttatttttcttggatgcgatgttcagaggctgtttcctgcagcatgtatttccatggcccacacagctatgtgtttgagcagcgaagagtctttgagctgaatgagccagagtgataatttcagtgcaacgaactttctgctgaattaatggtaataaaactctgggtgtttttcagaaatacattc

SEQ ID NO: 1687 - DNA, 1359 bp, Homo sapiens
  source 1..1359: mol_type = genomic DNA
gaatcattgcactccctactagagcggatgtgatgagggaaaaggagaactcagcactttccctgcaggaaccggctccctcggaggggcgtggctgggaggagctgtgagtaacgtgccacagtgttgtaaaaacccagtgagtgttataaaaacccagtcagcctggctcctgttgaatagtctaccccccttgcactctacctgacacagctgcagcctgcaattcactcgcactgcctgggattgcactggatccgtgtgctcagaacaaggtgaacgcccagctgcagccatgaagatctgtagcctcaccctgctctccttcctcctactggctgctcaggtgctcctggtggaggggaaaaaaaaagtgaagaatggacttcacagcaaagtggtctcagaacaaaaggacactctgggcaacacccagattaagcagaaaagcaggcccgggaacaaaggcaagtttgtcaccaaagaccaagccaactgcagatgggctgctactgagcaggaggagggcatctctctcaaggttgagtgcactcaattggaccatgaattttcctgtgtctttgctggcaatccaacctcatgcctaaagctcaaggatgagagagtctattggaaacaagttgcccggaatctgcgctcacagaaagacatctgtagatattccaagacagctgtgaaaaccagagtgtgcagaaaggattttccagaatccagtcttaagctagtcagctccactctatttgggaacacaaagcccaggaaggagaaaacagagatgtcccccagggagcacatcaaaggcaaagagaccaccccctctagcctagcagtgacccagaccatggccaccaaagctcccgagtgtgtggaggacccagatatggcaaaccagaggaagactgccctggagttctgtggagagacttggagctctctctgcacattcttcctcagcatagtgcaggacacgtcatgctaatgaggtcaaaagagaacgggttcccttaagagatgtcatgtcgtaagtccctctgtatactttaaagctctctacagtccccccaaaatatgaacttttgtgcttagtgagtgcaacgaaatatttaaacaagttttgtattttttgcttttgtgttttggaatttgccttatttttcttggatgcgatgttcagaggctgtttcctgcagcatgtatttccatggcccacacagctatgtgtttgagcagcgaagagtctttgagctgaatgagccagagtgataatttcagtgcaacgaactttctgctgaattaatggtaataaaactctgggtgtttttcagaaatacattcaaa

SEQ ID NO: 1688 - DNA, 4132 bp, Homo sapiens
  source 1..4132: mol_type = genomic DNA
tctcccgagcggcgcccgcctcccgccggtgcccgcgccgggccgtggggggcagcatgcccgcgcgcgctgcctgaggacgccgcggcccccgcccccgccatgggcgcccctgcctgcgccctcgcgctctgcgtggccgtggccatcgtggccggcgcctcctcggagtccttggggacggagcagcgcgtcgtggggcgagcggcagaagtcccgggcccagagcccggccagcaggagcagttggtcttcggcagcggggatgctgtggagctgagctgtcccccgcccgggggtggtcccatggggcccactgtctgggtcaaggatggcacagggctggtgccctcggagcgtgtcctggtggggccccagcggctgcaggtgctgaatgcctcccacgaggactccggggcctacagctgccggcagcggctcacgcagcgcgtactgtgccacttcagtgtgcgggtgacagacgctccatcctcgggagatgacgaagacggggaggacgaggctgaggacacaggtgtggacacaggggccccttactggacacggcccgagcggatggacaagaagctgctggccgtgccggccgccaacaccgtccgcttccgctgcccagccgctggcaaccccactccctccatctcctggctgaagaacggcagggagttccgcggcgagcaccgcattggaggcatcaagctgcggcatcagcagtggagcctggtcatggaaagcgtggtgccctcggaccgcggcaactacacctgcgtcgtggagaacaagtttggcagcatccggcagacgtacacgctggacgtgctggagcgctccccgcaccggcccatcctgcaggcggggctgccggccaaccagacggcggtgctgggcagcgacgtggagttccactgcaaggtgtacagtgacgcacagccccacatccagtggctcaagcacgtggaggtgaatggcagcaaggtgggcccggacggcacaccctacgttaccgtgctcaagacggcgggcgctaacaccaccgacaaggagctagaggttctctccttgcacaacgtcacctttgaggacgccggggagtacacctgcctggcgggcaattctattgggttttctcatcactctgcgtggctggtggtgctgccagccgaggaggagctggtggaggctgacgaggcgggcagtgtgtatgcaggcatcctcagctacggggtgggcttcttcctgttcatcctggtggtggcggctgtgacgctctgccgcctgcgcagcccccccaagaaaggcctgggctcccccaccgtgcacaagatctcccgcttcccgctcaagcgacaggtgtccctggagtccaacgcgtccatgagctccaacacaccactggtgcgcatcgcaaggctgtcctcaggggagggccccacgctggccaatgtctccgagctcgagctgcctgccgaccccaaatgggagctgtctcgggcccggctgaccctgggcaagccccttggggagggctgcttcggccaggtggtcatggcggaggccatcggcattgacaaggaccgggccgccaagcctgtcaccgtagccgtgaagatgctgaaagacgatgccactgacaaggacctgtcggacctggtgtctgagatggagatgatgaagatgatcgggaaacacaaaaacatcatcaacctgctgggcgcctgcacgcagggcgggcccctgtacgtgctggtggagtacgcggccaagggtaacctgcgggagtttctgcgggcgcggcggcccccgggcctggactactccttcgacacctgcaagccgcccgaggagcagctcaccttcaaggacctggtgtcctgtgcctaccaggtggcccggggcatggagtacttggcctcccagaagtgcatccacagggacctggctgcccgcaatgtgctggtgaccgaggacaacgtgatgaagatcgcagacttcgggctggcccgggacgtgcacaacctcgactactacaagaagacgaccaacggccggctgcccgtgaagtggatggcgcctgaggccttgtttgaccgagtctacactcaccagagtgacgtctggtcctttggggtcctgctctgggagatcttcacgctggggggctccccgtaccccggcatccctgtggaggagctcttcaagctgctgaaggagggccaccgcatggacaagcccgccaactgcacacacgacctgtacatgatcatgcgggagtgctggcatgccgcgccctcccagaggcccaccttcaagcagctggtggaggacctggaccgtgtccttaccgtgacgtccaccgacgagtacctggacctgtcggcgcctttcgagcagtactccccgggtggccaggacacccccagctccagctcctcaggggacgactccgtgtttgcccacgacctgctgcccccggccccacccagcagtgggggctcgcggacgtgaagggccactggtccccaacaatgtgaggggtccctagcagcccaccctgctgctggtgcacagccactccccggcatgagactcagtgcagatggagagacagctacacagagctttggtctgtgtgtgtgtgtgtgcgtgtgtgtgtgtgtgtgtgcacatccgcgtgtgcctgtgtgcgtgcgcatcttgcctccaggtgcagaggtaccctgggtgtccccgctgctgtgcaacggtctcctgactggtgctgcagcaccgaggggcctttgttctggggggacccagtgcagaatgtaagtgggcccacccggtgggacccccgtggggcagggagctgggcccgacatggctccggcctctgcctttgcaccacgggacatcacagggtgggcctcggcccctcccacacccaaagctgagcctgcagggaagccccacatgtccagcaccttgtgcctggggtgttagtggcaccgcctccccacctccaggctttcccacttcccaccctgcccctcagagactgaaattacgggtacctgaagatgggagcctttaccttttatgcaaaaggtttattccggaaactagtgtacatttctataaatagatgctgtgtatatggtatatatacatatatatatataacatatatggaagaggaaaaggctggtacaacggaggcctgcgaccctgggggcacaggaggcaggcatggccctgggcggggcgtgggggggcgtggagggaggccccagggggtctcacccatgcaagcagaggaccagggccttttctggcaccgcagttttgttttaaaactggacctgtatatttgtaaagctatttatgggcccctggcactcttgttcccacaccccaacacttccagcatttagctggccacatggcggagagttttaatttttaacttattgacaaccgagaaggtttatcccgccgatagagggacggccaagaatgtacgtccagcctgccccggagctggaggatcccctccaagcctaaaaggttgttaatagttggaggtgattccagtgaagatattttatttcctttgtcctttttcaggagaattagatttctataggatttttctttaggagatttattttttggacttcaaagcaagctggtattttcatacaaattcttctaattgctgtgtgtcccaggcagggagacggtttccagggaggggccggccctgtgtgcaggttccgatgttattagatgttacaagtttatatatatctatatatataatttattgagtttttacaagatgtatttgttgtagacttaacacttcttacgcaatgcttctagagttttatagcctggactgctacctttcaaagcttggagggaagccgtgaattcagttggttcgttctgtactgttactgggccctgagtctgggcagctgtcccttgcttgcctgcagggccatggctcagggtggtctcttcttggggcccagtgcatggtggccagaggtgtcacccaaaccggcaggtgcgattttgttaacccagcgacgaactttccgaaaaataaagacacctggttgctaacctg

SEQ ID NO: 1689 - DNA, 513 bp, Homo sapiens
  source 1..513: mol_type = genomic DNA
gagtacctggacctgtcggcgcctttcgagcagtactccccgggtggccaggacacccccagctccagctcctcaggggacgactccgtgtttgcccacgacctgctggccactggtccccaacaatgtgaggggtccctagcagcccaccctgctgctggtgcacagccactccccggcatgagactcagtgcagatggagagacagctacacagagctttggtctgtgtgtgtgtgtgtgcgtgtgtgtgtgttgcacatccgcgtgtgcctgtgtgcgtgcgcatcttgcctccaggtgcagaggtaccctgggtgtccccgctgctgtgcaacggtctcctgactggtgctgcagcaccgaggggcctttgttctggggggacccagtgcagaatgtaagtgggcccacccggtgggaccccgggcagggagctgggcccgacatgcggcctctgcctttgcaccacgggacatcacagggtctcggcccctcccacacccaaagctga

SEQ ID NO: 1690 - DNA, 4293 bp, Homo sapiens
  source 1..4293: mol_type = genomic DNA
gtcgcgggcagctggcgccgcgcggtcctgctctgccggtcgcacggacgcaccggcgggccgccggccggagggacggggcgggagctgggcccgcggacagcgagccggagcgggagccgcgcgtagcgagccgggctccggcgctcgccagtctcccgagcggcgcccgcctcccgccggtgcccgcgccgggccgtggggggcagcatgcccgcgcgcgctgcctgaggacgccgcggcccccgcccccgccatgggcgcccctgcctgcgccctcgcgctctgcgtggccgtggccatcgtggccggcgcctcctcggagtccttggggacggagcagcgcgtcgtggggcgagcggcagaagtcccgggcccagagcccggccagcaggagcagttggtcttcggcagcggggatgctgtggagctgagctgtcccccgcccgggggtggtcccatggggcccactgtctgggtcaaggatggcacagggctggtgccctcggagcgtgtcctggtggggccccagcggctgcaggtgctgaatgcctcccacgaggactccggggcctacagctgccggcagcggctcacgcagcgcgtactgtgccacttcagtgtgcgggtgacagacgctccatcctcgggagatgacgaagacggggaggacgaggctgaggacacaggtgtggacacaggggccccttactggacacggcccgagcggatggacaagaagctgctggccgtgccggccgccaacaccgtccgcttccgctgcccagccgctggcaaccccactccctccatctcctggctgaagaacggcagggagttccgcggcgagcaccgcattggaggcatcaagctgcggcatcagcagtggagcctggtcatggaaagcgtggtgccctcggaccgcggcaactacacctgcgtcgtggagaacaagtttggcagcatccggcagacgtacacgctggacgtgctggagcgctccccgcaccggcccatcctgcaggcggggctgccggccaaccagacggcggtgctgggcagcgacgtggagttccactgcaaggtgtacagtgacgcacagccccacatccagtggctcaagcacgtggaggtgaatggcagcaaggtgggcccggacggcacaccctacgttaccgtgctcaagtcctggatcagtgagagtgtggaggccgacgtgcgcctccgcctggccaatgtgtcggagcgggacgggggcgagtacctctgtcgagccaccaatttcataggcgtggccgagaaggccttttggctgagcgttcacgggccccgagcagccgaggaggagctggtggaggctgacgaggcgggcagtgtgtatgcaggcatcctcagctacggggtgggcttcttcctgttcatcctggtggtggcggctgtgacgctctgccgcctgcgcagcccccccaagaaaggcctgggctcccccaccgtgcacaagatctcccgcttcccgctcaagcgacaggtgtccctggagtccaacgcgtccatgagctccaacacaccactggtgcgcatcgcaaggctgtcctcaggggagggccccacgctggccaatgtctccgagctcgagctgcctgccgaccccaaatgggagctgtctcgggcccggctgaccctgggcaagccccttggggagggctgcttcggccaggtggtcatggcggaggccatcggcattgacaaggaccgggccgccaagcctgtcaccgtagccgtgaagatgctgaaagacgatgccactgacaaggacctgtcggacctggtgtctgagatggagatgatgaagatgatcgggaaacacaaaaacatcatcaacctgctgggcgcctgcacgcagggcgggcccctgtacgtgctggtggagtacgcggccaagggtaacctgcgggagtttctgcgggcgcggcggcccccgggcctggactactccttcgacacctgcaagccgcccgaggagcagctcaccttcaaggacctggtgtcctgtgcctaccaggtggcccggggcatggagtacttggcctcccagaagtgcatccacagggacctggctgcccgcaatgtgctggtgaccgaggacaacgtgatgaagatcgcagacttcgggctggcccgggacgtgcacaacctcgactactacaagaagacgaccaacggccggctgcccgtgaagtggatggcgcctgaggccttgtttgaccgagtctacactcaccagagtgacgtctggtcctttggggtcctgctctgggagatcttcacgctggggggctccccgtaccccggcatccctgtggaggagctcttcaagctgctgaaggagggccaccgcatggacaagcccgccaactgcacacacgacctgtacatgatcatgcgggagtgctggcatgccgcgccctcccagaggcccaccttcaagcagctggtggaggacctggaccgtgtccttaccgtgacgtccaccgacgagtacctggacctgtcggcgcctttcgagcagtactccccgggtggccaggacacccccagctccagctcctcaggggacgactccgtgtttgcccacgacctgctgcccccggccccacccagcagtgggggctcgcggacgtgaagggccactggtccccaacaatgtgaggggtccctagcagcccaccctgctgctggtgcacagccactccccggcatgagactcagtgcagatggagagacagctacacagagctttggtctgtgtgtgtgtgtgtgcgtgtgtgtgtgtgtgtgtgcacatccgcgtgtgcctgtgtgcgtgcgcatcttgcctccaggtgcagaggtaccctgggtgtccccgctgctgtgcaacggtctcctgactggtgctgcagcaccgaggggcctttgttctggggggacccagtgcagaatgtaagtgggcccacccggtgggacccccgtggggcagggagctgggcccgacatggctccggcctctgcctttgcaccacgggacatcacagggtgggcctcggcccctcccacacccaaagctgagcctgcagggaagccccacatgtccagcaccttgtgcctggggtgttagtggcaccgcctccccacctccaggctttcccacttcccaccctgcccctcagagactgaaattacgggtacctgaagatgggagcctttaccttttatgcaaaaggtttattccggaaactagtgtacatttctataaatagatgctgtgtatatggtatatatacatatatatatataacatatatggaagaggaaaaggctggtacaacggaggcctgcgaccctgggggcacaggaggcaggcatggccctgggcggggcgtgggggggcgtggagggaggccccagggggtctcacccatgcaagcagaggaccagggccttttctggcaccgcagttttgttttaaaactggacctgtatatttgtaaagctatttatgggcccctggcactcttgttcccacaccccaacacttccagcatttagctggccacatggcggagagttttaatttttaacttattgacaaccgagaaggtttatcccgccgatagagggacggccaagaatgtacgtccagcctgccccggagctggaggatcccctccaagcctaaaaggttgttaatagttggaggtgattccagtgaagatattttatttcctttgtcctttttcaggagaattagatttctataggatttttctttaggagatttattttttggacttcaaagcaagctggtattttcatacaaattcttctaattgctgtgtgtcccaggcagggagacggtttccagggaggggccggccctgtgtgcaggttccgatgttattagatgttacaagtttatatatatctatatatataatttattgagtttttacaagatgtatttgttgtagacttaacacttcttacgcaatgcttctagagttttatagcctggactgctacctttcaaagcttggagggaagccgtgaattcagttggttcgttctgtactgttactgggccctgagtctgggcagctgtcccttgcttgcctgcagggccatggctcagggtggtctcttcttggggcccagtgcatggtggccagaggtgtcacccaaaccggcaggtgcgattttgttaacccagcgacgaactttccgaaaaataaagacacctggttgctaacctgg

SEQ ID NO: 1691 - DNA, 3951 bp, Homo sapiens
  source 1..3951: mol_type = genomic DNA
gtcgcgggcagctggcgccgcgcggtcctgctctgccggtcgcacggacgcaccggcgggccgccggccggagggacggggcgggagctgggcccgcggacagcgagccggagcgggagccgcgcgtagcgagccgggctccggcgctcgccagtctcccgagcggcgcccgcctcccgccggtgcccgcgccgggccgtggggggcagcatgcccgcgcgcgctgcctgaggacgccgcggcccccgcccccgccatgggcgcccctgcctgcgccctcgcgctctgcgtggccgtggccatcgtggccggcgcctcctcggagtccttggggacggagcagcgcgtcgtggggcgagcggcagaagtcccgggcccagagcccggccagcaggagcagttggtcttcggcagcggggatgctgtggagctgagctgtcccccgcccgggggtggtcccatggggcccactgtctgggtcaaggatggcacagggctggtgccctcggagcgtgtcctggtggggccccagcggctgcaggtgctgaatgcctcccacgaggactccggggcctacagctgccggcagcggctcacgcagcgcgtactgtgccacttcagtgtgcgggtgacagacgctccatcctcgggagatgacgaagacggggaggacgaggctgaggacacaggtgtggacacaggggccccttactggacacggcccgagcggatggacaagaagctgctggccgtgccggccgccaacaccgtccgcttccgctgcccagccgctggcaaccccactccctccatctcctggctgaagaacggcagggagttccgcggcgagcaccgcattggaggcatcaagctgcggcatcagcagtggagcctggtcatggaaagcgtggtgccctcggaccgcggcaactacacctgcgtcgtggagaacaagtttggcagcatccggcagacgtacacgctggacgtgctggagcgctccccgcaccggcccatcctgcaggcggggctgccggccaaccagacggcggtgctgggcagcgacgtggagttccactgcaaggtgtacagtgacgcacagccccacatccagtggctcaagcacgtggaggtgaatggcagcaaggtgggcccggacggcacaccctacgttaccgtgctcaaggtgtccctggagtccaacgcgtccatgagctccaacacaccactggtgcgcatcgcaaggctgtcctcaggggagggccccacgctggccaatgtctccgagctcgagctgcctgccgaccccaaatgggagctgtctcgggcccggctgaccctgggcaagccccttggggagggctgcttcggccaggtggtcatggcggaggccatcggcattgacaaggaccgggccgccaagcctgtcaccgtagccgtgaagatgctgaaagacgatgccactgacaaggacctgtcggacctggtgtctgagatggagatgatgaagatgatcgggaaacacaaaaacatcatcaacctgctgggcgcctgcacgcagggcgggcccctgtacgtgctggtggagtacgcggccaagggtaacctgcgggagtttctgcgggcgcggcggcccccgggcctggactactccttcgacacctgcaagccgcccgaggagcagctcaccttcaaggacctggtgtcctgtgcctaccaggtggcccggggcatggagtacttggcctcccagaagtgcatccacagggacctggctgcccgcaatgtgctggtgaccgaggacaacgtgatgaagatcgcagacttcgggctggcccgggacgtgcacaacctcgactactacaagaagacgaccaacggccggctgcccgtgaagtggatggcgcctgaggccttgtttgaccgagtctacactcaccagagtgacgtctggtcctttggggtcctgctctgggagatcttcacgctggggggctccccgtaccccggcatccctgtggaggagctcttcaagctgctgaaggagggccaccgcatggacaagcccgccaactgcacacacgacctgtacatgatcatgcgggagtgctggcatgccgcgccctcccagaggcccaccttcaagcagctggtggaggacctggaccgtgtccttaccgtgacgtccaccgacgagtacctggacctgtcggcgcctttcgagcagtactccccgggtggccaggacacccccagctccagctcctcaggggacgactccgtgtttgcccacgacctgctgcccccggccccacccagcagtgggggctcgcggacgtgaagggccactggtccccaacaatgtgaggggtccctagcagcccaccctgctgctggtgcacagccactccccggcatgagactcagtgcagatggagagacagctacacagagctttggtctgtgtgtgtgtgtgtgcgtgtgtgtgtgtgtgtgtgcacatccgcgtgtgcctgtgtgcgtgcgcatcttgcctccaggtgcagaggtaccctgggtgtccccgctgctgtgcaacggtctcctgactggtgctgcagcaccgaggggcctttgttctggggggacccagtgcagaatgtaagtgggcccacccggtgggacccccgtggggcagggagctgggcccgacatggctccggcctctgcctttgcaccacgggacatcacagggtgggcctcggcccctcccacacccaaagctgagcctgcagggaagccccacatgtccagcaccttgtgcctggggtgttagtggcaccgcctccccacctccaggctttcccacttcccaccctgcccctcagagactgaaattacgggtacctgaagatgggagcctttaccttttatgcaaaaggtttattccggaaactagtgtacatttctataaatagatgctgtgtatatggtatatatacatatatatatataacatatatggaagaggaaaaggctggtacaacggaggcctgcgaccctgggggcacaggaggcaggcatggccctgggcggggcgtgggggggcgtggagggaggccccagggggtctcacccatgcaagcagaggaccagggccttttctggcaccgcagttttgttttaaaactggacctgtatatttgtaaagctatttatgggcccctggcactcttgttcccacaccccaacacttccagcatttagctggccacatggcggagagttttaatttttaacttattgacaaccgagaaggtttatcccgccgatagagggacggccaagaatgtacgtccagcctgccccggagctggaggatcccctccaagcctaaaaggttgttaatagttggaggtgattccagtgaagatattttatttcctttgtcctttttcaggagaattagatttctataggatttttctttaggagatttattttttggacttcaaagcaagctggtattttcatacaaattcttctaattgctgtgtgtcccaggcagggagacggtttccagggaggggccggccctgtgtgcaggttccgatgttattagatgttacaagtttatatatatctatatatataatttattgagtttttacaagatgtatttgttgtagacttaacacttcttacgcaatgcttctagagttttatagcctggactgctacctttcaaagcttggagggaagccgtgaattcagttggttcgttctgtactgttactgggccctgagtctgggcagctgtcccttgcttgcctgcagggccatggctcagggtggtctcttcttggggcccagtgcatggtggccagaggtgtcacccaaaccggcaggtgcgattttgttaacccagcgacgaactttccgaaaaataaagacacctggttgctaacctgg

SEQ ID NO: 1692 - DNA, 4287 bp, Homo sapiens
  source 1..4287: mol_type = genomic DNA
gtcgcgggcagctggcgccgcgcggtcctgctctgccggtcgcacggacgcaccggcgggccgccggccggagggacggggcgggagctgggcccgcggacagcgagccggagcgggagccgcgcgtagcgagccgggctccggcgctcgccagtctcccgagcggcgcccgcctcccgccggtgcccgcgccgggccgtggggggcagcatgcccgcgcgcgctgcctgaggacgccgcggcccccgcccccgccatgggcgcccctgcctgcgccctcgcgctctgcgtggccgtggccatcgtggccggcgcctcctcggagtccttggggacggagcagcgcgtcgtggggcgagcggcagaagtcccgggcccagagcccggccagcaggagcagttggtcttcggcagcggggatgctgtggagctgagctgtcccccgcccgggggtggtcccatggggcccactgtctgggtcaaggatggcacagggctggtgccctcggagcgtgtcctggtggggccccagcggctgcaggtgctgaatgcctcccacgaggactccggggcctacagctgccggcagcggctcacgcagcgcgtactgtgccacttcagtgtgcgggtgacagacgctccatcctcgggagatgacgaagacggggaggacgaggctgaggacacaggtgtggacacaggggccccttactggacacggcccgagcggatggacaagaagctgctggccgtgccggccgccaacaccgtccgcttccgctgcccagccgctggcaaccccactccctccatctcctggctgaagaacggcagggagttccgcggcgagcaccgcattggaggcatcaagctgcggcatcagcagtggagcctggtcatggaaagcgtggtgccctcggaccgcggcaactacacctgcgtcgtggagaacaagtttggcagcatccggcagacgtacacgctggacgtgctggagcgctccccgcaccggcccatcctgcaggcggggctgccggccaaccagacggcggtgctgggcagcgacgtggagttccactgcaaggtgtacagtgacgcacagccccacatccagtggctcaagcacgtggaggtgaatggcagcaaggtgggcccggacggcacaccctacgttaccgtgctcaagacggcgggcgctaacaccaccgacaaggagctagaggttctctccttgcacaacgtcacctttgaggacgccggggagtacacctgcctggcgggcaattctattgggttttctcatcactctgcgtggctggtggtgctgccagccgaggaggagctggtggaggctgacgaggcgggcagtgtgtatgcaggcatcctcagctacggggtgggcttcttcctgttcatcctggtggtggcggctgtgacgctctgccgcctgcgcagcccccccaagaaaggcctgggctcccccaccgtgcacaagatctcccgcttcccgctcaagcgacaggtgtccctggagtccaacgcgtccatgagctccaacacaccactggtgcgcatcgcaaggctgtcctcaggggagggccccacgctggccaatgtctccgagctcgagctgcctgccgaccccaaatgggagctgtctcgggcccggctgaccctgggcaagccccttggggagggctgcttcggccaggtggtcatggcggaggccatcggcattgacaaggaccgggccgccaagcctgtcaccgtagccgtgaagatgctgaaagacgatgccactgacaaggacctgtcggacctggtgtctgagatggagatgatgaagatgatcgggaaacacaaaaacatcatcaacctgctgggcgcctgcacgcagggcgggcccctgtacgtgctggtggagtacgcggccaagggtaacctgcgggagtttctgcgggcgcggcggcccccgggcctggactactccttcgacacctgcaagccgcccgaggagcagctcaccttcaaggacctggtgtcctgtgcctaccaggtggcccggggcatggagtacttggcctcccagaagtgcatccacagggacctggctgcccgcaatgtgctggtgaccgaggacaacgtgatgaagatcgcagacttcgggctggcccgggacgtgcacaacctcgactactacaagaagacgaccaacggccggctgcccgtgaagtggatggcgcctgaggccttgtttgaccgagtctacactcaccagagtgacgtctggtcctttggggtcctgctctgggagatcttcacgctggggggctccccgtaccccggcatccctgtggaggagctcttcaagctgctgaaggagggccaccgcatggacaagcccgccaactgcacacacgacctgtacatgatcatgcgggagtgctggcatgccgcgccctcccagaggcccaccttcaagcagctggtggaggacctggaccgtgtccttaccgtgacgtccaccgacgagtacctggacctgtcggcgcctttcgagcagtactccccgggtggccaggacacccccagctccagctcctcaggggacgactccgtgtttgcccacgacctgctgcccccggccccacccagcagtgggggctcgcggacgtgaagggccactggtccccaacaatgtgaggggtccctagcagcccaccctgctgctggtgcacagccactccccggcatgagactcagtgcagatggagagacagctacacagagctttggtctgtgtgtgtgtgtgtgcgtgtgtgtgtgtgtgtgtgcacatccgcgtgtgcctgtgtgcgtgcgcatcttgcctccaggtgcagaggtaccctgggtgtccccgctgctgtgcaacggtctcctgactggtgctgcagcaccgaggggcctttgttctggggggacccagtgcagaatgtaagtgggcccacccggtgggacccccgtggggcagggagctgggcccgacatggctccggcctctgcctttgcaccacgggacatcacagggtgggcctcggcccctcccacacccaaagctgagcctgcagggaagccccacatgtccagcaccttgtgcctggggtgttagtggcaccgcctccccacctccaggctttcccacttcccaccctgcccctcagagactgaaattacgggtacctgaagatgggagcctttaccttttatgcaaaaggtttattccggaaactagtgtacatttctataaatagatgctgtgtatatggtatatatacatatatatatataacatatatggaagaggaaaaggctggtacaacggaggcctgcgaccctgggggcacaggaggcaggcatggccctgggcggggcgtgggggggcgtggagggaggccccagggggtctcacccatgcaagcagaggaccagggccttttctggcaccgcagttttgttttaaaactggacctgtatatttgtaaagctatttatgggcccctggcactcttgttcccacaccccaacacttccagcatttagctggccacatggcggagagttttaatttttaacttattgacaaccgagaaggtttatcccgccgatagagggacggccaagaatgtacgtccagcctgccccggagctggaggatcccctccaagcctaaaaggttgttaatagttggaggtgattccagtgaagatattttatttcctttgtcctttttcaggagaattagatttctataggatttttctttaggagatttattttttggacttcaaagcaagctggtattttcatacaaattcttctaattgctgtgtgtcccaggcagggagacggtttccagggaggggccggccctgtgtgcaggttccgatgttattagatgttacaagtttatatatatctatatatataatttattgagtttttacaagatgtatttgttgtagacttaacacttcttacgcaatgcttctagagttttatagcctggactgctacctttcaaagcttggagggaagccgtgaattcagttggttcgttctgtactgttactgggccctgagtctgggcagctgtcccttgcttgcctgcagggccatggctcagggtggtctcttcttggggcccagtgcatggtggccagaggtgtcacccaaaccggcaggtgcgattttgttaacccagcgacgaactttccgaaaaataaagacacctggttgctaacctgg

SEQ ID NO: 1693 - DNA, 4217 bp, Homo sapiens
  source 1..4217: mol_type = genomic DNA
gcggcgtcgcgggcagctggcgccgcgcggtcctgctctgccggtcgcacggacgcaccggcgggccgccggccggagggacggggcgggagctgggcccgcggacagcgagccggagcgggagccgcgcgtagcgagccgggctccggcgctcgccagtctcccgagcggcgcccgcctcccgccggtgcccgcgccgggccgtggggggcagcatgcccgcgcgcgctgcctgaggacgccgcggcccccgcccccgccatgggcgcccctgcctgcgccctcgcgctctgcgtggccgtggccatcgtggccggcgcctcctcggagtccttggggacggagcagcgcgtcgtggggcgagcggcagaagtcccgggcccagagcccggccagcaggagcagttggtcttcggcagcggggatgctgtggagctgagctgtcccccgcccgggggtggtcccatggggcccactgtctgggtcaaggatggcacagggctggtgccctcggagcgtgtcctggtggggccccagcggctgcaggtgctgaatgcctcccacgaggactccggggcctacagctgccggcagcggctcacgcagcgcgtactgtgccacttcagtgtgcgggtgacagacgctccatcctcgggagatgacgaagacggggaggacgaggctgaggacacaggtgtggacacaggggccccttactggacacggcccgagcggatggacaagaagctgctggccgtgccggccgccaacaccgtccgcttccgctgcccagccgctggcaaccccactccctccatctcctggctgaagaacggcagggagttccgcggcgagcaccgcattggaggcatcaagctgcggcatcagcagtggagcctggtcatggaaagcgtggtgccctcggaccgcggcaactacacctgcgtcgtggagaacaagtttggcagcatccggcagacgtacacgctggacgtgctggagcgctccccgcaccggcccatcctgcaggcggggctgccggccaaccagacggcggtgctgggcagcgacgtggagttccactgcaaggtgtacagtgacgcacagccccacatccagtggctcaagcacgtggaggtgaatggcagcaaggtgggcccggacggcacaccctacgttaccgtgctcaagacggcgggcgctaacaccaccgacaaggagctagaggttctctccttgcacaacgtcacctttgaggacgccggggagtacacctgcctggcgggcaattctattgggttttctcatcactctgcgtggctggtggtgctgccagccgaggaggagctggtggaggctgacgaggcgggcagtgtgtatgcaggcatcctcagctacggggtgggcttcttcctgttcatcctggtggtggcggctgtgacgctctgccgcctgcgcagcccccccaagaaaggcctgggctcccccaccgtgcacaagatctcccgcttcccgctcaagcgacagcaggtgtccctggagtccaacgcgtccatgagctccaacacaccactggtgcgcatcgcaaggctgtcctcaggggagggccccacgctggccaatgtctccgagctcgagctgcctgccgaccccaaatgggagctgtctcgggcccggctgaccctgggcaagccccttggggagggctgcttcggccaggtggtcatggcggaggccatcggcattgacaaggaccgggccgccaagcctgtcaccgtagccgtgaagatgctgaaagacgatgccactgacaaggacctgtcggacctggtgtctgagatggagatgatgaagatgatcgggaaacacaaaaacatcatcaacctgctgggcgcctgcacgcagggcgggcccctgtacgtgctggtggagtacgcggccaagggtaacctgcgggagtttctgcgggcgcggcggcccccgggcctggactactccttcgacacctgcaagccgcccgaggagcagctcaccttcaaggacctggtgtcctgtgcctaccaggtggcccggggcatggagtacttggcctcccagaagtgcatccacagggacctggctgcccgcaatgtgctggtgaccgaggacaacgtgatgaagatcgcagacttcgggctggcccgggacgtgcacaacctcgactactacaagaagacgaccaacctggtcctttggggtcctgctctgggagatcttcacgctggggggctccccgtaccccggcatccctgtggaggagctcttcaagctgctgaaggagggccaccgcatggacaagcccgccaactgcacacacgacctgtacatgatcatgcgggagtgctggcatgccgcgccctcccagaggcccaccttcaagcagctggtggaggacctggaccgtgtccttaccgtgacgtccaccgacgagtacctggacctgtcggcgcctttcgagcagtactccccgggtggccaggacacccccagctccagctcctcaggggacgactccgtgtttgcccacgacctgctgcccccggccccacccagcagtgggggctcgcggacgtgaagggccactggtccccaacaatgtgaggggtccctagcagcccaccctgctgctggtgcacagccactccccggcatgagactcagtgcagatggagagacagctacacagagctttggtctgtgtgtgtgtgtgtgcgtgtgtgtgtgtgtgtgtgcacatccgcgtgtgcctgtgtgcgtgcgcatcttgcctccaggtgcagaggtaccctgggtgtccccgctgctgtgcaacggtctcctgactggtgctgcagcaccgaggggcctttgttctggggggacccagtgcagaatgtaagtgggcccacccggtgggacccccgtggggcagggagctgggcccgacatggctccggcctctgcctttgcaccacgggacatcacagggtgggcctcggcccctcccacacccaaagctgagcctgcagggaagccccacatgtccagcaccttgtgcctggggtgttagtggcaccgcctccccacctccaggctttcccacttcccaccctgcccctcagagactgaaattacgggtacctgaagatgggagcctttaccttttatgcaaaaggtttattccggaaactagtgtacatttctataaatagatgctgtgtatatggtatatatacatatatatatataacatatatggaagaggaaaaggctggtacaacggaggcctgcgaccctgggggcacaggaggcaggcatggccctgggcggggcgtgggggggcgtggagggaggccccagggggtctcacccatgcaagcagaggaccagggccttttctggcaccgcagttttgttttaaaactggacctgtatatttgtaaagctatttatgggcccctggcactcttgttcccacaccccaacacttccagcatttagctggccacatggcggagagttttaatttttaacttattgacaaccgagaaggtttatcccgccgatagagggacggccaagaatgtacgtccagcctgccccggagctggaggatcccctccaagcctaaaaggttgttaatagttggaggtgattccagtgaagatattttatttcctttgtcctttttcaggagaattagatttctataggatttttctttaggagatttattttttggacttcaaagcaagctggtattttcatacaaattcttctaattgctgtgtgtcccaggcagggagacggtttccagggaggggccggccctgtgtgcaggttccgatgttattagatgttacaagtttatatatatctatatatataatttattgagtttttacaagatgtatttgttgtagacttaacacttcttacgcaatgcttctagagttttatagcctggactgctacctttcaaagcttggagggaagccgtgaattcagttggttcgttctgtactgttactgggccctgagtctgggcagctgtcccttgcttgcctgcagggccatggctcagggtggtctcttcttggggcccagtgcatggtggccagaggtgtcacccaaaccggcaggtgcgattttgttaacccagcgacgaactttccgaaaaataaagacacctggttgct

SEQ ID NO: 1694 - DNA, 3122 bp, Homo sapiens
  source 1..3122: mol_type = genomic DNA
cgctcgcggccacgccgccgtcgcgggtacattcctcgctcccggccgaggagcgctcgggctgtctgcggaccctgccgcgtgcaggggtcgcggccggctggagctgggagtgaggcggcggaggagccaggtgaggaggagccaggtgagcaggaccctgtgctgggcgcggagtcacgcaggctcgaggaaggcagttggtgggaagtccagcttgggtccctgagagctgtgagaaggagatgcggctgctgctggccctgttgggggtcctgctgagtgtgcctgggcctccagtcttgtccctggaggcctctgaggaagtggagcttgagccctgcctggctcccagcctggagcagcaagagcaggagctgacagtagcccttgggcagcctgtgcgtctgtgctgtgggcgggctgagcgtggtggccactggtacaaggagggcagtcgcctggcacctgctggccgtgtacggggctggaggggccgcctagagattgccagcttcctacctgaggatgctggccgctacctctgcctggcacgaggctccatgatcgtcctgcagaatctcaccttgattacaggtgactccttgacctccagcaacgatgatgaggaccccaagtcccatagggacccctcgaataggcacagttacccccagcaagcaccctactggacacacccccagcgcatggagaagaaactgcatgcagtacctgcggggaacaccgtcaagttccgctgtccagctgcaggcaaccccacgcccaccatccgctggcttaaggatggacaggcctttcatggggagaaccgcattggaggcattcggctgcgccatcagcactggagtctcgtgatggagagcgtggtgccctcggaccgcggcacatacacctgcctggtagagaacgctgtgggcagcatccgctataactacctgctagatgtgctggagcggtccccgcaccggcccatcctgcaggccgggctcccggccaacaccacagccgtggtgggcagcgacgtggagctgctgtgcaaggtgtacagcgatgcccagccccacatccagtggctgaagcacatcgtcatcaacggcagcagcttcggagccgacggtttcccctatgtgcaagtcctaaagactgcagacatcaatagctcagaggtggaggtcctgtacctgcggaacgtgtcagccgaggacgcaggcgagtacacctgcctcgcaggcaattccatcggcctctcctaccagtctgcctggctcacggtgctgccagaggaggaccccacatggaccgcagcagcgcccgaggccaggtatacggacatcatcctgtacgcgtcgggctccctggccttggctgtgctcctgctgctggccgggctgtatcgagggcaggcgctccacggccggcacccccgcccgcccgccactgtgcagaagctctcccgcttccctctggcccgacagttctccctggagtcaggctcttccggcaagtcaagctcatccctggtacgaggcgtgcgtctctcctccagcggccccgccttgctcgccggcctcgtgagtctagatctacctctcgacccactatgggagttcccccgggacaggctggtgcttgggaagcccctaggcgagggctgctttggccaggtagtacgtgcagaggcctttggcatggaccctgcccggcctgaccaagccagcactgtggccgtcaagatgctcaaagacaacgcctctgacaaggacctggccgacctggtctcggagatggaggtgatgaagctgatcggccgacacaagaacatcatcaacctgcttggtgtctgcacccaggaagggcccctgtacgtgatcgtggagtgcgccgccaagggaaacctgcgggagttcctgcgggcccggcgccccccaggccccgacctcagccccgacggtcctcggagcagtgaggggccgctctccttcccagtcctggtctcctgcgcctaccaggtggcccgaggcatgcagtatctggagtcccggaagtgtatccaccgggacctggctgcccgcaatgtgctggtgactgaggacaatgtgatgaagattgctgactttgggctggcccgcggcgtccaccacattgactactataagaaaaccagcaacggccgcctgcctgtgaagtggatggcgcccgaggccttgtttgaccgggtgtacacacaccagagtgacgtgtggtcttttgggatcctgctatgggagatcttcaccctcgggggctccccgtatcctggcatcccggtggaggagctgttctcgctgctgcgggagggacatcggatggaccgacccccacactgccccccagagctgtacgggctgatgcgtgagtgctggcacgcagcgccctcccagaggcctaccttcaagcagctggtggaggcgctggacaaggtcctgctggccgtctctgaggagtacctcgacctccgcctgaccttcggaccctattccccctctggtggggacgccagcagcacctgctcctccagcgattctgtcttcagccacgaccccctgccattgggatccagctccttccccttcgggtctggggtgcagacatgagcaaggctcaaggctgtgcaggcacataggctggtggccttgggccttggggctcagccacagcctgacacagtgctcgaccttgatagcatggggcccctggcccagagttgctgtgccgtgtccaagggccgtgcccttgcccttggagctgccgtgcctgtgtcctgatggcccaaatgtcagggttctgctcggcttcttggaccttggcgcttagtccccatcccgggtttggctgagcctggctggagagctgctatgctaaacctcctgcctcccaataccagcaggaggttctgggcctctgaaccccctttccccacacctccccctgctgctgctgccccagcgtcttgacgggagcattggcccctgagcccagagaagctggaagcctgccgaaaacaggagcaaatggcgttttataaattatttttttgaaataaagctctgtgtgcctgggtc

SEQ ID NO: 1695 - DNA, 2928 bp, Homo sapiens
  source 1..2928: mol_type = genomic DNA
acattcctcgctcccggccgaggagcgctcgggctgtctgcggaccctgccgcgtgcaggggtcgcggccggctggagctgggagtgaggcggcggaggagccaggtgaggaggagccaggaaggcagttggtgggaagtccagcttgggtccctgagagctgtgagaaggagatgcggctgctgctggccctgttgggggtcctgctgagtgtgcctgggcctccagtcttgtccctggaggcctctgaggaagtggagcttgagccctgcctggctcccagcctggagcagcaagagcaggagctgacagtagcccttgggcagcctgtgcgtctgtgctgtgggcgggctgagcgtggtggccactggtacaaggagggcagtcgcctggcacctgctggccgtgtacggggctggaggggccgcctagagattgccagcttcctacctgaggatgctggccgctacctctgcctggcacgaggctccatgatcgtcctgcagaatctcaccttgattacaggtgactccttgacctccagcaacgatgatgaggaccccaagtcccatagggacccctcgaataggcacagttacccccagcaagcaccctactggacacacccccagcgcatggagaagaaactgcatgcagtacctgcggggaacaccgtcaagttccgctgtccagctgcaggcaaccccacgcccaccatccgctggcttaaggatggacaggcctttcatggggagaaccgcattggaggcattcggctgcgccatcagcactggagtctcgtgatggagagcgtggtgccctcggaccgcggcacatacacctgcctggtagagaacgctgtgggcagcatccgctataactacctgctagatgtgctggagcggtccccgcaccggcccatcctgcaggccgggctcccggccaacaccacagccgtggtgggcagcgacgtggagctgctgtgcaaggtgtacagcgatgcccagccccacatccagtggctgaagcacatcgtcatcaacggcagcagcttcggagccgacggtttcccctatgtgcaagtcctaaagactgcagacatcaatagctcagaggtggaggtcctgtacctgcggaacgtgtcagccgaggacgcaggcgagtacacctgcctcgcaggcaattccatcggcctctcctaccagtctgcctggctcacggtgctgccaggtactgggcgcatcccccacctcacatgtgacagcctgactccagcaggcagaaccaagtctcccactttgcagttctccctggagtcaggctcttccggcaagtcaagctcatccctggtacgaggcgtgcgtctctcctccagcggccccgccttgctcgccggcctcgtgagtctagatctacctctcgacccactatgggagttcccccgggacaggctggtgcttgggaagcccctaggcgagggctgctttggccaggtagtacgtgcagaggcctttggcatggaccctgcccggcctgaccaagccagcactgtggccgtcaagatgctcaaagacaacgcctctgacaaggacctggccgacctggtctcggagatggaggtgatgaagctgatcggccgacacaagaacatcatcaacctgcttggtgtctgcacccaggaagggcccctgtacgtgatcgtggagtgcgccgccaagggaaacctgcgggagttcctgcgggcccggcgccccccaggccccgacctcagccccgacggtcctcggagcagtgaggggccgctctccttcccagtcctggtctcctgcgcctaccaggtggcccgaggcatgcagtatctggagtcccggaagtgtatccaccgggacctggctgcccgcaatgtgctggtgactgaggacaatgtgatgaagattgctgactttgggctggcccgcggcgtccaccacattgactactataagaaaaccagcaacggccgcctgcctgtgaagtggatggcgcccgaggccttgtttgaccgggtgtacacacaccagagtgacgtgtggtcttttgggatcctgctatgggagatcttcaccctcgggggctccccgtatcctggcatcccggtggaggagctgttctcgctgctgcgggagggacatcggatggaccgacccccacactgccccccagagctgtacgggctgatgcgtgagtgctggcacgcagcgccctcccagaggcctaccttcaagcagctggtggaggcgctggacaaggtcctgctggccgtctctgaggagtacctcgacctccgcctgaccttcggaccctattccccctctggtggggacgccagcagcacctgctcctccagcgattctgtcttcagccacgaccccctgccattgggatccagctccttccccttcgggtctggggtgcagacatgagcaaggctcaaggctgtgcaggcacataggctggtggccttgggccttggggctcagccacagcctgacacagtgctcgaccttgatagcatggggcccctggcccagagttgctgtgccgtgtccaagggccgtgcccttgcccttggagctgccgtgcctgtgtcctgatggcccaaatgtcagggttctgctcggcttcttggaccttggcgcttagtccccatcccgggtttggctgagcctggctggagagctgctatgctaaacctcctgcctcccaataccagcaggaggttctgggcctctgaaccccctttccccacacctccccctgctgctgctgccccagcgtcttgacgggagcattggcccctgagcccagagaagctggaagcctgccgaaaacaggagcaaatggcgttttataaattatttttttgaaataaagctctgtgtgcctggg

SEQ ID NO: 1696 - DNA, 3559 bp, Homo sapiens
  source 1..3559: mol_type = genomic DNA
ccctgtatgtggcaccaacagcatgtgccttgtgtgtgtgtgtgtccgtatgtgtgtgtgtgtatgcgtgtgtgtgtgtgtgtgtgttggccactgtcgtgtgcactaaatgctgtgtgtgtgacatgccccaagagtgtggcatttgccctgggtgtggcatccgcagcatgtggctgtgtgggtgtcaaggagtggtggctccttcagcatgcgttgcaaagtgcttgtgccctgcatgtgcggtgtgttctttgtacacaggaggctgcctcagatggggctgcggggtctgctgacctctgccctctgcccacagagccctgcctggctcccagcctggagcagcaagagcaggagctgacagtagcccttgggcagcctgtgcgtctgtgctgtgggcgggctgagcgtggtggccactggtacaaggagggcagtcgcctggcacctgctggccgtgtacggggctggaggggccgcctagagattgccagcttcctacctgaggatgctggccgctacctctgcctggcacgaggctccatgatcgtcctgcagaatctcaccttgattacaggtgactcccctccagcaacgatgatgaggaccccaagtcccatagggacccctcgaataggcacagttacccccagcaaggtcagtaggtctccaaggacttgtgtccccgctgctgctcatctgatcactgagaagaggaggcctgtgtgggaacacacggtcattctaggggccttcccctgccctccagcaccctactggacacacccccagcgcatggagaagaaactgcatgcagtacctgcggggaacaccgtcaagttccgctgtccagctgcaggcaaccccacgcccaccatccgctggcttaaggatggacaggcctttcatggggagaaccgcattggaggcattcggctgcgccatcagcactggagtctcgtgatggagagcgtggtgccctcggaccgcggcacatacacctgcctggtagagaacgctgtgggcagcatccgctataactacctgctagatgtgctggagcggtccccgcaccggcccatcctgcaggccgggctcccggccaacaccacagccgtggtgggcagcgacgtggagctgctgtgcaaggtgtacagcgatgcccagccccacatccagtggctgaagcacatcgtcatcaacggcagcagcttcggagccgacggtttcccctatgtgcaagtcctaaagactgcagacatcaatagctcagaggtggaggtcctgtacctgcggaacgtgtcagccgaggacgcaggcgagtacacctgcctcgcaggcaattccatcggcctctcctaccagtctgcctggctcacggtgctgccaggtgagcacctgaagggccaggagatgctgcgagatgcccctctgggccagcagtgggggctgtggcctgttgggtggtcagtctctgttggcctgtggggtctggcctggggggcagtgtgtggatttgtgggtttgagctgtatgacagcccctctgtgcctctccacacgtggccgtccatgtgaccgtctgctgaggtgtgggtgcctgggactgggcataactacagcttcctccgtgtgtgtccccacatatgttgggagctgggagggactggggtgcacggggcggccagtctcaccactgaccagtttgtctgtctgtgtgtgtccatgtgcgagggcagaggaggaccccacatggaccgcagcagcgcccgaggccaggtatacggacatcatcctgtacgcgtcgggctccctggccttggctgtgctcctgctgctggccgggctgtatcgagggcaggcgctccacggccggcacccccgcccgcccgccactgtgcagaagctctcccgcttccctctggcccgacagttctccctggagtcaggctcttccggcaagtcaagctcatccctggtacgaggcgtgcgtctctcctccagcggccccgccttgctcgccggcctcgtgagtctagatctacctctcgacccactatgggagttcccccgggacaggctggtgcttgggaagcccctaggcgagggctgctttggccaggtagtacgtgcagaggcctttggcatggaccctgcccggcctgaccaagccagcactgtggccgtcaagatgctcaaagacaacgcctctgacaaggacctggccgacctggtctcggagatggaggtgatgaagctgatcggccgacacaagaacatcatcaacctgcttggtgtctgcacccaggaagggcccctgtacgtgatcgtggagtgcgccgccaagggaaacctgcgggagttcctgcgggcccggcgccccccaggccccgacctcagccccgacggtcctcggagcagtgaggggccgctctccttcccagtcctggtctcctgcgcctaccaggtggcccgaggcatgcagtatctggagtcccggaagtgtatccaccgggacctggctgcccgcaatgtgctggtgactgaggacaatgtgatgaagattgctgactttgggctggcccgcggcgtccaccacattgactactataagaaaaccagcaacggccgcctgcctgtgaagtggatggcgcccgaggccttgtttgaccgggtgtacacacaccagagtgacgtgtggtcttttgggatcctgctatgggagatcttcaccctcgggggctccccgtatcctggcatcccggtggaggagctgttctcgctgctgcgggagggacatcggatggaccgacccccacactgccccccagagctgtacgggctgatgcgtgagtgctggcacgcagcgccctcccagaggcctaccttcaagcagctggtggaggcgctggacaaggtcctgctggccgtctctgaggagtacctcgacctccgcctgaccttcggaccctattccccctctggtggggacgccagcagcacctgctcctccagcgattctgtcttcagccacgaccccctgccattgggatccagctccttccccttcgggtctggggtgcagacatgagcaaggctcaaggctgtgcaggcacataggctggtggccttgggccttggggctcagccacagcctgacacagtgctcgaccttgatagcatggggcccctggcccagagttgctgtgccgtgtccaagggccgtgcccttgcccttggagctgccgtgcctgtgtcctgatggcccaaatgtcagggttctgctcggcttcttggaccttggcgcttagtccccatcccgggtttggctgagcctggctggagagctgctatgctaaacctcctgcctcccaataccagcaggaggttctgggcctctgaaccccctttccccacacctccccctgctgctgctgccccagcgtcttgacgggagcattggcccctgagcccagagaagctggaagcctgccgaaaacaggagcaaatggcgttttataaattatttttttgaaataaagctctgtgtgcctggg

SEQ ID NO: 1697 - DNA, 2418 bp, Homo sapiens
  source 1..2418: mol_type = genomic DNA
agtccagcttgggtccctgagagctgtgagaaggagatgcggctgctgctggccctgttgggggtcctgctgagtgtgcctgggcctccagtcttgtccctggaggcctctgaggaagtggagcttgagccctgcctggctcccagcctggagcagcaagagcaggagctgacagtagcccttgggcagcctgtgcgtctgtgctgtgggcgggctgagcgtggtggccactggtacaaggagggcagtcgcctggcacctgctggccgtgtacggggctggaggggccgcctagagattgccagcttcctacctgaggatgctggccgctacctctgcctggcacgaggctccatgatcgtcctgcagaatctcaccttgattacaggtgactccttgacctccagcaacgatgatgaggaccccaagtcccatagggacccctcgaataggcacagttacccccagcaagcaccctactggacacacccccagcgcatggagaagaaactgcatgcagtacctgcggggaacaccgtcaagttccgctgtccagctgcaggcaaccccacgcccaccatccgctggcttaaggatggacaggcctttcatggggagaaccgcattggaggcattcggctgcgccatcagcactggagtctcgtgatggagagcgtggtgccctcggaccgcggcacatacacctgcctggtagagaacgctgtgggcagcatccgctataactacctgctagatgtgctggagcggtccccgcaccggcccatcctgcaggccgggctcccggccaacaccacagccgtggtgggcagcgacgtggagctgctgtgcaaggtgtacagcgatgcccagccccacatccagtggctgaagcacatcgtcatcaacggcagcagcttcggagccgacggtttcccctatgtgcaagtcctaaagactgcagacatcaatagctcagaggtggaggtcctgtacctgcggaacgtgtcagccgaggacgcaggcgagtacacctgcctcgcaggcaattccatcggcctctcctaccagtctgcctggctcacggtgctgccaggtactgggcgcatcccccacctcacatgtgacagcctgactccagcaggcagaaccaagtctcccactttgcagttctccctggagtcaggctcttccggcaagtcaagctcatccctggtacgaggcgtgcgtctctcctccagcggccccgccttgctcgccggcctcgtgagtctagatctacctctcgacccactatgggagttcccccgggacaggctggtgcttgggaagcccctaggcgagggctgctttggccaggtagtacgtgcagaggcctttggcatggaccctgcccggcctgaccaagccagcactgtggccgtcaagatgctcaaagacaacgcctctgacaaggacctggccgacctggtctcggagatggaggtgatgaagctgatcggccgacacaagaacatcatcaacctgcttggtgtctgcacccaggaagggcccctgtacgtgatcgtggagtgcgccgccaagggaaacctgcgggagttcctgcgggcccggcgccccccaggccccgacctcagccccgacggtcctcggagcagtgaggggccgctctccttcccagtcctggtctcctgcgcctaccaggtggcccgaggcatgcagtatctggagtcccggaagtgtatccaccgggacctggctgcccgcaatgtgctggtgactgaggacaatgtgatgaagattgctgactttgggctggcccgcggcgtccaccacattgactactataagaaaaccagcaacggccgcctgcctgtgaagtggatggcgcccgaggccttgtttgaccgggtgtacacacaccagagtgacgtgtggtcttttgggatcctgctatgggagatcttcaccctcgggggctccccgtatcctggcatcccggtggaggagctgttctcgctgctgcgggagggacatcggatggaccgacccccacactgccccccagagctgtacgggctgatgcgtgagtgctggcacgcagcgccctcccagaggcctaccttcaagcagctggtggaggcgctggacaaggtcctgctggccgtctctgaggagtacctcgacctccgcctgaccttcggaccctattccccctctggtggggacgccagcagcacctgctcctccagcgattctgtcttcagccacgaccccctgccattgggatccagctccttccccttcgggtctggggtgcagacatgagcaaggctcaaggctgtgcaggcacataggctggtggccttgggccttggggctcagccacagcctgacacagtgctcgaccttgatagcatg

SEQ ID NO: 1698 - DNA, 2638 bp, Homo sapiens
  source 1..2638: mol_type = genomic DNA
acattcctcgctcccggccgaggagcgctcgggctgtctgcggaccctgccgcgtgcaggggtcgcggccggctggagctgggagtgaggcggcggaggagccaggtgaggaggagccaggaaggcagttggtgggaagtccagcttgggtccctgagagctgtgagaaggagatgcggctgctgctggccctgttgggggtcctgctgagtgtgcctgggcctccagtcttgtccctggaggcctctgaggaagtggagcttgagccctgcctggctcccagcctggagcagcaagagcaggagctgacagtagcccttgggcagcctgtgcgtctgtgctgtgggcgggctgagcgtggtggccactggtacaaggagggcagtcgcctggcacctgctggccgtgtacggggctggaggggccgcctagagattgccagcttcctacctgaggatgctggccgctacctctgcctggcacgaggctccatgatcgtcctgcagaatctcaccttgattacaggtgactccttgacctccagcaacgatgatgaggaccccaagtcccatagggacccctcgaataggcacagttacccccagcaagcaccctactggacacacccccagcgcatggagaagaaactgcatgcagtacctgcggggaacaccgtcaagttccgctgtccagctgcaggcaaccccacgcccaccatccgctggcttaaggatggacaggcctttcatggggagaaccgcattggaggcattcggctgcgccatcagcactggagtctcgtgatggagagcgtggtgccctcggaccgcggcacatacacctgcctggtagagaacgctgtgggcagcatccgctataactacctgctagatgtgctggagcggtccccgcaccggcccatcctgcaggccgggctcccggccaacaccacagccgtggtgggcagcgacgtggagctgctgtgcaaggtgtacagcgatgcccagccccacatccagtggctgaagcacatcgtcatcaacggcagcagcttcggagccgacggtttcccctatgtgcaagtcctaaagactgcagacatcaatagctcagaggtggaggtcctgtacctgcggaacgtgtcagccgaggacgcaggcgagtacacctgcctcgcaggcaattccatcggcctctcctaccagtctgcctggctcacggtgctgccagaggaggaccccacatggaccgcagcagcgcccgaggccaggtatacggacatcatcctgtacgcgtcgggctccctggccttggctgtgctcctgctgctggccgggctgtatcgagggcaggcgctccacggccggcacccccgcccgcccgccactgtgcagaagctctcccgcttccctctggcccgacagttctccctggagtcaggctcttccggcaagtcaagctcatccctggtacgaggcgtgcgtctctcctccagcggccccgccttgctcgccggcctcgtgagtctagatctacctctcgacccactatgggagttcccccgggacaggctggtgcttgggaagcccctaggcgagggctgctttggccaggtagtacgtgcagaggcctttggcatggaccctgcccggcctgaccaagccagcactgtggccgtcaagatgctcaaagacaacgcctctgacaaggacctggccgacctggtctcggagatggaggtgatgaagctgatcggccgacacaagaacatcatcaacctgcttggtgtctgcacccaggaagggcccctgtacgtgatcgtggagtgcgccgccaagggaaacctgcgggagttcctgcgggcccggcgccccccaggccccgacctcagccccgacggtcctcggagcagtgaggggccgctctccttcccagtcctggtctcctgcgcctaccaggtggcccgaggcatgcagtatctggagtcccggaagtgtatccaccgggacctggctgcccgcaatgtgctggtgactgaggacaatgtgatgaagattgctgactttgggctggcccgcggcgtccaccacattgactactataagaaaaccagcaacggccgcctgcctgtgaagtggatggcgcccgaggccttgtttgaccgggtgtacacacaccagagtgacgtgtggtcttttgggatcctgctatgggagatcttcaccctcgggggctccccgtatcctggcatcccggtggaggagctgttctcgctgctgcgggagggacatcggatggaccgacccccacactgccccccagagctgtacgggctgatgcgtgagtgctggcacgcagcgccctcccagaggcctaccttcaagcagctggtggaggcgctggacaaggtcctgctggccgtctctgaggagtacctcgacctccgcctgaccttcggaccctattccccctctggtggggacgccagcagcacctgctcctccagcgattctgtcttcagccacgaccccctgccattgggatccagctccttccccttcgggtctggggtgcagacatgagcaaggctcaaggctgtgcaggcacataggctggtggccttgggccttggggctca

SEQ ID NO: 1699 - DNA, 770 bp, Homo sapiens
  source 1..770: mol_type = genomic DNA
gtcgcgggtacattcctcgctcccggccgaggagcgctcgggctgtctgcggaccctgccgcgtgcaggggtcgcggccggctggagctgggagtgaggcggcggaggagccaggaaggcagttggtgggaagtccagcttgggtccctgagagctgtgagaaggagatgcggctgctgctggccctgttgggggtcctgctgagtgtgcctgggcctccagtcttgtccctggaggcctctgaggaagtggagcttgagccctgcctggctcccagcctggagcagcaagagcaggagctgacagtagcccttgggcagcctgtgcgtctgtgctgtgggcgggctgagcgtggtggccactggtacaaggagggcagtcgcctggcacctgctggccgtgtacggggctggaggggccgcctagagattgccagcttcctacctgaggatgctggccgctacctctgcctggcacgaggctccatgatcgtcctgcagaatctcaccttgattacaggtgactccttgacctccagcaacgatgatgaggaccccaagtcccatagggacccctcgaataggcacagttacccccagcaagcaccctactggacacacccccagcgcatggagaagaaactgcatgcagtacctgcggggaacaccgtcaagttccgctgtccagctgcaggcaaccccacgcccaccatccgctggcttaaggatggacaggcctttcatggggagaaccgcattggaggcattcgg

SEQ ID NO: 1700 - DNA, 709 bp, Homo sapiens
  source 1..709: mol_type = genomic DNA
attcctcgctcccggccgaggagcgctcgggctgtctgcggaccctgccgcgtgcaggggtcgcggccggctggagctgggagtgaggcggcggaggagccaggtgaggaggagccagagacggggtttcaccgtgttagccaggatgttctcgatctcctgacctcgtgatccgcccacctcggcctcccaaagtgctgggattacaggtgtgaaccatcgcgcccagccgacttgtagttttttaaaactctgctggaagatgaaggttgaagagccgagggagaggatgtttccagaggcccatgcaagagatggccatgacctgccttgagaaggggcaggggaagccagatggactggaagtggagtggcagtgaccaaggaggaggaggaaggcagttggtgggaagtccagcttgggtccctgagagctgtgagaaggagatgcggctgctgctggccctgttgggggtcctgctgagtgtgcctgggcctccagtcttgtccctggaggcctctgaggaagtggagcttgagccctgcctggctcccagcctggagcagcaagagcaggagctgacagtagcccttgggcagcctgtgcgtctgtgctgtgggcgggctgagcgtggtggccactggtacaaggagggcagtcgcctggcacctgctggccgtgtacggggctggaggggccgcctagaga

SEQ ID NO: 1701 - DNA, 594 bp, Homo sapiens
  source 1..594: mol_type = genomic DNA
tcttcgcgccggcggcagagatgagggacctgaggccccgaaaagttcagtcacttagtgcccgggggcctccagcgcgagtgcgggaggctgaaggagaacccaggactgtctgatgcctaaggcaggccctccattcccacgtggggggtggtcggtcagcggtcagcagccatgggtgactcgactaaggactctgatatcagggcagcctggggaaggcagttggtgggaagtccagcttgggtccctgagagctgtgagaaggagatgcggctgctgctggccctgttgggggtcctgctgagtgtgcctgggcctccagtcttgtccctggaggcctctgaggaagtggagcttgagccctgcctggctcccagcctggagcagcaagagcaggagctgacagtagcccttgggcagcctgtgcgtctgtgctgtgggcgggctgagcgtggtggccactggtacaaggagggcagtcgcctggcacctgctggccgtgtacggggctggaggggccgcctagagattgccagcttcctacctgaggatgctggccgctacctctgcctggcacgaggctccatgatc

SEQ ID NO: 1702 - DNA, 552 bp, Homo sapiens
  source 1..552: mol_type = genomic DNA
acattcctcgctcccggccgaggagcgctcgggctgtctgcggaccctgccgcgtgcaggggtcgcggccggctggagctgggagtgaggcggcggaggagccaggtgaggaggagccaggtgagcaggaccctgtgctgggcgcggagtcacgcaggctcgagttggtgggaagtccagcttgggtccctgagagctgtgagaaggagatgcggctgctgctggccctgttgggggtcctgctgagtgtgcctgggcctccagtcttgtccctggaggcctctgaggaagtggagcttgagccctgcctggctcccagcctggagcagcaagagcaggagctgacagtagcccttgggcagcctgtgcgtctgtgctgtgggcgggctgagcgtggtggccactggtacaaggagggcagtcgcctggcacctgctggccgtgtacggggctggaggggccgcctagagattgccagcttcctacctgaggatgctggccgctacctctgcctggcacgaggctccatgatcgtcctgcagaatctcacct

SEQ ID NO: 1703 - DNA, 8527 bp, Homo sapiens
  source 1..8527: mol_type = genomic DNA
gcccgcgccggctgtgctgcacagggggaggagagggaaccccaggcgcgagcgggaagaggggacctgcagccacaacttctctggtcctctgcatcccttctgtccctccacccgtccccttccccaccctctggcccccaccttcttggaggcgacaacccccgggaggcattagaagggatttttcccgcaggttgcgaagggaagcaaacttggtggcaacttgcctcccggtgcgggcgtctctcccccaccgtctcaacatgcttaggggtccggggcccgggctgctgctgctggccgtccagtgcctggggacagcggtgccctccacgggagcctcgaagagcaagaggcaggctcagcaaatggttcagccccagtccccggtggctgtcagtcaaagcaagcccggttgttatgacaatggaaaacactatcagataaatcaacagtgggagcggacctacctaggcaatgcgttggtttgtacttgttatggaggaagccgaggttttaactgcgagagtaaacctgaagctgaagagacttgctttgacaagtacactgggaacacttaccgagtgggtgacacttatgagcgtcctaaagactccatgatctgggactgtacctgcatcggggctgggcgagggagaataagctgtaccatcgcaaaccgctgccatgaagggggtcagtcctacaagattggtgacacctggaggagaccacatgagactggtggttacatgttagagtgtgtgtgtcttggtaatggaaaaggagaatggacctgcaagcccatagctgagaagtgttttgatcatgctgctgggacttcctatgtggtcggagaaacgtgggagaagccctaccaaggctggatgatggtagattgtacttgcctgggagaaggcagcggacgcatcacttgcacttctagaaatagatgcaacgatcaggacacaaggacatcctatagaattggagacacctggagcaagaaggataatcgaggaaacctgctccagtgcatctgcacaggcaacggccgaggagagtggaagtgtgagaggcacacctctgtgcagaccacatcgagcggatctggccccttcaccgatgttcgtgcagctgtttaccaaccgcagcctcacccccagcctcctccctatggccactgtgtcacagacagtggtgtggtctactctgtggggatgcagtggctgaagacacaaggaaataagcaaatgctttgcacgtgcctgggcaacggagtcagctgccaagagacagctgtaacccagacttacggtggcaactcaaatggagagccatgtgtcttaccattcacctacaatggcaggacgttctactcctgcaccacagaagggcgacaggacggacatctttggtgcagcacaacttcgaattatgagcaggaccagaaatactctttctgcacagaccacactgttttggttcagactcgaggaggaaattccaatggtgccttgtgccacttccccttcctatacaacaaccacaattacactgattgcacttctgagggcagaagagacaacatgaagtggtgtgggaccacacagaactatgatgccgaccagaagtttgggttctgccccatggctgcccacgaggaaatctgcacaaccaatgaaggggtcatgtaccgcattggagatcagtgggataagcagcatgacatgggtcacatgatgaggtgcacgtgtgttgggaatggtcgtggggaatggacatgcattgcctactcgcagcttcgagatcagtgcattgttgatgacatcacttacaatgtgaacgacacattccacaagcgtcatgaagaggggcacatgctgaactgtacatgcttcggtcagggtcggggcaggtggaagtgtgatcccgtcgaccaatgccaggattcagagactgggacgttttatcaaattggagattcatgggagaagtatgtgcatggtgtcagataccagtgctactgctatggccgtggcattggggagtggcattgccaacctttacagacctatccaagctcaagtggtcctgtcgaagtatttatcactgagactccgagtcagcccaactcccaccccatccagtggaatgcaccacagccatctcacatttccaagtacattctcaggtggagacctaaaaattctgtaggccgttggaaggaagctaccataccaggccacttaaactcctacaccatcaaaggcctgaagcctggtgtggtatacgagggccagctcatcagcatccagcagtacggccaccaagaagtgactcgctttgacttcaccaccaccagcaccagcacacctgtgaccagcaacaccgtgacaggagagacgactcccttttctcctcttgtggccacttctgaatctgtgaccgaaatcacagccagtagctttgtggtctcctgggtctcagcttccgacaccgtgtcgggattccgggtggaatatgagctgagtgaggagggagatgagccacagtacctggatcttccaagcacagccacttctgtgaacatccctgacctgcttcctggccgaaaatacattgtaaatgtctatcagatatctgaggatggggagcagagtttgatcctgtctacttcacaaacaacagcgcctgatgcccctcctgacacgactgtggaccaagttgatgacacctcaattgttgttcgctggagcagaccccaggctcccatcacagggtacagaatagtctattcgccatcagtagaaggtagcagcacagaactcaaccttcctgaaactgcaaactccgtcaccctcagtgacttgcaacctggtgttcagtataacatcactatctatgctgtggaagaaaatcaagaaagtacacctgttgtcattcaacaagaaaccactggcaccccacgctcagatacagtgccctctcccagggacctgcagtttgtggaagtgacagacgtgaaggtcaccatcatgtggacaccgcctgagagtgcagtgaccggctaccgtgtggatgtgatccccgtcaacctgcctggcgagcacgggcagaggctgcccatcagcaggaacacctttgcagaagtcaccgggctgtcccctggggtcacctattacttcaaagtctttgcagtgagccatgggagggagagcaagcctctgactgctcaacagacaaccaaactggatgctcccactaacctccagtttgtcaatgaaactgattctactgtcctggtgagatggactccacctcgggcccagataacaggataccgactgaccgtgggccttacccgaagaggacagcccaggcagtacaatgtgggtccctctgtctccaagtacccactgaggaatctgcagcctgcatctgagtacaccgtatccctcgtggccataaagggcaaccaagagagccccaaagccactggagtctttaccacactgcagcctgggagctctattccaccttacaacaccgaggtgactgagaccaccattgtgatcacatggacgcctgctccaagaattggttttaagctgggtgtacgaccaagccagggaggagaggcaccacgagaagtgacttcagactcaggaagcatcgttgtgtccggcttgactccaggagtagaatacgtctacaccatccaagtcctgagagatggacaggaaagagatgcgccaattgtaaacaaagtggtgacaccattgtctccaccaacaaacttgcatctggaggcaaaccctgacactggagtgctcacagtctcctgggagaggagcaccaccccagacattactggttatagaattaccacaacccctacaaacggccagcagggaaattctttggaagaagtggtccatgctgatcagagctcctgcacttttgataacctgagtcccggcctggagtacaatgtcagtgtttacactgtcaaggatgacaaggaaagtgtccctatctctgataccatcatcccagaggtgccccaactcactgacctaagctttgttgatataaccgattcaagcatcggcctgaggtggaccccgctaaactcttccaccattattgggtaccgcatcacagtagttgcggcaggagaaggtatccctatttttgaagattttgtggactcctcagtaggatactacacagtcacagggctggagccgggcattgactatgatatcagcgttatcactctcattaatggcggcgagagtgcccctactacactgacacaacaaacggctgttcctcctcccactgacctgcgattcttttctgatattactgccaactcttttactgtgcactggattgctcctcgagccaccatcactggctacaggatccgccatcatcccgagcacttcagtgggagacctcgagaagatcgggtgccccactctcggaattccatcaccctcaccaacctcactccaggcacagagtatgtggtcagcatcgttgctcttaatggcagagaggaaagtcccttattgattggccaacaatcaacagtttctgatgttccgagggacctggaagttgttgctgcgacccccaccagcctactgatcagctgggatgctcctgctgtcacagtgagatattacaggatcacttacggagagacaggaggaaatagccctgtccaggagttcactgtgcctgggagcaagtctacagctaccatcagcggccttaaacctggagttgattataccatcactgtgtatgctgtcactggccgtggagacagccccgcaagcagcaagccaatttccattaattaccgaacagaaattgacaaaccatcccagatgcaagtgaccgatgttcaggacaacagcattagtgtcaagtggctgccttcaagttcccctgttactggttacagagtaaccaccactcccaaaaatggaccaggaccaacaaaaactaaaactgcaggtccagatcaaacagaaatgactattgaaggcttgcagcccacagtggagtatgtggttagtgtctatgctcagaatccaagcggagagagtcagcctctggttcagactgcagtaaccaacattgatcgccctaaaggactggcattcactgatgtggatgtcgattccatcaaaattgcttgggaaagcccacaggggcaagtttccaggtacagggtgacctactcgagccctgaggatggaatccatgagctattccctgcacctgatggtgaagaagacactgcagagctgcaaggcctcagaccgggttctgagtacacagtcagtgtggttgccttgcacgatgatatggagagccagcccctgattggaacccagtccacagctattcctgcaccaactgacctgaagttcactcaggtcacacccacaagcctgagcgcccagtggacaccacccaatgttcagctcactggatatcgagtgcgggtgacccccaaggagaagaccggaccaatgaaagaaatcaaccttgctcctgacagctcatccgtggttgtatcaggacttatggtggccaccaaatatgaagtgagtgtctatgctcttaaggacactttgacaagcagaccagctcagggagttgtcaccactctggagaatgtcagcccaccaagaagggctcgtgtgacagatgctactgagaccaccatcaccattagctggagaaccaagactgagacgatcactggcttccaagttgatgccgttccagccaatggccagactccaatccagagaaccatcaagccagatgtcagaagctacaccatcacaggtttacaaccaggcactgactacaagatctacctgtacaccttgaatgacaatgctcggagctcccctgtggtcatcgacgcctccactgccattgatgcaccatccaacctgcgtttcctggccaccacacccaattccttgctggtatcatggcagccgccacgtgccaggattaccggctacatcatcaagtatgagaagcctgggtctcctcccagagaagtggtccctcggccccgccctggtgtcacagaggctactattactggcctggaaccgggaaccgaatatacaatttatgtcattgccctgaagaataatcagaagagcgagcccctgattggaaggaaaaagacagacgagcttccccaactggtaacccttccacaccccaatcttcatggaccagagatcttggatgttccttccacagttcaaaagacccctttcgtcacccaccctgggtatgacactggaaatggtattcagcttcctggcacttctggtcagcaacccagtgttgggcaacaaatgatctttgaggaacatggttttaggcggaccacaccgcccacaacggccacccccataaggcataggccaagaccatacccgccgaatgtaggtgaggaaatccaaattggtcacatccccagggaagatgtagactatcacctgtacccacacggtccgggactcaatccaaatgcctctacaggacaagaagctctctctcagacaaccatctcatgggccccattccaggacacttctgagtacatcatttcatgtcatcctgttggcactgatgaagaacccttacagttcagggttcctggaacttctaccagtgccactctgacaggcctcaccagaggtgccacctacaacgtcatagtggaggcactgaaagaccagcagaggcataaggttcgggaagaggttgttaccgtgggcaactctgtcaacgaaggcttgaaccaacctacggatgactcgtgctttgacccctacacagtttcccattatgccgttggagatgagtgggaacgaatgtctgaatcaggctttaaactgttgtgccagtgcttaggctttggaagtggtcatttcagatgtgattcatctagatggtgccatgacaatggtgtgaactacaagattggagagaagtgggaccgtcagggagaaaatggccagatgatgagctgcacatgtcttgggaacggaaaaggagaattcaagtgtgaccctcatgaggcaacgtgttatgatgatgggaagacataccacgtaggagaacagtggcagaaggaatatctcggtgccatttgctcctgcacatgctttggaggccagcggggctggcgctgtgacaactgccgcagacctgggggtgaacccagtcccgaaggcactactggccagtcctacaaccagtattctcagagataccatcagagaacaaacactaatgttaattgcccaattgagtgcttcatgcctttagatgtacaggctgacagagaagattcccgagagtaaatcatctttccaatccagaggaacaagcatgtctctctgccaagatccatctaaactggagtgatgttagcagacccagcttagagttcttctttctttcttaagccctttgctctggaggaagttctccagcttcagctcaactcacagcttctccaagcatcaccctgggagtttcctgagggttttctcataaatgagggctgcacattgcctgttctgcttcgaagtattcaataccgctcagtattttaaatgaagtgattctaagatttggtttgggatcaataggaaagcatatgcagccaaccaagatgcaaatgttttgaaatgatatgaccaaaattttaagtaggaaagtcacccaaacacttctgctttcacttaagtgtctggcccgcaatactgtaggaacaagcatgatcttgttactgtgatattttaaatatccacagtactcactttttccaaatgatcctagtaattgcctagaaatatctttctcttacctgttatttatcaatttttcccagtatttttatacggaaaaaattgtattgaaaacacttagtatgcagttgataagaggaatttggtataattatggtgggtgattattttttatactgtatgtgccaaagctttactactgtggaaagacaactgttttaataaaagatttacattccacaacttgaagttcatctatttgatataagacaccttcgggggaaataattcctgtgaatattctttttcaattcagcaaacatttgaaaatctatgatgtgcaagtctaattgttgatttcagtacaagattttctaaatcagttgctacaaaaactgattggtttttgtcacttcatctcttcactaatggagatagctttacactttctgctttaatagatttaagtggaccccaatatttattaaaattgctagtttaccgttcagaagtataatagaaataatctttagttgctcttttctaaccattgtaattcttcccttcttccctccacctttccttcattgaataaacctctgttcaaagagattgcctgcaagggaaataaaaatgactaagatatt

SEQ ID NO: 1704 - DNA, 8708 bp, Homo sapiens
  source 1..8708: mol_type = genomic DNA
gcccgcgccggctgtgctgcacagggggaggagagggaaccccaggcgcgagcgggaagaggggacctgcagccacaacttctctggtcctctgcatcccttctgtccctccacccgtccccttccccaccctctggcccccaccttcttggaggcgacaacccccgggaggcattagaagggatttttcccgcaggttgcgaagggaagcaaacttggtggcaacttgcctcccggtgcgggcgtctctcccccaccgtctcaacatgcttaggggtccggggcccgggctgctgctgctggccgtccagtgcctggggacagcggtgccctccacgggagcctcgaagagcaagaggcaggctcagcaaatggttcagccccagtccccggtggctgtcagtcaaagcaagcccggttgttatgacaatggaaaacactatcagataaatcaacagtgggagcggacctacctaggcaatgcgttggtttgtacttgttatggaggaagccgaggttttaactgcgagagtaaacctgaagctgaagagacttgctttgacaagtacactgggaacacttaccgagtgggtgacacttatgagcgtcctaaagactccatgatctgggactgtacctgcatcggggctgggcgagggagaataagctgtaccatcgcaaaccgctgccatgaagggggtcagtcctacaagattggtgacacctggaggagaccacatgagactggtggttacatgttagagtgtgtgtgtcttggtaatggaaaaggagaatggacctgcaagcccatagctgagaagtgttttgatcatgctgctgggacttcctatgtggtcggagaaacgtgggagaagccctaccaaggctggatgatggtagattgtacttgcctgggagaaggcagcggacgcatcacttgcacttctagaaatagatgcaacgatcaggacacaaggacatcctatagaattggagacacctggagcaagaaggataatcgaggaaacctgctccagtgcatctgcacaggcaacggccgaggagagtggaagtgtgagaggcacacctctgtgcagaccacatcgagcggatctggccccttcaccgatgttcgtgcagctgtttaccaaccgcagcctcacccccagcctcctccctatggccactgtgtcacagacagtggtgtggtctactctgtggggatgcagtggctgaagacacaaggaaataagcaaatgctttgcacgtgcctgggcaacggagtcagctgccaagagacagctgtaacccagacttacggtggcaactcaaatggagagccatgtgtcttaccattcacctacaatggcaggacgttctactcctgcaccacagaagggcgacaggacggacatctttggtgcagcacaacttcgaattatgagcaggaccagaaatactctttctgcacagaccacactgttttggttcagactcgaggaggaaattccaatggtgccttgtgccacttccccttcctatacaacaaccacaattacactgattgcacttctgagggcagaagagacaacatgaagtggtgtgggaccacacagaactatgatgccgaccagaagtttgggttctgccccatggctgcccacgaggaaatctgcacaaccaatgaaggggtcatgtaccgcattggagatcagtgggataagcagcatgacatgggtcacatgatgaggtgcacgtgtgttgggaatggtcgtggggaatggacatgcattgcctactcgcagcttcgagatcagtgcattgttgatgacatcacttacaatgtgaacgacacattccacaagcgtcatgaagaggggcacatgctgaactgtacatgcttcggtcagggtcggggcaggtggaagtgtgatcccgtcgaccaatgccaggattcagagactgggacgttttatcaaattggagattcatgggagaagtatgtgcatggtgtcagataccagtgctactgctatggccgtggcattggggagtggcattgccaacctttacagacctatccaagctcaagtggtcctgtcgaagtatttatcactgagactccgagtcagcccaactcccaccccatccagtggaatgcaccacagccatctcacatttccaagtacattctcaggtggagacctaaaaattctgtaggccgttggaaggaagctaccataccaggccacttaaactcctacaccatcaaaggcctgaagcctggtgtggtatacgagggccagctcatcagcatccagcagtacggccaccaagaagtgactcgctttgacttcaccaccaccagcaccagcacacctgtgaccagcaacaccgtgacaggagagacgactcccttttctcctcttgtggccacttctgaatctgtgaccgaaatcacagccagtagctttgtggtctcctgggtctcagcttccgacaccgtgtcgggattccgggtggaatatgagctgagtgaggagggagatgagccacagtacctggatcttccaagcacagccacttctgtgaacatccctgacctgcttcctggccgaaaatacattgtaaatgtctatcagatatctgaggatggggagcagagtttgatcctgtctacttcacaaacaacagcgcctgatgcccctcctgacacgactgtggaccaagttgatgacacctcaattgttgttcgctggagcagaccccaggctcccatcacagggtacagaatagtctattcgccatcagtagaaggtagcagcacagaactcaaccttcctgaaactgcaaactccgtcaccctcagtgacttgcaacctggtgttcagtataacatcactatctatgctgtggaagaaaatcaagaaagtacacctgttgtcattcaacaagaaaccactggcaccccacgctcagatacagtgccctctcccagggacctgcagtttgtggaagtgacagacgtgaaggtcaccatcatgtggacaccgcctgagagtgcagtgaccggctaccgtgtggatgtgatccccgtcaacctgcctggcgagcacgggcagaggctgcccatcagcaggaacacctttgcagaagtcaccgggctgtcccctggggtcacctattacttcaaagtctttgcagtgagccatgggagggagagcaagcctctgactgctcaacagacaaccaaactggatgctcccactaacctccagtttgtcaatgaaactgattctactgtcctggtgagatggactccacctcgggcccagataacaggataccgactgaccgtgggccttacccgaagaggacagcccaggcagtacaatgtgggtccctctgtctccaagtacccactgaggaatctgcagcctgcatctgagtacaccgtatccctcgtggccataaagggcaaccaagagagccccaaagccactggagtctttaccacactgcagcctgggagctctattccaccttacaacaccgaggtgactgagaccaccattgtgatcacatggacgcctgctccaagaattggttttaagctgggtgtacgaccaagccagggaggagaggcaccacgagaagtgacttcagactcaggaagcatcgttgtgtccggcttgactccaggagtagaatacgtctacaccatccaagtcctgagagatggacaggaaagagatgcgccaattgtaaacaaagtggtgacaccattgtctccaccaacaaacttgcatctggaggcaaaccctgacactggagtgctcacagtctcctgggagaggagcaccaccccagacattactggttatagaattaccacaacccctacaaacggccagcagggaaattctttggaagaagtggtccatgctgatcagagctcctgcacttttgataacctgagtcccggcctggagtacaatgtcagtgtttacactgtcaaggatgacaaggaaagtgtccctatctctgataccatcatcccagaggtgccccaactcactgacctaagctttgttgatataaccgattcaagcatcggcctgaggtggaccccgctaaactcttccaccattattgggtaccgcatcacagtagttgcggcaggagaaggtatccctatttttgaagattttgtggactcctcagtaggatactacacagtcacagggctggagccgggcattgactatgatatcagcgttatcactctcattaatggcggcgagagtgcccctactacactgacacaacaaacggctgttcctcctcccactgacctgcgattcaccaacattggtccagacaccatgcgtgtcacctgggctccacccccatccattgatttaaccaacttcctggtgcgttactcacctgtgaaaaatgaggaagatgttgcagagttgtcaatttctccttcagacaatgcagtggtcttaacaaatctcctgcctggtacagaatatgtagtgagtgtctccagtgtctacgaacaacatgagagcacacctcttagaggaagacagaaaacaggtcttgattccccaactggcattgacttttctgatattactgccaactcttttactgtgcactggattgctcctcgagccaccatcactggctacaggatccgccatcatcccgagcacttcagtgggagacctcgagaagatcgggtgccccactctcggaattccatcaccctcaccaacctcactccaggcacagagtatgtggtcagcatcgttgctcttaatggcagagaggaaagtcccttattgattggccaacaatcaacagtttctgatgttccgagggacctggaagttgttgctgcgacccccaccagcctactgatcagctgggatgctcctgctgtcacagtgagatattacaggatcacttacggagagacaggaggaaatagccctgtccaggagttcactgtgcctgggagcaagtctacagctaccatcagcggccttaaacctggagttgattataccatcactgtgtatgctgtcactggccgtggagacagccccgcaagcagcaagccaatttccattaattaccgaacagaaattgacaaaccatcccagatgcaagtgaccgatgttcaggacaacagcattagtgtcaagtggctgccttcaagttcccctgttactggttacagagtaaccaccactcccaaaaatggaccaggaccaacaaaaactaaaactgcaggtccagatcaaacagaaatgactattgaaggcttgcagcccacagtggagtatgtggttagtgtctatgctcagaatccaagcggagagagtcagcctctggttcagactgcagtaaccaacattgatcgccctaaaggactggcattcactgatgtggatgtcgattccatcaaaattgcttgggaaagcccacaggggcaagtttccaggtacagggtgacctactcgagccctgaggatggaatccatgagctattccctgcacctgatggtgaagaagacactgcagagctgcaaggcctcagaccgggttctgagtacacagtcagtgtggttgccttgcacgatgatatggagagccagcccctgattggaacccagtccacagctattcctgcaccaactgacctgaagttcactcaggtcacacccacaagcctgagcgcccagtggacaccacccaatgttcagctcactggatatcgagtgcgggtgacccccaaggagaagaccggaccaatgaaagaaatcaaccttgctcctgacagctcatccgtggttgtatcaggacttatggtggccaccaaatatgaagtgagtgtctatgctcttaaggacactttgacaagcagaccagctcagggagttgtcaccactctggagaatgtcagcccaccaagaagggctcgtgtgacagatgctactgagaccaccatcaccattagctggagaaccaagactgagacgatcactggcttccaagttgatgccgttccagccaatggccagactccaatccagagaaccatcaagccagatgtcagaagctacaccatcacaggtttacaaccaggcactgactacaagatctacctgtacaccttgaatgacaatgctcggagctcccctgtggtcatcgacgcctccactgccattgatgcaccatccaacctgcgtttcctggccaccacacccaattccttgctggtatcatggcagccgccacgtgccaggattaccggctacatcatcaagtatgagaagcctgggtctcctcccagagaagtggtccctcggccccgccctggtgtcacagaggctactattactggcctggaaccgggaaccgaatatacaatttatgtcattgccctgaagaataatcagaagagcgagcccctgattggaaggaaaaagacagacgagcttccccaactggtaacccttccacaccccaatcttcatggaccagagatcttggatgttccttccacagttcaaaagacccctttcgtcacccaccctgggtatgacactggaaatggtattcagcttcctggcacttctggtcagcaacccagtgttgggcaacaaatgatctttgaggaacatggttttaggcggaccacaccgcccacaacggccacccccataaggcataggccaagaccatacccgccgaatgtaggacaagaagctctctctcagacaaccatctcatgggccccattccaggacacttctgagtacatcatttcatgtcatcctgttggcactgatgaagaacccttacagttcagggttcctggaacttctaccagtgccactctgacaggcctcaccagaggtgccacctacaacgtcatagtggaggcactgaaagaccagcagaggcataaggttcgggaagaggttgttaccgtgggcaactctgtcaacgaaggcttgaaccaacctacggatgactcgtgctttgacccctacacagtttcccattatgccgttggagatgagtgggaacgaatgtctgaatcaggctttaaactgttgtgccagtgcttaggctttggaagtggtcatttcagatgtgattcatctagatggtgccatgacaatggtgtgaactacaagattggagagaagtgggaccgtcagggagaaaatggccagatgatgagctgcacatgtcttgggaacggaaaaggagaattcaagtgtgaccctcatgaggcaacgtgttatgatgatgggaagacataccacgtaggagaacagtggcagaaggaatatctcggtgccatttgctcctgcacatgctttggaggccagcggggctggcgctgtgacaactgccgcagacctgggggtgaacccagtcccgaaggcactactggccagtcctacaaccagtattctcagagataccatcagagaacaaacactaatgttaattgcccaattgagtgcttcatgcctttagatgtacaggctgacagagaagattcccgagagtaaatcatctttccaatccagaggaacaagcatgtctctctgccaagatccatctaaactggagtgatgttagcagacccagcttagagttcttctttctttcttaagccctttgctctggaggaagttctccagcttcagctcaactcacagcttctccaagcatcaccctgggagtttcctgagggttttctcataaatgagggctgcacattgcctgttctgcttcgaagtattcaataccgctcagtattttaaatgaagtgattctaagatttggtttgggatcaataggaaagcatatgcagccaaccaagatgcaaatgttttgaaatgatatgaccaaaattttaagtaggaaagtcacccaaacacttctgctttcacttaagtgtctggcccgcaatactgtaggaacaagcatgatcttgttactgtgatattttaaatatccacagtactcactttttccaaatgatcctagtaattgcctagaaatatctttctcttacctgttatttatcaatttttcccagtatttttatacggaaaaaattgtattgaaaacacttagtatgcagttgataagaggaatttggtataattatggtgggtgattattttttatactgtatgtgccaaagctttactactgtggaaagacaactgttttaataaaagatttacattccacaacttgaagttcatctatttgatataagacaccttcgggggaaataattcctgtgaatattctttttcaattcagcaaacatttgaaaatctatgatgtgcaagtctaattgttgatttcagtacaagattttctaaatcagttgctacaaaaactgattggtttttgtcacttcatctcttcactaatggagatagctttacactttctgctttaatagatttaagtggaccccaatatttattaaaattgctagtttaccgttcagaagtataatagaaataatctttagttgctcttttctaaccattgtaattcttcccttcttccctccacctttccttcattgaataaacctctgttcaaagagattgcctgcaagggaaataaaaatgactaagatattaaaa

SEQ ID NO: 1705 - DNA, 8435 bp, Homo sapiens
  source 1..8435: mol_type = genomic DNA
gcccgcgccggctgtgctgcacagggggaggagagggaaccccaggcgcgagcgggaagaggggacctgcagccacaacttctctggtcctctgcatcccttctgtccctccacccgtccccttccccaccctctggcccccaccttcttggaggcgacaacccccgggaggcattagaagggatttttcccgcaggttgcgaagggaagcaaacttggtggcaacttgcctcccggtgcgggcgtctctcccccaccgtctcaacatgcttaggggtccggggcccgggctgctgctgctggccgtccagtgcctggggacagcggtgccctccacgggagcctcgaagagcaagaggcaggctcagcaaatggttcagccccagtccccggtggctgtcagtcaaagcaagcccggttgttatgacaatggaaaacactatcagataaatcaacagtgggagcggacctacctaggcaatgcgttggtttgtacttgttatggaggaagccgaggttttaactgcgagagtaaacctgaagctgaagagacttgctttgacaagtacactgggaacacttaccgagtgggtgacacttatgagcgtcctaaagactccatgatctgggactgtacctgcatcggggctgggcgagggagaataagctgtaccatcgcaaaccgctgccatgaagggggtcagtcctacaagattggtgacacctggaggagaccacatgagactggtggttacatgttagagtgtgtgtgtcttggtaatggaaaaggagaatggacctgcaagcccatagctgagaagtgttttgatcatgctgctgggacttcctatgtggtcggagaaacgtgggagaagccctaccaaggctggatgatggtagattgtacttgcctgggagaaggcagcggacgcatcacttgcacttctagaaatagatgcaacgatcaggacacaaggacatcctatagaattggagacacctggagcaagaaggataatcgaggaaacctgctccagtgcatctgcacaggcaacggccgaggagagtggaagtgtgagaggcacacctctgtgcagaccacatcgagcggatctggccccttcaccgatgttcgtgcagctgtttaccaaccgcagcctcacccccagcctcctccctatggccactgtgtcacagacagtggtgtggtctactctgtggggatgcagtggctgaagacacaaggaaataagcaaatgctttgcacgtgcctgggcaacggagtcagctgccaagagacagctgtaacccagacttacggtggcaactcaaatggagagccatgtgtcttaccattcacctacaatggcaggacgttctactcctgcaccacagaagggcgacaggacggacatctttggtgcagcacaacttcgaattatgagcaggaccagaaatactctttctgcacagaccacactgttttggttcagactcgaggaggaaattccaatggtgccttgtgccacttccccttcctatacaacaaccacaattacactgattgcacttctgagggcagaagagacaacatgaagtggtgtgggaccacacagaactatgatgccgaccagaagtttgggttctgccccatggctgcccacgaggaaatctgcacaaccaatgaaggggtcatgtaccgcattggagatcagtgggataagcagcatgacatgggtcacatgatgaggtgcacgtgtgttgggaatggtcgtggggaatggacatgcattgcctactcgcagcttcgagatcagtgcattgttgatgacatcacttacaatgtgaacgacacattccacaagcgtcatgaagaggggcacatgctgaactgtacatgcttcggtcagggtcggggcaggtggaagtgtgatcccgtcgaccaatgccaggattcagagactgggacgttttatcaaattggagattcatgggagaagtatgtgcatggtgtcagataccagtgctactgctatggccgtggcattggggagtggcattgccaacctttacagacctatccaagctcaagtggtcctgtcgaagtatttatcactgagactccgagtcagcccaactcccaccccatccagtggaatgcaccacagccatctcacatttccaagtacattctcaggtggagacctaaaaattctgtaggccgttggaaggaagctaccataccaggccacttaaactcctacaccatcaaaggcctgaagcctggtgtggtatacgagggccagctcatcagcatccagcagtacggccaccaagaagtgactcgctttgacttcaccaccaccagcaccagcacacctgtgaccagcaacaccgtgacaggagagacgactcccttttctcctcttgtggccacttctgaatctgtgaccgaaatcacagccagtagctttgtggtctcctgggtctcagcttccgacaccgtgtcgggattccgggtggaatatgagctgagtgaggagggagatgagccacagtacctggatcttccaagcacagccacttctgtgaacatccctgacctgcttcctggccgaaaatacattgtaaatgtctatcagatatctgaggatggggagcagagtttgatcctgtctacttcacaaacaacagcgcctgatgcccctcctgacacgactgtggaccaagttgatgacacctcaattgttgttcgctggagcagaccccaggctcccatcacagggtacagaatagtctattcgccatcagtagaaggtagcagcacagaactcaaccttcctgaaactgcaaactccgtcaccctcagtgacttgcaacctggtgttcagtataacatcactatctatgctgtggaagaaaatcaagaaagtacacctgttgtcattcaacaagaaaccactggcaccccacgctcagatacagtgccctctcccagggacctgcagtttgtggaagtgacagacgtgaaggtcaccatcatgtggacaccgcctgagagtgcagtgaccggctaccgtgtggatgtgatccccgtcaacctgcctggcgagcacgggcagaggctgcccatcagcaggaacacctttgcagaagtcaccgggctgtcccctggggtcacctattacttcaaagtctttgcagtgagccatgggagggagagcaagcctctgactgctcaacagacaaccaaactggatgctcccactaacctccagtttgtcaatgaaactgattctactgtcctggtgagatggactccacctcgggcccagataacaggataccgactgaccgtgggccttacccgaagaggacagcccaggcagtacaatgtgggtccctctgtctccaagtacccactgaggaatctgcagcctgcatctgagtacaccgtatccctcgtggccataaagggcaaccaagagagccccaaagccactggagtctttaccacactgcagcctgggagctctattccaccttacaacaccgaggtgactgagaccaccattgtgatcacatggacgcctgctccaagaattggttttaagctgggtgtacgaccaagccagggaggagaggcaccacgagaagtgacttcagactcaggaagcatcgttgtgtccggcttgactccaggagtagaatacgtctacaccatccaagtcctgagagatggacaggaaagagatgcgccaattgtaaacaaagtggtgacaccattgtctccaccaacaaacttgcatctggaggcaaaccctgacactggagtgctcacagtctcctgggagaggagcaccaccccagacattactggttatagaattaccacaacccctacaaacggccagcagggaaattctttggaagaagtggtccatgctgatcagagctcctgcacttttgataacctgagtcccggcctggagtacaatgtcagtgtttacactgtcaaggatgacaaggaaagtgtccctatctctgataccatcatcccagctgttcctcctcccactgacctgcgattcaccaacattggtccagacaccatgcgtgtcacctgggctccacccccatccattgatttaaccaacttcctggtgcgttactcacctgtgaaaaatgaggaagatgttgcagagttgtcaatttctccttcagacaatgcagtggtcttaacaaatctcctgcctggtacagaatatgtagtgagtgtctccagtgtctacgaacaacatgagagcacacctcttagaggaagacagaaaacaggtcttgattccccaactggcattgacttttctgatattactgccaactcttttactgtgcactggattgctcctcgagccaccatcactggctacaggatccgccatcatcccgagcacttcagtgggagacctcgagaagatcgggtgccccactctcggaattccatcaccctcaccaacctcactccaggcacagagtatgtggtcagcatcgttgctcttaatggcagagaggaaagtcccttattgattggccaacaatcaacagtttctgatgttccgagggacctggaagttgttgctgcgacccccaccagcctactgatcagctgggatgctcctgctgtcacagtgagatattacaggatcacttacggagagacaggaggaaatagccctgtccaggagttcactgtgcctgggagcaagtctacagctaccatcagcggccttaaacctggagttgattataccatcactgtgtatgctgtcactggccgtggagacagccccgcaagcagcaagccaatttccattaattaccgaacagaaattgacaaaccatcccagatgcaagtgaccgatgttcaggacaacagcattagtgtcaagtggctgccttcaagttcccctgttactggttacagagtaaccaccactcccaaaaatggaccaggaccaacaaaaactaaaactgcaggtccagatcaaacagaaatgactattgaaggcttgcagcccacagtggagtatgtggttagtgtctatgctcagaatccaagcggagagagtcagcctctggttcagactgcagtaaccaacattgatcgccctaaaggactggcattcactgatgtggatgtcgattccatcaaaattgcttgggaaagcccacaggggcaagtttccaggtacagggtgacctactcgagccctgaggatggaatccatgagctattccctgcacctgatggtgaagaagacactgcagagctgcaaggcctcagaccgggttctgagtacacagtcagtgtggttgccttgcacgatgatatggagagccagcccctgattggaacccagtccacagctattcctgcaccaactgacctgaagttcactcaggtcacacccacaagcctgagcgcccagtggacaccacccaatgttcagctcactggatatcgagtgcgggtgacccccaaggagaagaccggaccaatgaaagaaatcaaccttgctcctgacagctcatccgtggttgtatcaggacttatggtggccaccaaatatgaagtgagtgtctatgctcttaaggacactttgacaagcagaccagctcagggagttgtcaccactctggagaatgtcagcccaccaagaagggctcgtgtgacagatgctactgagaccaccatcaccattagctggagaaccaagactgagacgatcactggcttccaagttgatgccgttccagccaatggccagactccaatccagagaaccatcaagccagatgtcagaagctacaccatcacaggtttacaaccaggcactgactacaagatctacctgtacaccttgaatgacaatgctcggagctcccctgtggtcatcgacgcctccactgccattgatgcaccatccaacctgcgtttcctggccaccacacccaattccttgctggtatcatggcagccgccacgtgccaggattaccggctacatcatcaagtatgagaagcctgggtctcctcccagagaagtggtccctcggccccgccctggtgtcacagaggctactattactggcctggaaccgggaaccgaatatacaatttatgtcattgccctgaagaataatcagaagagcgagcccctgattggaaggaaaaagacagacgagcttccccaactggtaacccttccacaccccaatcttcatggaccagagatcttggatgttccttccacagttcaaaagacccctttcgtcacccaccctgggtatgacactggaaatggtattcagcttcctggcacttctggtcagcaacccagtgttgggcaacaaatgatctttgaggaacatggttttaggcggaccacaccgcccacaacggccacccccataaggcataggccaagaccatacccgccgaatgtaggacaagaagctctctctcagacaaccatctcatgggccccattccaggacacttctgagtacatcatttcatgtcatcctgttggcactgatgaagaacccttacagttcagggttcctggaacttctaccagtgccactctgacaggcctcaccagaggtgccacctacaacgtcatagtggaggcactgaaagaccagcagaggcataaggttcgggaagaggttgttaccgtgggcaactctgtcaacgaaggcttgaaccaacctacggatgactcgtgctttgacccctacacagtttcccattatgccgttggagatgagtgggaacgaatgtctgaatcaggctttaaactgttgtgccagtgcttaggctttggaagtggtcatttcagatgtgattcatctagatggtgccatgacaatggtgtgaactacaagattggagagaagtgggaccgtcagggagaaaatggccagatgatgagctgcacatgtcttgggaacggaaaaggagaattcaagtgtgaccctcatgaggcaacgtgttatgatgatgggaagacataccacgtaggagaacagtggcagaaggaatatctcggtgccatttgctcctgcacatgctttggaggccagcggggctggcgctgtgacaactgccgcagacctgggggtgaacccagtcccgaaggcactactggccagtcctacaaccagtattctcagagataccatcagagaacaaacactaatgttaattgcccaattgagtgcttcatgcctttagatgtacaggctgacagagaagattcccgagagtaaatcatctttccaatccagaggaacaagcatgtctctctgccaagatccatctaaactggagtgatgttagcagacccagcttagagttcttctttctttcttaagccctttgctctggaggaagttctccagcttcagctcaactcacagcttctccaagcatcaccctgggagtttcctgagggttttctcataaatgagggctgcacattgcctgttctgcttcgaagtattcaataccgctcagtattttaaatgaagtgattctaagatttggtttgggatcaataggaaagcatatgcagccaaccaagatgcaaatgttttgaaatgatatgaccaaaattttaagtaggaaagtcacccaaacacttctgctttcacttaagtgtctggcccgcaatactgtaggaacaagcatgatcttgttactgtgatattttaaatatccacagtactcactttttccaaatgatcctagtaattgcctagaaatatctttctcttacctgttatttatcaatttttcccagtatttttatacggaaaaaattgtattgaaaacacttagtatgcagttgataagaggaatttggtataattatggtgggtgattattttttatactgtatgtgccaaagctttactactgtggaaagacaactgttttaataaaagatttacattccacaacttgaagttcatctatttgatataagacaccttcgggggaaataattcctgtgaatattctttttcaattcagcaaacatttgaaaatctatgatgtgcaagtctaattgttgatttcagtacaagattttctaaatcagttgctacaaaaactgattggtttttgtcacttcatctcttcactaatggagatagctttacactttctgctttaatagatttaagtggaccccaatatttattaaaattgctagtttaccgttcagaagtataatagaaataatctttagttgctcttttctaaccattgtaattcttcccttcttccctccacctttccttcattgaataaacctctgttcaaagagattgcctgcaagggaaataaaaatgactaagatattaaaa

SEQ ID NO: 1706 - DNA, 7918 bp, Homo sapiens
  source 1..7918: mol_type = genomic DNA
gcccgcgccggctgtgctgcacagggggaggagagggaaccccaggcgcgagcgggaagaggggacctgcagccacaacttctctggtcctctgcatcccttctgtccctccacccgtccccttccccaccctctggcccccaccttcttggaggcgacaacccccgggaggcattagaagggatttttcccgcaggttgcgaagggaagcaaacttggtggcaacttgcctcccggtgcgggcgtctctcccccaccgtctcaacatgcttaggggtccggggcccgggctgctgctgctggccgtccagtgcctggggacagcggtgccctccacgggagcctcgaagagcaagaggcaggctcagcaaatggttcagccccagtccccggtggctgtcagtcaaagcaagcccggttgttatgacaatggaaaacactatcagataaatcaacagtgggagcggacctacctaggcaatgcgttggtttgtacttgttatggaggaagccgaggttttaactgcgagagtaaacctgaagctgaagagacttgctttgacaagtacactgggaacacttaccgagtgggtgacacttatgagcgtcctaaagactccatgatctgggactgtacctgcatcggggctgggcgagggagaataagctgtaccatcgcaaaccgctgccatgaagggggtcagtcctacaagattggtgacacctggaggagaccacatgagactggtggttacatgttagagtgtgtgtgtcttggtaatggaaaaggagaatggacctgcaagcccatagctgagaagtgttttgatcatgctgctgggacttcctatgtggtcggagaaacgtgggagaagccctaccaaggctggatgatggtagattgtacttgcctgggagaaggcagcggacgcatcacttgcacttctagaaatagatgcaacgatcaggacacaaggacatcctatagaattggagacacctggagcaagaaggataatcgaggaaacctgctccagtgcatctgcacaggcaacggccgaggagagtggaagtgtgagaggcacacctctgtgcagaccacatcgagcggatctggccccttcaccgatgttcgtgcagctgtttaccaaccgcagcctcacccccagcctcctccctatggccactgtgtcacagacagtggtgtggtctactctgtggggatgcagtggctgaagacacaaggaaataagcaaatgctttgcacgtgcctgggcaacggagtcagctgccaagagacagctgtaacccagacttacggtggcaactcaaatggagagccatgtgtcttaccattcacctacaatggcaggacgttctactcctgcaccacagaagggcgacaggacggacatctttggtgcagcacaacttcgaattatgagcaggaccagaaatactctttctgcacagaccacactgttttggttcagactcgaggaggaaattccaatggtgccttgtgccacttccccttcctatacaacaaccacaattacactgattgcacttctgagggcagaagagacaacatgaagtggtgtgggaccacacagaactatgatgccgaccagaagtttgggttctgccccatggctgcccacgaggaaatctgcacaaccaatgaaggggtcatgtaccgcattggagatcagtgggataagcagcatgacatgggtcacatgatgaggtgcacgtgtgttgggaatggtcgtggggaatggacatgcattgcctactcgcagcttcgagatcagtgcattgttgatgacatcacttacaatgtgaacgacacattccacaagcgtcatgaagaggggcacatgctgaactgtacatgcttcggtcagggtcggggcaggtggaagtgtgatcccgtcgaccaatgccaggattcagagactgggacgttttatcaaattggagattcatgggagaagtatgtgcatggtgtcagataccagtgctactgctatggccgtggcattggggagtggcattgccaacctttacagacctatccaagctcaagtggtcctgtcgaagtatttatcactgagactccgagtcagcccaactcccaccccatccagtggaatgcaccacagccatctcacatttccaagtacattctcaggtggagacctaaaaattctgtaggccgttggaaggaagctaccataccaggccacttaaactcctacaccatcaaaggcctgaagcctggtgtggtatacgagggccagctcatcagcatccagcagtacggccaccaagaagtgactcgctttgacttcaccaccaccagcaccagcacacctgtgaccagcaacaccgtgacaggagagacgactcccttttctcctcttgtggccacttctgaatctgtgaccgaaatcacagccagtagctttgtggtctcctgggtctcagcttccgacaccgtgtcgggattccgggtggaatatgagctgagtgaggagggagatgagccacagtacctggatcttccaagcacagccacttctgtgaacatccctgacctgcttcctggccgaaaatacattgtaaatgtctatcagatatctgaggatggggagcagagtttgatcctgtctacttcacaaacaacagcgcctgatgcccctcctgacacgactgtggaccaagttgatgacacctcaattgttgttcgctggagcagaccccaggctcccatcacagggtacagaatagtctattcgccatcagtagaaggtagcagcacagaactcaaccttcctgaaactgcaaactccgtcaccctcagtgacttgcaacctggtgttcagtataacatcactatctatgctgtggaagaaaatcaagaaagtacacctgttgtcattcaacaagaaaccactggcaccccacgctcagatacagtgccctctcccagggacctgcagtttgtggaagtgacagacgtgaaggtcaccatcatgtggacaccgcctgagagtgcagtgaccggctaccgtgtggatgtgatccccgtcaacctgcctggcgagcacgggcagaggctgcccatcagcaggaacacctttgcagaagtcaccgggctgtcccctggggtcacctattacttcaaagtctttgcagtgagccatgggagggagagcaagcctctgactgctcaacagacaaccaaactggatgctcccactaacctccagtttgtcaatgaaactgattctactgtcctggtgagatggactccacctcgggcccagataacaggataccgactgaccgtgggccttacccgaagaggacagcccaggcagtacaatgtgggtccctctgtctccaagtacccactgaggaatctgcagcctgcatctgagtacaccgtatccctcgtggccataaagggcaaccaagagagccccaaagccactggagtctttaccacactgcagcctgggagctctattccaccttacaacaccgaggtgactgagaccaccattgtgatcacatggacgcctgctccaagaattggttttaagctgggtgtacgaccaagccagggaggagaggcaccacgagaagtgacttcagactcaggaagcatcgttgtgtccggcttgactccaggagtagaatacgtctacaccatccaagtcctgagagatggacaggaaagagatgcgccaattgtaaacaaagtggtgacaccattgtctccaccaacaaacttgcatctggaggcaaaccctgacactggagtgctcacagtctcctgggagaggagcaccaccccagacattactggttatagaattaccacaacccctacaaacggccagcagggaaattctttggaagaagtggtccatgctgatcagagctcctgcacttttgataacctgagtcccggcctggagtacaatgtcagtgtttacactgtcaaggatgacaaggaaagtgtccctatctctgataccatcatcccagctgttcctcctcccactgacctgcgattcaccaacattggtccagacaccatgcgtgtcacctgggctccacccccatccattgatttaaccaacttcctggtgcgttactcacctgtgaaaaatgaggaagatgttgcagagttgtcaatttctccttcagacaatgcagtggtcttaacaaatctcctgcctggtacagaatatgtagtgagtgtctccagtgtctacgaacaacatgagagcacacctcttagaggaagacagaaaacaggtcttgattccccaactggcattgacttttctgatattactgccaactcttttactgtgcactggattgctcctcgagccaccatcactggctacaggatccgccatcatcccgagcacttcagtgggagacctcgagaagatcgggtgccccactctcggaattccatcaccctcaccaacctcactccaggcacagagtatgtggtcagcatcgttgctcttaatggcagagaggaaagtcccttattgattggccaacaatcaacagtttctgatgttccgagggacctggaagttgttgctgcgacccccaccagcctactgatcagctgggatgctcctgctgtcacagtgagatattacaggatcacttacggagagacaggaggaaatagccctgtccaggagttcactgtgcctgggagcaagtctacagctaccatcagcggccttaaacctggagttgattataccatcactgtgtatgctgtcactggccgtggagacagccccgcaagcagcaagccaatttccattaattaccgaacagaaattgacaaaccatcccagatgcaagtgaccgatgttcaggacaacagcattagtgtcaagtggctgccttcaagttcccctgttactggttacagagtaaccaccactcccaaaaatggaccaggaccaacaaaaactaaaactgcaggtccagatcaaacagaaatgactattgaaggcttgcagcccacagtggagtatgtggttagtgtctatgctcagaatccaagcggagagagtcagcctctggttcagactgcagtaaccaacattgatcgccctaaaggactggcattcactgatgtggatgtcgattccatcaaaattgcttgggaaagcccacaggggcaagtttccaggtacagggtgacctactcgagccctgaggatggaatccatgagctattccctgcacctgatggtgaagaagacactgcagagctgcaaggcctcagaccgggttctgagtacacagtcagtgtggttgccttgcacgatgatatggagagccagcccctgattggaacccagtccacagctattcctgcaccaactgacctgaagttcactcaggtcacacccacaagcctgagcgcccagtggacaccacccaatgttcagctcactggatatcgagtgcgggtgacccccaaggagaagaccggaccaatgaaagaaatcaaccttgctcctgacagctcatccgtggttgtatcaggacttatggtggccaccaaatatgaagtgagtgtctatgctcttaaggacactttgacaagcagaccagctcagggagttgtcaccactctggagaatgtcagcccaccaagaagggctcgtgtgacagatgctactgagaccaccatcaccattagctggagaaccaagactgagacgatcactggcttccaagttgatgccgttccagccaatggccagactccaatccagagaaccatcaagccagatgtcagaagctacaccatcacaggtttacaaccaggcactgactacaagatctacctgtacaccttgaatgacaatgctcggagctcccctgtggtcatcgacgcctccactgccattgatgcaccatccaacctgcgtttcctggccaccacacccaattccttgctggtatcatggcagccgccacgtgccaggattaccggctacatcatcaagtatgagaagcctgggtctcctcccagagaagtggtccctcggccccgccctggtgtcacagaggctactattactggcctggaaccgggaaccgaatatacaatttatgtcattgccctgaagaataatcagaagagcgagcccctgattggaaggaaaaagacagtcaacgaaggcttgaaccaacctacggatgactcgtgctttgacccctacacagtttcccattatgccgttggagatgagtgggaacgaatgtctgaatcaggctttaaactgttgtgccagtgcttaggctttggaagtggtcatttcagatgtgattcatctagatggtgccatgacaatggtgtgaactacaagattggagagaagtgggaccgtcagggagaaaatggccagatgatgagctgcacatgtcttgggaacggaaaaggagaattcaagtgtgaccctcatgaggcaacgtgttatgatgatgggaagacataccacgtaggagaacagtggcagaaggaatatctcggtgccatttgctcctgcacatgctttggaggccagcggggctggcgctgtgacaactgccgcagacctgggggtgaacccagtcccgaaggcactactggccagtcctacaaccagtattctcagagataccatcagagaacaaacactaatgttaattgcccaattgagtgcttcatgcctttagatgtacaggctgacagagaagattcccgagagtaaatcatctttccaatccagaggaacaagcatgtctctctgccaagatccatctaaactggagtgatgttagcagacccagcttagagttcttctttctttcttaagccctttgctctggaggaagttctccagcttcagctcaactcacagcttctccaagcatcaccctgggagtttcctgagggttttctcataaatgagggctgcacattgcctgttctgcttcgaagtattcaataccgctcagtattttaaatgaagtgattctaagatttggtttgggatcaataggaaagcatatgcagccaaccaagatgcaaatgttttgaaatgatatgaccaaaattttaagtaggaaagtcacccaaacacttctgctttcacttaagtgtctggcccgcaatactgtaggaacaagcatgatcttgttactgtgatattttaaatatccacagtactcactttttccaaatgatcctagtaattgcctagaaatatctttctcttacctgttatttatcaatttttcccagtatttttatacggaaaaaattgtattgaaaacacttagtatgcagttgataagaggaatttggtataattatggtgggtgattattttttatactgtatgtgccaaagctttactactgtggaaagacaactgttttaataaaagatttacattccacaacttgaagttcatctatttgatataagacaccttcgggggaaataattcctgtgaatattctttttcaattcagcaaacatttgaaaatctatgatgtgcaagtctaattgttgatttcagtacaagattttctaaatcagttgctacaaaaactgattggtttttgtcacttcatctcttcactaatggagatagctttacactttctgctttaatagatttaagtggaccccaatatttattaaaattgctagtttaccgttcagaagtataatagaaataatctttagttgctcttttctaaccattgtaattcttcccttcttccctccacctttccttcattgaataaacctctgttcaaagagattgcctgcaagggaaataaaaatgactaagatatt

SEQ ID NO: 1707 - DNA, 7999 bp, Homo sapiens
  source 1..7999: mol_type = genomic DNA
gcccgcgccggctgtgctgcacagggggaggagagggaaccccaggcgcgagcgggaagaggggacctgcagccacaacttctctggtcctctgcatcccttctgtccctccacccgtccccttccccaccctctggcccccaccttcttggaggcgacaacccccgggaggcattagaagggatttttcccgcaggttgcgaagggaagcaaacttggtggcaacttgcctcccggtgcgggcgtctctcccccaccgtctcaacatgcttaggggtccggggcccgggctgctgctgctggccgtccagtgcctggggacagcggtgccctccacgggagcctcgaagagcaagaggcaggctcagcaaatggttcagccccagtccccggtggctgtcagtcaaagcaagcccggttgttatgacaatggaaaacactatcagataaatcaacagtgggagcggacctacctaggcaatgcgttggtttgtacttgttatggaggaagccgaggttttaactgcgagagtaaacctgaagctgaagagacttgctttgacaagtacactgggaacacttaccgagtgggtgacacttatgagcgtcctaaagactccatgatctgggactgtacctgcatcggggctgggcgagggagaataagctgtaccatcgcaaaccgctgccatgaagggggtcagtcctacaagattggtgacacctggaggagaccacatgagactggtggttacatgttagagtgtgtgtgtcttggtaatggaaaaggagaatggacctgcaagcccatagctgagaagtgttttgatcatgctgctgggacttcctatgtggtcggagaaacgtgggagaagccctaccaaggctggatgatggtagattgtacttgcctgggagaaggcagcggacgcatcacttgcacttctagaaatagatgcaacgatcaggacacaaggacatcctatagaattggagacacctggagcaagaaggataatcgaggaaacctgctccagtgcatctgcacaggcaacggccgaggagagtggaagtgtgagaggcacacctctgtgcagaccacatcgagcggatctggccccttcaccgatgttcgtgcagctgtttaccaaccgcagcctcacccccagcctcctccctatggccactgtgtcacagacagtggtgtggtctactctgtggggatgcagtggctgaagacacaaggaaataagcaaatgctttgcacgtgcctgggcaacggagtcagctgccaagagacagctgtaacccagacttacggtggcaactcaaatggagagccatgtgtcttaccattcacctacaatggcaggacgttctactcctgcaccacagaagggcgacaggacggacatctttggtgcagcacaacttcgaattatgagcaggaccagaaatactctttctgcacagaccacactgttttggttcagactcgaggaggaaattccaatggtgccttgtgccacttccccttcctatacaacaaccacaattacactgattgcacttctgagggcagaagagacaacatgaagtggtgtgggaccacacagaactatgatgccgaccagaagtttgggttctgccccatggctgcccacgaggaaatctgcacaaccaatgaaggggtcatgtaccgcattggagatcagtgggataagcagcatgacatgggtcacatgatgaggtgcacgtgtgttgggaatggtcgtggggaatggacatgcattgcctactcgcagcttcgagatcagtgcattgttgatgacatcacttacaatgtgaacgacacattccacaagcgtcatgaagaggggcacatgctgaactgtacatgcttcggtcagggtcggggcaggtggaagtgtgatcccgtcgaccaatgccaggattcagagactgggacgttttatcaaattggagattcatgggagaagtatgtgcatggtgtcagataccagtgctactgctatggccgtggcattggggagtggcattgccaacctttacagacctatccaagctcaagtggtcctgtcgaagtatttatcactgagactccgagtcagcccaactcccaccccatccagtggaatgcaccacagccatctcacatttccaagtacattctcaggtggagacctaaaaattctgtaggccgttggaaggaagctaccataccaggccacttaaactcctacaccatcaaaggcctgaagcctggtgtggtatacgagggccagctcatcagcatccagcagtacggccaccaagaagtgactcgctttgacttcaccaccaccagcaccagcacacctgtgaccagcaacaccgtgacaggagagacgactcccttttctcctcttgtggccacttctgaatctgtgaccgaaatcacagccagtagctttgtggtctcctgggtctcagcttccgacaccgtgtcgggattccgggtggaatatgagctgagtgaggagggagatgagccacagtacctggatcttccaagcacagccacttctgtgaacatccctgacctgcttcctggccgaaaatacattgtaaatgtctatcagatatctgaggatggggagcagagtttgatcctgtctacttcacaaacaacagcgcctgatgcccctcctgacacgactgtggaccaagttgatgacacctcaattgttgttcgctggagcagaccccaggctcccatcacagggtacagaatagtctattcgccatcagtagaaggtagcagcacagaactcaaccttcctgaaactgcaaactccgtcaccctcagtgacttgcaacctggtgttcagtataacatcactatctatgctgtggaagaaaatcaagaaagtacacctgttgtcattcaacaagaaaccactggcaccccacgctcagatacagtgccctctcccagggacctgcagtttgtggaagtgacagacgtgaaggtcaccatcatgtggacaccgcctgagagtgcagtgaccggctaccgtgtggatgtgatccccgtcaacctgcctggcgagcacgggcagaggctgcccatcagcaggaacacctttgcagaagtcaccgggctgtcccctggggtcacctattacttcaaagtctttgcagtgagccatgggagggagagcaagcctctgactgctcaacagacaaccaaactggatgctcccactaacctccagtttgtcaatgaaactgattctactgtcctggtgagatggactccacctcgggcccagataacaggataccgactgaccgtgggccttacccgaagaggacagcccaggcagtacaatgtgggtccctctgtctccaagtacccactgaggaatctgcagcctgcatctgagtacaccgtatccctcgtggccataaagggcaaccaagagagccccaaagccactggagtctttaccacactgcagcctgggagctctattccaccttacaacaccgaggtgactgagaccaccattgtgatcacatggacgcctgctccaagaattggttttaagctgggtgtacgaccaagccagggaggagaggcaccacgagaagtgacttcagactcaggaagcatcgttgtgtccggcttgactccaggagtagaatacgtctacaccatccaagtcctgagagatggacaggaaagagatgcgccaattgtaaacaaagtggtgacaccattgtctccaccaacaaacttgcatctggaggcaaaccctgacactggagtgctcacagtctcctgggagaggagcaccaccccagacattactggttatagaattaccacaacccctacaaacggccagcagggaaattctttggaagaagtggtccatgctgatcagagctcctgcacttttgataacctgagtcccggcctggagtacaatgtcagtgtttacactgtcaaggatgacaaggaaagtgtccctatctctgataccatcatcccagctgttcctcctcccactgacctgcgattcaccaacattggtccagacaccatgcgtgtcacctgggctccacccccatccattgatttaaccaacttcctggtgcgttactcacctgtgaaaaatgaggaagatgttgcagagttgtcaatttctccttcagacaatgcagtggtcttaacaaatctcctgcctggtacagaatatgtagtgagtgtctccagtgtctacgaacaacatgagagcacacctcttagaggaagacagaaaacaggtcttgattccccaactggcattgacttttctgatattactgccaactcttttactgtgcactggattgctcctcgagccaccatcactggctacaggatccgccatcatcccgagcacttcagtgggagacctcgagaagatcgggtgccccactctcggaattccatcaccctcaccaacctcactccaggcacagagtatgtggtcagcatcgttgctcttaatggcagagaggaaagtcccttattgattggccaacaatcaacagtttctgatgttccgagggacctggaagttgttgctgcgacccccaccagcctactgatcagctgggatgctcctgctgtcacagtgagatattacaggatcacttacggagagacaggaggaaatagccctgtccaggagttcactgtgcctgggagcaagtctacagctaccatcagcggccttaaacctggagttgattataccatcactgtgtatgctgtcactggccgtggagacagccccgcaagcagcaagccaatttccattaattaccgaacagaaattgacaaaccatcccagatgcaagtgaccgatgttcaggacaacagcattagtgtcaagtggctgccttcaagttcccctgttactggttacagagtaaccaccactcccaaaaatggaccaggaccaacaaaaactaaaactgcaggtccagatcaaacagaaatgactattgaaggcttgcagcccacagtggagtatgtggttagtgtctatgctcagaatccaagcggagagagtcagcctctggttcagactgcagtaaccaacattgatcgccctaaaggactggcattcactgatgtggatgtcgattccatcaaaattgcttgggaaagcccacaggggcaagtttccaggtacagggtgacctactcgagccctgaggatggaatccatgagctattccctgcacctgatggtgaagaagacactgcagagctgcaaggcctcagaccgggttctgagtacacagtcagtgtggttgccttgcacgatgatatggagagccagcccctgattggaacccagtccacagctattcctgcaccaactgacctgaagttcactcaggtcacacccacaagcctgagcgcccagtggacaccacccaatgttcagctcactggatatcgagtgcgggtgacccccaaggagaagaccggaccaatgaaagaaatcaaccttgctcctgacagctcatccgtggttgtatcaggacttatggtggccaccaaatatgaagtgagtgtctatgctcttaaggacactttgacaagcagaccagctcagggagttgtcaccactctggagaatgtcagcccaccaagaagggctcgtgtgacagatgctactgagaccaccatcaccattagctggagaaccaagactgagacgatcactggcttccaagttgatgccgttccagccaatggccagactccaatccagagaaccatcaagccagatgtcagaagctacaccatcacaggtttacaaccaggcactgactacaagatctacctgtacaccttgaatgacaatgctcggagctcccctgtggtcatcgacgcctccactgccattgatgcaccatccaacctgcgtttcctggccaccacacccaattccttgctggtatcatggcagccgccacgtgccaggattaccggctacatcatcaagtatgagaagcctgggtctcctcccagagaagtggtccctcggccccgccctggtgtcacagaggctactattactggcctggaaccgggaaccgaatatacaatttatgtcattgccctgaagaataatcagaagagcgagcccctgattggaaggaaaaagacaggacaagaagctctctctcagacaaccatctcatgggccccattccaggacacttctgagtacatcatttcatgtcatcctgttggcactgatgaagaacccttacagttcagggttcctggaacttctaccagtgccactctgacaggcctcaccagaggtgccacctacaacgtcatagtggaggcactgaaagaccagcagaggcataaggttcgggaagaggttgttaccgtgggcaactctggatggtgccatgacaatggtgtgaactacaagattggagagaagtgggaccgtcagggagaaaatggccagatgatgagctgcacatgtcttgggaacggaaaaggagaattcaagtgtgaccctcatgaggcaacgtgttatgatgatgggaagacataccacgtaggagaacagtggcagaaggaatatctcggtgccatttgctcctgcacatgctttggaggccagcggggctggcgctgtgacaactgccgcagacctgggggtgaacccagtcccgaaggcactactggccagtcctacaaccagtattctcagagataccatcagagaacaaacactaatgttaattgcccaattgagtgcttcatgcctttagatgtacaggctgacagagaagattcccgagagtaaatcatctttccaatccagaggaacaagcatgtctctctgccaagatccatctaaactggagtgatgttagcagacccagcttagagttcttctttctttcttaagccctttgctctggaggaagttctccagcttcagctcaactcacagcttctccaagcatcaccctgggagtttcctgagggttttctcataaatgagggctgcacattgcctgttctgcttcgaagtattcaataccgctcagtattttaaatgaagtgattctaagatttggtttgggatcaataggaaagcatatgcagccaaccaagatgcaaatgttttgaaatgatatgaccaaaattttaagtaggaaagtcacccaaacacttctgctttcacttaagtgtctggcccgcaatactgtaggaacaagcatgatcttgttactgtgatattttaaatatccacagtactcactttttccaaatgatcctagtaattgcctagaaatatctttctcttacctgttatttatcaatttttcccagtatttttatacggaaaaaattgtattgaaaacacttagtatgcagttgataagaggaatttggtataattatggtgggtgattattttttatactgtatgtgccaaagctttactactgtggaaagacaactgttttaataaaagatttacattccacaacttgaagttcatctatttgatataagacaccttcgggggaaataattcctgtgaatattctttttcaattcagcaaacatttgaaaatctatgatgtgcaagtctaattgttgatttcagtacaagattttctaaatcagttgctacaaaaactgattggtttttgtcacttcatctcttcactaatggagatagctttacactttctgctttaatagatttaagtggaccccaatatttattaaaattgctagtttaccgttcagaagtataatagaaataatctttagttgctcttttctaaccattgtaattcttcccttcttccctccacctttccttcattgaataaacctctgttcaaagagattgcctgcaagggaaataaaaatgactaagatatt

SEQ ID NO: 1708 - DNA, 8905 bp, Homo sapiens
  source 1..8905: mol_type = genomic DNA
cggggcggggacagcccggcgggtctctcctcccccgcgccccgggcctccagaggggcgggaggggaccgtcccatataagccccggctcccggcgctcggacgcccgcgccggctgtgctgcacagggggaggagagggaaccccaggcgcgagcgggaagaggggacctgcagccacaacttctctggtcctctgcatcccttctgtccctccacccgtccccttccccaccctctggcccccaccttcttggaggcgacaacccccgggaggcattagaagggatttttcccgcaggttgcgaagggaagcaaacttggtggcaacttgcctcccggtgcgggcgtctctcccccaccgtctcaacatgcttaggggtccggggcccgggctgctgctgctggccgtccagtgcctggggacagcggtgccctccacgggagcctcgaagagcaagaggcaggctcagcaaatggttcagccccagtccccggtggctgtcagtcaaagcaagcccggttgttatgacaatggaaaacactatcagataaatcaacagtgggagcggacctacctaggcaatgcgttggtttgtacttgttatggaggaagccgaggttttaactgcgagagtaaacctgaagctgaagagacttgctttgacaagtacactgggaacacttaccgagtgggtgacacttatgagcgtcctaaagactccatgatctgggactgtacctgcatcggggctgggcgagggagaataagctgtaccatcgcaaaccgctgccatgaagggggtcagtcctacaagattggtgacacctggaggagaccacatgagactggtggttacatgttagagtgtgtgtgtcttggtaatggaaaaggagaatggacctgcaagcccatagctgagaagtgttttgatcatgctgctgggacttcctatgtggtcggagaaacgtgggagaagccctaccaaggctggatgatggtagattgtacttgcctgggagaaggcagcggacgcatcacttgcacttctagaaatagatgcaacgatcaggacacaaggacatcctatagaattggagacacctggagcaagaaggataatcgaggaaacctgctccagtgcatctgcacaggcaacggccgaggagagtggaagtgtgagaggcacacctctgtgcagaccacatcgagcggatctggccccttcaccgatgttcgtgcagctgtttaccaaccgcagcctcacccccagcctcctccctatggccactgtgtcacagacagtggtgtggtctactctgtggggatgcagtggctgaagacacaaggaaataagcaaatgctttgcacgtgcctgggcaacggagtcagctgccaagagacagctgtaacccagacttacggtggcaactcaaatggagagccatgtgtcttaccattcacctacaatggcaggacgttctactcctgcaccacagaagggcgacaggacggacatctttggtgcagcacaacttcgaattatgagcaggaccagaaatactctttctgcacagaccacactgttttggttcagactcgaggaggaaattccaatggtgccttgtgccacttccccttcctatacaacaaccacaattacactgattgcacttctgagggcagaagagacaacatgaagtggtgtgggaccacacagaactatgatgccgaccagaagtttgggttctgccccatggctgcccacgaggaaatctgcacaaccaatgaaggggtcatgtaccgcattggagatcagtgggataagcagcatgacatgggtcacatgatgaggtgcacgtgtgttgggaatggtcgtggggaatggacatgcattgcctactcgcagcttcgagatcagtgcattgttgatgacatcacttacaatgtgaacgacacattccacaagcgtcatgaagaggggcacatgctgaactgtacatgcttcggtcagggtcggggcaggtggaagtgtgatcccgtcgaccaatgccaggattcagagactgggacgttttatcaaattggagattcatgggagaagtatgtgcatggtgtcagataccagtgctactgctatggccgtggcattggggagtggcattgccaacctttacagacctatccaagctcaagtggtcctgtcgaagtatttatcactgagactccgagtcagcccaactcccaccccatccagtggaatgcaccacagccatctcacatttccaagtacattctcaggtggagacctaaaaattctgtaggccgttggaaggaagctaccataccaggccacttaaactcctacaccatcaaaggcctgaagcctggtgtggtatacgagggccagctcatcagcatccagcagtacggccaccaagaagtgactcgctttgacttcaccaccaccagcaccagcacacctgtgaccagcaacaccgtgacaggagagacgactcccttttctcctcttgtggccacttctgaatctgtgaccgaaatcacagccagtagctttgtggtctcctgggtctcagcttccgacaccgtgtcgggattccgggtggaatatgagctgagtgaggagggagatgagccacagtacctggatcttccaagcacagccacttctgtgaacatccctgacctgcttcctggccgaaaatacattgtaaatgtctatcagatatctgaggatggggagcagagtttgatcctgtctacttcacaaacaacagcgcctgatgcccctcctgacacgactgtggaccaagttgatgacacctcaattgttgttcgctggagcagaccccaggctcccatcacagggtacagaatagtctattcgccatcagtagaaggtagcagcacagaactcaaccttcctgaaactgcaaactccgtcaccctcagtgacttgcaacctggtgttcagtataacatcactatctatgctgtggaagaaaatcaagaaagtacacctgttgtcattcaacaagaaaccactggcaccccacgctcagatacagtgccctctcccagggacctgcagtttgtggaagtgacagacgtgaaggtcaccatcatgtggacaccgcctgagagtgcagtgaccggctaccgtgtggatgtgatccccgtcaacctgcctggcgagcacgggcagaggctgcccatcagcaggaacacctttgcagaagtcaccgggctgtcccctggggtcacctattacttcaaagtctttgcagtgagccatgggagggagagcaagcctctgactgctcaacagacaaccaaactggatgctcccactaacctccagtttgtcaatgaaactgattctactgtcctggtgagatggactccacctcgggcccagataacaggataccgactgaccgtgggccttacccgaagaggacagcccaggcagtacaatgtgggtccctctgtctccaagtacccactgaggaatctgcagcctgcatctgagtacaccgtatccctcgtggccataaagggcaaccaagagagccccaaagccactggagtctttaccacactgcagcctgggagctctattccaccttacaacaccgaggtgactgagaccaccattgtgatcacatggacgcctgctccaagaattggttttaagctgggtgtacgaccaagccagggaggagaggcaccacgagaagtgacttcagactcaggaagcatcgttgtgtccggcttgactccaggagtagaatacgtctacaccatccaagtcctgagagatggacaggaaagagatgcgccaattgtaaacaaagtggtgacaccattgtctccaccaacaaacttgcatctggaggcaaaccctgacactggagtgctcacagtctcctgggagaggagcaccaccccagacattactggttatagaattaccacaacccctacaaacggccagcagggaaattctttggaagaagtggtccatgctgatcagagctcctgcacttttgataacctgagtcccggcctggagtacaatgtcagtgtttacactgtcaaggatgacaaggaaagtgtccctatctctgataccatcatcccagaggtgccccaactcactgacctaagctttgttgatataaccgattcaagcatcggcctgaggtggaccccgctaaactcttccaccattattgggtaccgcatcacagtagttgcggcaggagaaggtatccctatttttgaagattttgtggactcctcagtaggatactacacagtcacagggctggagccgggcattgactatgatatcagcgttatcactctcattaatggcggcgagagtgcccctactacactgacacaacaaacggctgttcctcctcccactgacctgcgattcaccaacattggtccagacaccatgcgtgtcacctgggctccacccccatccattgatttaaccaacttcctggtgcgttactcacctgtgaaaaatgaggaagatgttgcagagttgtcaatttctccttcagacaatgcagtggtcttaacaaatctcctgcctggtacagaatatgtagtgagtgtctccagtgtctacgaacaacatgagagcacacctcttagaggaagacagaaaacaggtcttgattccccaactggcattgacttttctgatattactgccaactcttttactgtgcactggattgctcctcgagccaccatcactggctacaggatccgccatcatcccgagcacttcagtgggagacctcgagaagatcgggtgccccactctcggaattccatcaccctcaccaacctcactccaggcacagagtatgtggtcagcatcgttgctcttaatggcagagaggaaagtcccttattgattggccaacaatcaacagtttctgatgttccgagggacctggaagttgttgctgcgacccccaccagcctactgatcagctgggatgctcctgctgtcacagtgagatattacaggatcacttacggagagacaggaggaaatagccctgtccaggagttcactgtgcctgggagcaagtctacagctaccatcagcggccttaaacctggagttgattataccatcactgtgtatgctgtcactggccgtggagacagccccgcaagcagcaagccaatttccattaattaccgaacagaaattgacaaaccatcccagatgcaagtgaccgatgttcaggacaacagcattagtgtcaagtggctgccttcaagttcccctgttactggttacagagtaaccaccactcccaaaaatggaccaggaccaacaaaaactaaaactgcaggtccagatcaaacagaaatgactattgaaggcttgcagcccacagtggagtatgtggttagtgtctatgctcagaatccaagcggagagagtcagcctctggttcagactgcagtaaccaacattgatcgccctaaaggactggcattcactgatgtggatgtcgattccatcaaaattgcttgggaaagcccacaggggcaagtttccaggtacagggtgacctactcgagccctgaggatggaatccatgagctattccctgcacctgatggtgaagaagacactgcagagctgcaaggcctcagaccgggttctgagtacacagtcagtgtggttgccttgcacgatgatatggagagccagcccctgattggaacccagtccacagctattcctgcaccaactgacctgaagttcactcaggtcacacccacaagcctgagcgcccagtggacaccacccaatgttcagctcactggatatcgagtgcgggtgacccccaaggagaagaccggaccaatgaaagaaatcaaccttgctcctgacagctcatccgtggttgtatcaggacttatggtggccaccaaatatgaagtgagtgtctatgctcttaaggacactttgacaagcagaccagctcagggagttgtcaccactctggagaatgtcagcccaccaagaagggctcgtgtgacagatgctactgagaccaccatcaccattagctggagaaccaagactgagacgatcactggcttccaagttgatgccgttccagccaatggccagactccaatccagagaaccatcaagccagatgtcagaagctacaccatcacaggtttacaaccaggcactgactacaagatctacctgtacaccttgaatgacaatgctcggagctcccctgtggtcatcgacgcctccactgccattgatgcaccatccaacctgcgtttcctggccaccacacccaattccttgctggtatcatggcagccgccacgtgccaggattaccggctacatcatcaagtatgagaagcctgggtctcctcccagagaagtggtccctcggccccgccctggtgtcacagaggctactattactggcctggaaccgggaaccgaatatacaatttatgtcattgccctgaagaataatcagaagagcgagcccctgattggaaggaaaaagacagacgagcttccccaactggtaacccttccacaccccaatcttcatggaccagagatcttggatgttccttccacagttcaaaagacccctttcgtcacccaccctgggtatgacactggaaatggtattcagcttcctggcacttctggtcagcaacccagtgttgggcaacaaatgatctttgaggaacatggttttaggcggaccacaccgcccacaacggccacccccataaggcataggccaagaccatacccgccgaatgtaggtgaggaaatccaaattggtcacatccccagggaagatgtagactatcacctgtacccacacggtccgggactcaatccaaatgcctctacaggacaagaagctctctctcagacaaccatctcatgggccccattccaggacacttctgagtacatcatttcatgtcatcctgttggcactgatgaagaacccttacagttcagggttcctggaacttctaccagtgccactctgacaggcctcaccagaggtgccacctacaacgtcatagtggaggcactgaaagaccagcagaggcataaggttcgggaagaggttgttaccgtgggcaactctgtcaacgaaggcttgaaccaacctacggatgactcgtgctttgacccctacacagtttcccattatgccgttggagatgagtgggaacgaatgtctgaatcaggctttaaactgttgtgccagtgcttaggctttggaagtggtcatttcagatgtgattcatctagatggtgccatgacaatggtgtgaactacaagattggagagaagtgggaccgtcagggagaaaatggccagatgatgagctgcacatgtcttgggaacggaaaaggagaattcaagtgtgaccctcatgaggcaacgtgttatgatgatgggaagacataccacgtaggagaacagtggcagaaggaatatctcggtgccatttgctcctgcacatgctttggaggccagcggggctggcgctgtgacaactgccgcagacctgggggtgaacccagtcccgaaggcactactggccagtcctacaaccagtattctcagagataccatcagagaacaaacactaatgttaattgcccaattgagtgcttcatgcctttagatgtacaggctgacagagaagattcccgagagtaaatcatctttccaatccagaggaacaagcatgtctctctgccaagatccatctaaactggagtgatgttagcagacccagcttagagttcttctttctttcttaagccctttgctctggaggaagttctccagcttcagctcaactcacagcttctccaagcatcaccctgggagtttcctgagggttttctcataaatgagggctgcacattgcctgttctgcttcgaagtattcaataccgctcagtattttaaatgaagtgattctaagatttggtttgggatcaataggaaagcatatgcagccaaccaagatgcaaatgttttgaaatgatatgaccaaaattttaagtaggaaagtcacccaaacacttctgctttcacttaagtgtctggcccgcaatactgtaggaacaagcatgatcttgttactgtgatattttaaatatccacagtactcactttttccaaatgatcctagtaattgcctagaaatatctttctcttacctgttatttatcaatttttcccagtatttttatacggaaaaaattgtattgaaaacacttagtatgcagttgataagaggaatttggtataattatggtgggtgattattttttatactgtatgtgccaaagctttactactgtggaaagacaactgttttaataaaagatttacattccacaacttgaagttcatctatttgatataagacaccttcgggggaaataattcctgtgaatattctttttcaattcagcaaacatttgaaaatctatgatgtgcaagtctaattgttgatttcagtacaagattttctaaatcagttgctacaaaaactgattggtttttgtcacttcatctcttcactaatggagatagctttacactttctgctttaatagatttaagtggaccccaatatttattaaaattgctagtttaccgttcagaagtataatagaaataatctttagttgctcttttctaaccattgtaattcttcccttcttccctccacctttccttcattgaataaacctctgttcaaagagattgcctgcaagggaaataaaaatgactaagatattaaaa

SEQ ID NO: 1709 - DNA, 7846 bp, Homo sapiens
  source 1..7846: mol_type = genomic DNA
gcccgcgccggctgtgctgcacagggggaggagagggaaccccaggcgcgagcgggaagaggggacctgcagccacaacttctctggtcctctgcatcccttctgtccctccacccgtccccttccccaccctctggcccccaccttcttggaggcgacaacccccgggaggcattagaagggatttttcccgcaggttgcgaagggaagcaaacttggtggcaacttgcctcccggtgcgggcgtctctcccccaccgtctcaacatgcttaggggtccggggcccgggctgctgctgctggccgtccagtgcctggggacagcggtgccctccacgggagcctcgaagagcaagaggcaggctcagcaaatggttcagccccagtccccggtggctgtcagtcaaagcaagcccggttgttatgacaatggaaaacactatcagataaatcaacagtgggagcggacctacctaggcaatgcgttggtttgtacttgttatggaggaagccgaggttttaactgcgagagtaaacctgaagctgaagagacttgctttgacaagtacactgggaacacttaccgagtgggtgacacttatgagcgtcctaaagactccatgatctgggactgtacctgcatcggggctgggcgagggagaataagctgtaccatcgcaaaccgctgccatgaagggggtcagtcctacaagattggtgacacctggaggagaccacatgagactggtggttacatgttagagtgtgtgtgtcttggtaatggaaaaggagaatggacctgcaagcccatagctgagaagtgttttgatcatgctgctgggacttcctatgtggtcggagaaacgtgggagaagccctaccaaggctggatgatggtagattgtacttgcctgggagaaggcagcggacgcatcacttgcacttctagaaatagatgcaacgatcaggacacaaggacatcctatagaattggagacacctggagcaagaaggataatcgaggaaacctgctccagtgcatctgcacaggcaacggccgaggagagtggaagtgtgagaggcacacctctgtgcagaccacatcgagcggatctggccccttcaccgatgttcgtgcagctgtttaccaaccgcagcctcacccccagcctcctccctatggccactgtgtcacagacagtggtgtggtctactctgtggggatgcagtggctgaagacacaaggaaataagcaaatgctttgcacgtgcctgggcaacggagtcagctgccaagagacagctgtaacccagacttacggtggcaactcaaatggagagccatgtgtcttaccattcacctacaatggcaggacgttctactcctgcaccacagaagggcgacaggacggacatctttggtgcagcacaacttcgaattatgagcaggaccagaaatactctttctgcacagaccacactgttttggttcagactcgaggaggaaattccaatggtgccttgtgccacttccccttcctatacaacaaccacaattacactgattgcacttctgagggcagaagagacaacatgaagtggtgtgggaccacacagaactatgatgccgaccagaagtttgggttctgccccatggctgcccacgaggaaatctgcacaaccaatgaaggggtcatgtaccgcattggagatcagtgggataagcagcatgacatgggtcacatgatgaggtgcacgtgtgttgggaatggtcgtggggaatggacatgcattgcctactcgcagcttcgagatcagtgcattgttgatgacatcacttacaatgtgaacgacacattccacaagcgtcatgaagaggggcacatgctgaactgtacatgcttcggtcagggtcggggcaggtggaagtgtgatcccgtcgaccaatgccaggattcagagactgggacgttttatcaaattggagattcatgggagaagtatgtgcatggtgtcagataccagtgctactgctatggccgtggcattggggagtggcattgccaacctttacagacctatccaagctcaagtggtcctgtcgaagtatttatcactgagactccgagtcagcccaactcccaccccatccagtggaatgcaccacagccatctcacatttccaagtacattctcaggtggagacctaaaaattctgtaggccgttggaaggaagctaccataccaggccacttaaactcctacaccatcaaaggcctgaagcctggtgtggtatacgagggccagctcatcagcatccagcagtacggccaccaagaagtgactcgctttgacttcaccaccaccagcaccagcacacctgtgaccagcaacaccgtgacaggagagacgactcccttttctcctcttgtggccacttctgaatctgtgaccgaaatcacagccagtagctttgtggtctcctgggtctcagcttccgacaccgtgtcgggattccgggtggaatatgagctgagtgaggagggagatgagccacagtacctggatcttccaagcacagccacttctgtgaacatccctgacctgcttcctggccgaaaatacattgtaaatgtctatcagatatctgaggatggggagcagagtttgatcctgtctacttcacaaacaacagcgcctgatgcccctcctgacacgactgtggaccaagttgatgacacctcaattgttgttcgctggagcagaccccaggctcccatcacagggtacagaatagtctattcgccatcagtagaaggtagcagcacagaactcaaccttcctgaaactgcaaactccgtcaccctcagtgacttgcaacctggtgttcagtataacatcactatctatgctgtggaagaaaatcaagaaagtacacctgttgtcattcaacaagaaaccactggcaccccacgctcagatacagtgccctctcccagggacctgcagtttgtggaagtgacagacgtgaaggtcaccatcatgtggacaccgcctgagagtgcagtgaccggctaccgtgtggatgtgatccccgtcaacctgcctggcgagcacgggcagaggctgcccatcagcaggaacacctttgcagaagtcaccgggctgtcccctggggtcacctattacttcaaagtctttgcagtgagccatgggagggagagcaagcctctgactgctcaacagacaaccaaactggatgctcccactaacctccagtttgtcaatgaaactgattctactgtcctggtgagatggactccacctcgggcccagataacaggataccgactgaccgtgggccttacccgaagaggacagcccaggcagtacaatgtgggtccctctgtctccaagtacccactgaggaatctgcagcctgcatctgagtacaccgtatccctcgtggccataaagggcaaccaagagagccccaaagccactggagtctttaccacactgcagcctgggagctctattccaccttacaacaccgaggtgactgagaccaccattgtgatcacatggacgcctgctccaagaattggttttaagctgggtgtacgaccaagccagggaggagaggcaccacgagaagtgacttcagactcaggaagcatcgttgtgtccggcttgactccaggagtagaatacgtctacaccatccaagtcctgagagatggacaggaaagagatgcgccaattgtaaacaaagtggtgacaccattgtctccaccaacaaacttgcatctggaggcaaaccctgacactggagtgctcacagtctcctgggagaggagcaccaccccagacattactggttatagaattaccacaacccctacaaacggccagcagggaaattctttggaagaagtggtccatgctgatcagagctcctgcacttttgataacctgagtcccggcctggagtacaatgtcagtgtttacactgtcaaggatgacaaggaaagtgtccctatctctgataccatcatcccagctgttcctcctcccactgacctgcgattcaccaacattggtccagacaccatgcgtgtcacctgggctccacccccatccattgatttaaccaacttcctggtgcgttactcacctgtgaaaaatgaggaagatgttgcagagttgtcaatttctccttcagacaatgcagtggtcttaacaaatctcctgcctggtacagaatatgtagtgagtgtctccagtgtctacgaacaacatgagagcacacctcttagaggaagacagaaaacaggtcttgattccccaactggcattgacttttctgatattactgccaactcttttactgtgcactggattgctcctcgagccaccatcactggctacaggatccgccatcatcccgagcacttcagtgggagacctcgagaagatcgggtgccccactctcggaattccatcaccctcaccaacctcactccaggcacagagtatgtggtcagcatcgttgctcttaatggcagagaggaaagtcccttattgattggccaacaatcaacagtttctgatgttccgagggacctggaagttgttgctgcgacccccaccagcctactgatcagctgggatgctcctgctgtcacagtgagatattacaggatcacttacggagagacaggaggaaatagccctgtccaggagttcactgtgcctgggagcaagtctacagctaccatcagcggccttaaacctggagttgattataccatcactgtgtatgctgtcactggccgtggagacagccccgcaagcagcaagccaatttccattaattaccgaacagaaattgacaaaccatcccagatgcaagtgaccgatgttcaggacaacagcattagtgtcaagtggctgccttcaagttcccctgttactggttacagagtaaccaccactcccaaaaatggaccaggaccaacaaaaactaaaactgcaggtccagatcaaacagaaatgactattgaaggcttgcagcccacagtggagtatgtggttagtgtctatgctcagaatccaagcggagagagtcagcctctggttcagactgcagtaaccactattcctgcaccaactgacctgaagttcactcaggtcacacccacaagcctgagcgcccagtggacaccacccaatgttcagctcactggatatcgagtgcgggtgacccccaaggagaagaccggaccaatgaaagaaatcaaccttgctcctgacagctcatccgtggttgtatcaggacttatggtggccaccaaatatgaagtgagtgtctatgctcttaaggacactttgacaagcagaccagctcagggagttgtcaccactctggagaatgtcagcccaccaagaagggctcgtgtgacagatgctactgagaccaccatcaccattagctggagaaccaagactgagacgatcactggcttccaagttgatgccgttccagccaatggccagactccaatccagagaaccatcaagccagatgtcagaagctacaccatcacaggtttacaaccaggcactgactacaagatctacctgtacaccttgaatgacaatgctcggagctcccctgtggtcatcgacgcctccactgccattgatgcaccatccaacctgcgtttcctggccaccacacccaattccttgctggtatcatggcagccgccacgtgccaggattaccggctacatcatcaagtatgagaagcctgggtctcctcccagagaagtggtccctcggccccgccctggtgtcacagaggctactattactggcctggaaccgggaaccgaatatacaatttatgtcattgccctgaagaataatcagaagagcgagcccctgattggaaggaaaaagacagacgagcttccccaactggtaacccttccacaccccaatcttcatggaccagagatcttggatgttccttccacagttcaaaagacccctttcgtcacccaccctgggtatgacactggaaatggtattcagcttcctggcacttctggtcagcaacccagtgttgggcaacaaatgatctttgaggaacatggttttaggcggaccacaccgcccacaacggccacccccataaggcataggccaagaccatacccgccgaatgtaggtgaggaaatccaaattggtcacatccccagggaagatgtagactatcacctgtacccacacggtccgggactcaatccaaatgcctctacaggacaagaagctctctctcagacaaccatctcatgggccccattccaggacacttctgagtacatcatttcatgtcatcctgttggcactgatgaagaacccttacagttcagggttcctggaacttctaccagtgccactctgacaggcctcaccagaggtgccacctacaacgtcatagtggaggcactgaaagaccagcagaggcataaggttcgggaagaggttgttaccgtgggcaactctgtcaacgaaggcttgaaccaacctacggatgactcgtgctttgacccctacacagtttcccattatgccgttggagatgagtgggaacgaatgtctgaatcaggctttaaactgttgtgccagtgcttaggctttggaagtggtcatttcagatgtgattcatctagatggtgccatgacaatggtgtgaactacaagattggagagaagtgggaccgtcagggagaaaatggccagatgatgagctgcacatgtcttgggaacggaaaaggagaattcaagtgtgaccctcatgaggcaacgtgttatgatgatgggaagacataccacgtaggagaacagtggcagaaggaatatctcggtgccatttgctcctgcacatgctttggaggccagcggggctggcgctgtgacaactgccgcagacctgggggtgaacccagtcccgaaggcactactggccagtcctacaaccagtattctcagagataccatcagagaacaaacactaatgttaattgcccaattgagtgcttcatgcctttagatgtacaggctgacagagaagattcccgagagtaaatcatctttccaatccagaggaacaagcatgtctctctgccaagatccatctaaactggagtgatgttagcagacccagcttagagttcttctttctttcttaagccctttgctctggaggaagttctccagcttcagctcaactcacagcttctccaagcatcaccctgggagtttcctgagggttttctcataaatgagggctgcacattgcctgttctgcttcgaagtattcaataccgctcagtattttaaatgaagtgattctaagatttggtttgggatcaataggaaagcatatgcagccaaccaagatgcaaatgttttgaaatgatatgaccaaaattttaagtaggaaagtcacccaaacacttctgctttcacttaagtgtctggcccgcaatactgtaggaacaagcatgatcttgttactgtgatattttaaatatccacagtactcactttttccaaatgatcctagtaattgcctagaaatatctttctcttacctgttatttatcaatttttcccagtatttttatacggaaaaaattgtattgaaaacacttagtatgcagttgataagaggaatttggtataattatggtgggtgattattttttatactgtatgtgccaaagctttactactgtggaaagacaactgttttaataaaagatttacattcc

SEQ ID NO: 1710 - DNA, 8025 bp, Homo sapiens
  source 1..8025: mol_type = genomic DNA
gcccgcgccggctgtgctgcacagggggaggagagggaaccccaggcgcgagcgggaagaggggacctgcagccacaacttctctggtcctctgcatcccttctgtccctccacccgtccccttccccaccctctggcccccaccttcttggaggcgacaacccccgggaggcattagaagggatttttcccgcaggttgcgaagggaagcaaacttggtggcaacttgcctcccggtgcgggcgtctctcccccaccgtctcaacatgcttaggggtccggggcccgggctgctgctgctggccgtccagtgcctggggacagcggtgccctccacgggagcctcgaagagcaagaggcaggctcagcaaatggttcagccccagtccccggtggctgtcagtcaaagcaagcccggttgttatgacaatggaaaacactatcagataaatcaacagtgggagcggacctacctaggcaatgcgttggtttgtacttgttatggaggaagccgaggttttaactgcgagagtaaacctgaagctgaagagacttgctttgacaagtacactgggaacacttaccgagtgggtgacacttatgagcgtcctaaagactccatgatctgggactgtacctgcatcggggctgggcgagggagaataagctgtaccatcgcaaaccgctgccatgaagggggtcagtcctacaagattggtgacacctggaggagaccacatgagactggtggttacatgttagagtgtgtgtgtcttggtaatggaaaaggagaatggacctgcaagcccatagctgagaagtgttttgatcatgctgctgggacttcctatgtggtcggagaaacgtgggagaagccctaccaaggctggatgatggtagattgtacttgcctgggagaaggcagcggacgcatcacttgcacttctagaaatagatgcaacgatcaggacacaaggacatcctatagaattggagacacctggagcaagaaggataatcgaggaaacctgctccagtgcatctgcacaggcaacggccgaggagagtggaagtgtgagaggcacacctctgtgcagaccacatcgagcggatctggccccttcaccgatgttcgtgcagctgtttaccaaccgcagcctcacccccagcctcctccctatggccactgtgtcacagacagtggtgtggtctactctgtggggatgcagtggctgaagacacaaggaaataagcaaatgctttgcacgtgcctgggcaacggagtcagctgccaagagacagctgtaacccagacttacggtggcaactcaaatggagagccatgtgtcttaccattcacctacaatggcaggacgttctactcctgcaccacagaagggcgacaggacggacatctttggtgcagcacaacttcgaattatgagcaggaccagaaatactctttctgcacagaccacactgttttggttcagactcgaggaggaaattccaatggtgccttgtgccacttccccttcctatacaacaaccacaattacactgattgcacttctgagggcagaagagacaacatgaagtggtgtgggaccacacagaactatgatgccgaccagaagtttgggttctgccccatggctgcccacgaggaaatctgcacaaccaatgaaggggtcatgtaccgcattggagatcagtgggataagcagcatgacatgggtcacatgatgaggtgcacgtgtgttgggaatggtcgtggggaatggacatgcattgcctactcgcagcttcgagatcagtgcattgttgatgacatcacttacaatgtgaacgacacattccacaagcgtcatgaagaggggcacatgctgaactgtacatgcttcggtcagggtcggggcaggtggaagtgtgatcccgtcgaccaatgccaggattcagagactgggacgttttatcaaattggagattcatgggagaagtatgtgcatggtgtcagataccagtgctactgctatggccgtggcattggggagtggcattgccaacctttacagacctatccaagctcaagtggtcctgtcgaagtatttatcactgagactccgagtcagcccaactcccaccccatccagtggaatgcaccacagccatctcacatttccaagtacattctcaggtggagacctaaaaattctgtaggccgttggaaggaagctaccataccaggccacttaaactcctacaccatcaaaggcctgaagcctggtgtggtatacgagggccagctcatcagcatccagcagtacggccaccaagaagtgactcgctttgacttcaccaccaccagcaccagcacacctgtgaccagcaacaccgtgacaggagagacgactcccttttctcctcttgtggccacttctgaatctgtgaccgaaatcacagccagtagctttgtggtctcctgggtctcagcttccgacaccgtgtcgggattccgggtggaatatgagctgagtgaggagggagatgagccacagtacctggatcttccaagcacagccacttctgtgaacatccctgacctgcttcctggccgaaaatacattgtaaatgtctatcagatatctgaggatggggagcagagtttgatcctgtctacttcacaaacaacagcgcctgatgcccctcctgacacgactgtggaccaagttgatgacacctcaattgttgttcgctggagcagaccccaggctcccatcacagggtacagaatagtctattcgccatcagtagaaggtagcagcacagaactcaaccttcctgaaactgcaaactccgtcaccctcagtgacttgcaacctggtgttcagtataacatcactatctatgctgtggaagaaaatcaagaaagtacacctgttgtcattcaacaagaaaccactggcaccccacgctcagatacagtgccctctcccagggacctgcagtttgtggaagtgacagacgtgaaggtcaccatcatgtggacaccgcctgagagtgcagtgaccggctaccgtgtggatgtgatccccgtcaacctgcctggcgagcacgggcagaggctgcccatcagcaggaacacctttgcagaagtcaccgggctgtcccctggggtcacctattacttcaaagtctttgcagtgagccatgggagggagagcaagcctctgactgctcaacagacaaccaaactggatgctcccactaacctccagtttgtcaatgaaactgattctactgtcctggtgagatggactccacctcgggcccagataacaggataccgactgaccgtgggccttacccgaagaggacagcccaggcagtacaatgtgggtccctctgtctccaagtacccactgaggaatctgcagcctgcatctgagtacaccgtatccctcgtggccataaagggcaaccaagagagccccaaagccactggagtctttaccacactgcagcctgggagctctattccaccttacaacaccgaggtgactgagaccaccattgtgatcacatggacgcctgctccaagaattggttttaagctgggtgtacgaccaagccagggaggagaggcaccacgagaagtgacttcagactcaggaagcatcgttgtgtccggcttgactccaggagtagaatacgtctacaccatccaagtcctgagagatggacaggaaagagatgcgccaattgtaaacaaagtggtgacaccattgtctccaccaacaaacttgcatctggaggcaaaccctgacactggagtgctcacagtctcctgggagaggagcaccaccccagacattactggttatagaattaccacaacccctacaaacggccagcagggaaattctttggaagaagtggtccatgctgatcagagctcctgcacttttgataacctgagtcccggcctggagtacaatgtcagtgtttacactgtcaaggatgacaaggaaagtgtccctatctctgataccatcatcccagctgttcctcctcccactgacctgcgattcaccaacattggtccagacaccatgcgtgtcacctgggctccacccccatccattgatttaaccaacttcctggtgcgttactcacctgtgaaaaatgaggaagatgttgcagagttgtcaatttctccttcagacaatgcagtggtcttaacaaatctcctgcctggtacagaatatgtagtgagtgtctccagtgtctacgaacaacatgagagcacacctcttagaggaagacagaaaacaggtcttgattccccaactggcattgacttttctgatattactgccaactcttttactgtgcactggattgctcctcgagccaccatcactggctacaggatccgccatcatcccgagcacttcagtgggagacctcgagaagatcgggtgccccactctcggaattccatcaccctcaccaacctcactccaggcacagagtatgtggtcagcatcgttgctcttaatggcagagaggaaagtcccttattgattggccaacaatcaacagtttctgatgttccgagggacctggaagttgttgctgcgacccccaccagcctactgatcagctgggatgctcctgctgtcacagtgagatattacaggatcacttacggagagacaggaggaaatagccctgtccaggagttcactgtgcctgggagcaagtctacagctaccatcagcggccttaaacctggagttgattataccatcactgtgtatgctgtcactggccgtggagacagccccgcaagcagcaagccaatttccattaattaccgaacagaaattgacaaaccatcccagatgcaagtgaccgatgttcaggacaacagcattagtgtcaagtggctgccttcaagttcccctgttactggttacagagtaaccaccactcccaaaaatggaccaggaccaacaaaaactaaaactgcaggtccagatcaaacagaaatgactattgaaggcttgcagcccacagtggagtatgtggttagtgtctatgctcagaatccaagcggagagagtcagcctctggttcagactgcagtaaccaacattgatcgccctaaaggactggcattcactgatgtggatgtcgattccatcaaaattgcttgggaaagcccacaggggcaagtttccaggtacagggtgacctactcgagccctgaggatggaatccatgagctattccctgcacctgatggtgaagaagacactgcagagctgcaaggcctcagaccgggttctgagtacacagtcagtgtggttgccttgcacgatgatatggagagccagcccctgattggaacccagtccacagctattcctgcaccaactgacctgaagttcactcaggtcacacccacaagcctgagcgcccagtggacaccacccaatgttcagctcactggatatcgagtgcgggtgacccccaaggagaagaccggaccaatgaaagaaatcaaccttgctcctgacagctcatccgtggttgtatcaggacttatggtggccaccaaatatgaagtgagtgtctatgctcttaaggacactttgacaagcagaccagctcagggagttgtcaccactctggagaatgtcagcccaccaagaagggctcgtgtgacagatgctactgagaccaccatcaccattagctggagaaccaagactgagacgatcactggcttccaagttgatgccgttccagccaatggccagactccaatccagagaaccatcaagccagatgtcagaagctacaccatcacaggtttacaaccaggcactgactacaagatctacctgtacaccttgaatgacaatgctcggagctcccctgtggtcatcgacgcctccactgccattgatgcaccatccaacctgcgtttcctggccaccacacccaattccttgctggtatcatggcagccgccacgtgccaggattaccggctacatcatcaagtatgagaagcctgggtctcctcccagagaagtggtccctcggccccgccctggtgtcacagaggctactattactggcctggaaccgggaaccgaatatacaatttatgtcattgccctgaagaataatcagaagagcgagcccctgattggaaggaaaaagacaggacaagaagctctctctcagacaaccatctcatgggccccattccaggacacttctgagtacatcatttcatgtcatcctgttggcactgatgaagaacccttacagtcaacgaaggcttgaaccaacctacggatgactcgtgctttgacccctacacagtttcccattatgccgttggagatgagtgggaacgaatgtctgaatcaggctttaaactgttgtgccagtgcttaggctttggaagtggtcatttcagatgtgattcatctagatggtgccatgacaatggtgtgaactacaagattggagagaagtgggaccgtcagggagaaaatggccagatgatgagctgcacatgtcttgggaacggaaaaggagaattcaagtgtgaccctcatgaggcaacgtgttatgatgatgggaagacataccacgtaggagaacagtggcagaaggaatatctcggtgccatttgctcctgcacatgctttggaggccagcggggctggcgctgtgacaactgccgcagacctgggggtgaacccagtcccgaaggcactactggccagtcctacaaccagtattctcagagataccatcagagaacaaacactaatgttaattgcccaattgagtgcttcatgcctttagatgtacaggctgacagagaagattcccgagagtaaatcatctttccaatccagaggaacaagcatgtctctctgccaagatccatctaaactggagtgatgttagcagacccagcttagagttcttctttctttcttaagccctttgctctggaggaagttctccagcttcagctcaactcacagcttctccaagcatcaccctgggagtttcctgagggttttctcataaatgagggctgcacattgcctgttctgcttcgaagtattcaataccgctcagtattttaaatgaagtgattctaagatttggtttgggatcaataggaaagcatatgcagccaaccaagatgcaaatgttttgaaatgatatgaccaaaattttaagtaggaaagtcacccaaacacttctgctttcacttaagtgtctggcccgcaatactgtaggaacaagcatgatcttgttactgtgatattttaaatatccacagtactcactttttccaaatgatcctagtaattgcctagaaatatctttctcttacctgttatttatcaatttttcccagtatttttatacggaaaaaattgtattgaaaacacttagtatgcagttgataagaggaatttggtataattatggtgggtgattattttttatactgtatgtgccaaagctttactactgtggaaagacaactgttttaataaaagatttacattccacaacttgaagttcatctatttgatataagacaccttcgggggaaataattcctgtgaatattctttttcaattcagcaaacatttgaaaatctatgatgtgcaagtctaattgttgatttcagtacaagattttctaaatcagttgctacaaaaactgattggtttttgtcacttcatctcttcactaatggagatagctttacactttctgctttaatagatttaagtggaccccaatatttattaaaattgctagtttaccgttcagaagtataatagaaataatctttagttgctcttttctaaccattgtaattcttcccttcttccctccacctttccttcattgaataaacctctgttcaaagagattgcctgcaagggaaataaaaatgactaagatatt

SEQ ID NO: 1711 - DNA, 7898 bp, Homo sapiens
  source 1..7898: mol_type = genomic DNA
gcccgcgccggctgtgctgcacagggggaggagagggaaccccaggcgcgagcgggaagaggggacctgcagccacaacttctctggtcctctgcatcccttctgtccctccacccgtccccttccccaccctctggcccccaccttcttggaggcgacaacccccgggaggcattagaagggatttttcccgcaggttgcgaagggaagcaaacttggtggcaacttgcctcccggtgcgggcgtctctcccccaccgtctcaacatgcttaggggtccggggcccgggctgctgctgctggccgtccagtgcctggggacagcggtgccctccacgggagcctcgaagagcaagaggcaggctcagcaaatggttcagccccagtccccggtggctgtcagtcaaagcaagcccggttgttatgacaatggaaaacactatcagataaatcaacagtgggagcggacctacctaggcaatgcgttggtttgtacttgttatggaggaagccgaggttttaactgcgagagtaaacctgaagctgaagagacttgctttgacaagtacactgggaacacttaccgagtgggtgacacttatgagcgtcctaaagactccatgatctgggactgtacctgcatcggggctgggcgagggagaataagctgtaccatcgcaaaccgctgccatgaagggggtcagtcctacaagattggtgacacctggaggagaccacatgagactggtggttacatgttagagtgtgtgtgtcttggtaatggaaaaggagaatggacctgcaagcccatagctgagaagtgttttgatcatgctgctgggacttcctatgtggtcggagaaacgtgggagaagccctaccaaggctggatgatggtagattgtacttgcctgggagaaggcagcggacgcatcacttgcacttctagaaatagatgcaacgatcaggacacaaggacatcctatagaattggagacacctggagcaagaaggataatcgaggaaacctgctccagtgcatctgcacaggcaacggccgaggagagtggaagtgtgagaggcacacctctgtgcagaccacatcgagcggatctggccccttcaccgatgttcgtgcagctgtttaccaaccgcagcctcacccccagcctcctccctatggccactgtgtcacagacagtggtgtggtctactctgtggggatgcagtggctgaagacacaaggaaataagcaaatgctttgcacgtgcctgggcaacggagtcagctgccaagagacagctgtaacccagacttacggtggcaactcaaatggagagccatgtgtcttaccattcacctacaatggcaggacgttctactcctgcaccacagaagggcgacaggacggacatctttggtgcagcacaacttcgaattatgagcaggaccagaaatactctttctgcacagaccacactgttttggttcagactcgaggaggaaattccaatggtgccttgtgccacttccccttcctatacaacaaccacaattacactgattgcacttctgagggcagaagagacaacatgaagtggtgtgggaccacacagaactatgatgccgaccagaagtttgggttctgccccatggctgcccacgaggaaatctgcacaaccaatgaaggggtcatgtaccgcattggagatcagtgggataagcagcatgacatgggtcacatgatgaggtgcacgtgtgttgggaatggtcgtggggaatggacatgcattgcctactcgcagcttcgagatcagtgcattgttgatgacatcacttacaatgtgaacgacacattccacaagcgtcatgaagaggggcacatgctgaactgtacatgcttcggtcagggtcggggcaggtggaagtgtgatcccgtcgaccaatgccaggattcagagactgggacgttttatcaaattggagattcatgggagaagtatgtgcatggtgtcagataccagtgctactgctatggccgtggcattggggagtggcattgccaacctttacagacctatccaagctcaagtggtcctgtcgaagtatttatcactgagactccgagtcagcccaactcccaccccatccagtggaatgcaccacagccatctcacatttccaagtacattctcaggtggagacctaaaaattctgtaggccgttggaaggaagctaccataccaggccacttaaactcctacaccatcaaaggcctgaagcctggtgtggtatacgagggccagctcatcagcatccagcagtacggccaccaagaagtgactcgctttgacttcaccaccaccagcaccagcacacctgtgaccagcaacaccgtgacaggagagacgactcccttttctcctcttgtggccacttctgaatctgtgaccgaaatcacagccagtagctttgtggtctcctgggtctcagcttccgacaccgtgtcgggattccgggtggaatatgagctgagtgaggagggagatgagccacagtacctggatcttccaagcacagccacttctgtgaacatccctgacctgcttcctggccgaaaatacattgtaaatgtctatcagatatctgaggatggggagcagagtttgatcctgtctacttcacaaacaacagcgcctgatgcccctcctgacacgactgtggaccaagttgatgacacctcaattgttgttcgctggagcagaccccaggctcccatcacagggtacagaatagtctattcgccatcagtagaaggtagcagcacagaactcaaccttcctgaaactgcaaactccgtcaccctcagtgacttgcaacctggtgttcagtataacatcactatctatgctgtggaagaaaatcaagaaagtacacctgttgtcattcaacaagaaaccactggcaccccacgctcagatacagtgccctctcccagggacctgcagtttgtggaagtgacagacgtgaaggtcaccatcatgtggacaccgcctgagagtgcagtgaccggctaccgtgtggatgtgatccccgtcaacctgcctggcgagcacgggcagaggctgcccatcagcaggaacacctttgcagaagtcaccgggctgtcccctggggtcacctattacttcaaagtctttgcagtgagccatgggagggagagcaagcctctgactgctcaacagacaaccaaactggatgctcccactaacctccagtttgtcaatgaaactgattctactgtcctggtgagatggactccacctcgggcccagataacaggataccgactgaccgtgggccttacccgaagaggacagcccaggcagtacaatgtgggtccctctgtctccaagtacccactgaggaatctgcagcctgcatctgagtacaccgtatccctcgtggccataaagggcaaccaagagagccccaaagccactggagtctttaccacactgcagcctgggagctctattccaccttacaacaccgaggtgactgagaccaccattgtgatcacatggacgcctgctccaagaattggttttaagctgggtgtacgaccaagccagggaggagaggcaccacgagaagtgacttcagactcaggaagcatcgttgtgtccggcttgactccaggagtagaatacgtctacaccatccaagtcctgagagatggacaggaaagagatgcgccaattgtaaacaaagtggtgacaccattgtctccaccaacaaacttgcatctggaggcaaaccctgacactggagtgctcacagtctcctgggagaggagcaccaccccagacattactggttatagaattaccacaacccctacaaacggccagcagggaaattctttggaagaagtggtccatgctgatcagagctcctgcacttttgataacctgagtcccggcctggagtacaatgtcagtgtttacactgtcaaggatgacaaggaaagtgtccctatctctgataccatcatcccagctgttcctcctcccactgacctgcgattcaccaacattggtccagacaccatgcgtgtcacctgggctccacccccatccattgatttaaccaacttcctggtgcgttactcacctgtgaaaaatgaggaagatgttgcagagttgtcaatttctccttcagacaatgcagtggtcttaacaaatctcctgcctggtacagaatatgtagtgagtgtctccagtgtctacgaacaacatgagagcacacctcttagaggaagacagaaaacaggtcttgattccccaactggcattgacttttctgatattactgccaactcttttactgtgcactggattgctcctcgagccaccatcactggctacaggatccgccatcatcccgagcacttcagtgggagacctcgagaagatcgggtgccccactctcggaattccatcaccctcaccaacctcactccaggcacagagtatgtggtcagcatcgttgctcttaatggcagagaggaaagtcccttattgattggccaacaatcaacagtttctgatgttccgagggacctggaagttgttgctgcgacccccaccagcctactgatcagctgggatgctcctgctgtcacagtgagatattacaggatcacttacggagagacaggaggaaatagccctgtccaggagttcactgtgcctgggagcaagtctacagctaccatcagcggccttaaacctggagttgattataccatcactgtgtatgctgtcactggccgtggagacagccccgcaagcagcaagccaatttccattaattaccgaacagaaattgacaaaccatcccagatgcaagtgaccgatgttcaggacaacagcattagtgtcaagtggctgccttcaagttcccctgttactggttacagagtaaccaccactcccaaaaatggaccaggaccaacaaaaactaaaactgcaggtccagatcaaacagaaatgactattgaaggcttgcagcccacagtggagtatgtggttagtgtctatgctcagaatccaagcggagagagtcagcctctggttcagactgcagtaaccactattcctgcaccaactgacctgaagttcactcaggtcacacccacaagcctgagcgcccagtggacaccacccaatgttcagctcactggatatcgagtgcgggtgacccccaaggagaagaccggaccaatgaaagaaatcaaccttgctcctgacagctcatccgtggttgtatcaggacttatggtggccaccaaatatgaagtgagtgtctatgctcttaaggacactttgacaagcagaccagctcagggagttgtcaccactctggagaatgtcagcccaccaagaagggctcgtgtgacagatgctactgagaccaccatcaccattagctggagaaccaagactgagacgatcactggcttccaagttgatgccgttccagccaatggccagactccaatccagagaaccatcaagccagatgtcagaagctacaccatcacaggtttacaaccaggcactgactacaagatctacctgtacaccttgaatgacaatgctcggagctcccctgtggtcatcgacgcctccactgccattgatgcaccatccaacctgcgtttcctggccaccacacccaattccttgctggtatcatggcagccgccacgtgccaggattaccggctacatcatcaagtatgagaagcctgggtctcctcccagagaagtggtccctcggccccgccctggtgtcacagaggctactattactggcctggaaccgggaaccgaatatacaatttatgtcattgccctgaagaataatcagaagagcgagcccctgattggaaggaaaaagacaggacaagaagctctctctcagacaaccatctcatgggccccattccaggacacttctgagtacatcatttcatgtcatcctgttggcactgatgaagaacccttacagttcagggttcctggaacttctaccagtgccactctgacaggcctcaccagaggtgccacctacaacgtcatagtggaggcactgaaagaccagcagaggcataaggttcgggaagaggttgttaccgtgggcaactctgtcaacgaaggcttgaaccaacctacggatgactcgtgctttgacccctacacagtttcccattatgccgttggagatgagtgggaacgaatgtctgaatcaggctttaaactgttgtgccagtgcttaggctttggaagtggtcatttcagatgtgattcatctagatggtgccatgacaatggtgtgaactacaagattggagagaagtgggaccgtcagggagaaaatggccagatgatgagctgcacatgtcttgggaacggaaaaggagaattcaagtgtgaccctcatgaggcaacgtgttatgatgatgggaagacataccacgtaggagaacagtggcagaaggaatatctcggtgccatttgctcctgcacatgctttggaggccagcggggctggcgctgtgacaactgccgcagacctgggggtgaacccagtcccgaaggcactactggccagtcctacaaccagtattctcagagataccatcagagaacaaacactaatgttaattgcccaattgagtgcttcatgcctttagatgtacaggctgacagagaagattcccgagagtaaatcatctttccaatccagaggaacaagcatgtctctctgccaagatccatctaaactggagtgatgttagcagacccagcttagagttcttctttctttcttaagccctttgctctggaggaagttctccagcttcagctcaactcacagcttctccaagcatcaccctgggagtttcctgagggttttctcataaatgagggctgcacattgcctgttctgcttcgaagtattcaataccgctcagtattttaaatgaagtgattctaagatttggtttgggatcaataggaaagcatatgcagccaaccaagatgcaaatgttttgaaatgatatgaccaaaattttaagtaggaaagtcacccaaacacttctgctttcacttaagtgtctggcccgcaatactgtaggaacaagcatgatcttgttactgtgatattttaaatatccacagtactcactttttccaaatgatcctagtaattgcctagaaatatctttctcttacctgttatttatcaatttttcccagtatttttatacggaaaaaattgtattgaaaacacttagtatgcagttgataagaggaatttggtataattatggtgggtgattattttttatactgtatgtgccaaagctttactactgtggaaagacaactgttttaataaaagatttacattccacaacttgaagttcatctatttgatataagacaccttcgggggaaataattcctgtgaatattctttttcaattcagcaaacatttgaaaatctatgatgtgcaagtctaattgttgatttcagtacaagattttctaaatcagttgctacaaaaactgattggtttttgtcacttcatctcttcactaatggagatagctttacactttctgctttaatagatttaagtggaccccaatatttattaaaattgctagtttaccgttcagaagtataatagaaataatctttagttgctcttttctaaccattgtaattcttcccttcttccctccacctttccttcattgaataaacctctgttcaaagagattgcctgcaagggaaataaaaatgactaagatattaaaa

SEQ ID NO: 1712 - DNA, 8524 bp, Homo sapiens
  source 1..8524: mol_type = genomic DNA
gcccgcgccggctgtgctgcacagggggaggagagggaaccccaggcgcgagcgggaagaggggacctgcagccacaacttctctggtcctctgcatcccttctgtccctccacccgtccccttccccaccctctggcccccaccttcttggaggcgacaacccccgggaggcattagaagggatttttcccgcaggttgcgaagggaagcaaacttggtggcaacttgcctcccggtgcgggcgtctctcccccaccgtctcaacatgcttaggggtccggggcccgggctgctgctgctggccgtccagtgcctggggacagcggtgccctccacgggagcctcgaagagcaagaggcaggctcagcaaatggttcagccccagtccccggtggctgtcagtcaaagcaagcccggttgttatgacaatggaaaacactatcagataaatcaacagtgggagcggacctacctaggcaatgcgttggtttgtacttgttatggaggaagccgaggttttaactgcgagagtaaacctgaagctgaagagacttgctttgacaagtacactgggaacacttaccgagtgggtgacacttatgagcgtcctaaagactccatgatctgggactgtacctgcatcggggctgggcgagggagaataagctgtaccatcgcaaaccgctgccatgaagggggtcagtcctacaagattggtgacacctggaggagaccacatgagactggtggttacatgttagagtgtgtgtgtcttggtaatggaaaaggagaatggacctgcaagcccatagctgagaagtgttttgatcatgctgctgggacttcctatgtggtcggagaaacgtgggagaagccctaccaaggctggatgatggtagattgtacttgcctgggagaaggcagcggacgcatcacttgcacttctagaaatagatgcaacgatcaggacacaaggacatcctatagaattggagacacctggagcaagaaggataatcgaggaaacctgctccagtgcatctgcacaggcaacggccgaggagagtggaagtgtgagaggcacacctctgtgcagaccacatcgagcggatctggccccttcaccgatgttcgtgcagctgtttaccaaccgcagcctcacccccagcctcctccctatggccactgtgtcacagacagtggtgtggtctactctgtggggatgcagtggctgaagacacaaggaaataagcaaatgctttgcacgtgcctgggcaacggagtcagctgccaagagacagctgtaacccagacttacggtggcaactcaaatggagagccatgtgtcttaccattcacctacaatggcaggacgttctactcctgcaccacagaagggcgacaggacggacatctttggtgcagcacaacttcgaattatgagcaggaccagaaatactctttctgcacagaccacactgttttggttcagactcgaggaggaaattccaatggtgccttgtgccacttccccttcctatacaacaaccacaattacactgattgcacttctgagggcagaagagacaacatgaagtggtgtgggaccacacagaactatgatgccgaccagaagtttgggttctgccccatggctgcccacgaggaaatctgcacaaccaatgaaggggtcatgtaccgcattggagatcagtgggataagcagcatgacatgggtcacatgatgaggtgcacgtgtgttgggaatggtcgtggggaatggacatgcattgcctactcgcagcttcgagatcagtgcattgttgatgacatcacttacaatgtgaacgacacattccacaagcgtcatgaagaggggcacatgctgaactgtacatgcttcggtcagggtcggggcaggtggaagtgtgatcccgtcgaccaatgccaggattcagagactgggacgttttatcaaattggagattcatgggagaagtatgtgcatggtgtcagataccagtgctactgctatggccgtggcattggggagtggcattgccaacctttacagacctatccaagctcaagtggtcctgtcgaagtatttatcactgagactccgagtcagcccaactcccaccccatccagtggaatgcaccacagccatctcacatttccaagtacattctcaggtggagacctaaaaattctgtaggccgttggaaggaagctaccataccaggccacttaaactcctacaccatcaaaggcctgaagcctggtgtggtatacgagggccagctcatcagcatccagcagtacggccaccaagaagtgactcgctttgacttcaccaccaccagcaccagcacacctgtgaccagcaacaccgtgacaggagagacgactcccttttctcctcttgtggccacttctgaatctgtgaccgaaatcacagccagtagctttgtggtctcctgggtctcagcttccgacaccgtgtcgggattccgggtggaatatgagctgagtgaggagggagatgagccacagtacctggatcttccaagcacagccacttctgtgaacatccctgacctgcttcctggccgaaaatacattgtaaatgtctatcagatatctgaggatggggagcagagtttgatcctgtctacttcacaaacaacagcgcctgatgcccctcctgacacgactgtggaccaagttgatgacacctcaattgttgttcgctggagcagaccccaggctcccatcacagggtacagaatagtctattcgccatcagtagaaggtagcagcacagaactcaaccttcctgaaactgcaaactccgtcaccctcagtgacttgcaacctggtgttcagtataacatcactatctatgctgtggaagaaaatcaagaaagtacacctgttgtcattcaacaagaaaccactggcaccccacgctcagatacagtgccctctcccagggacctgcagtttgtggaagtgacagacgtgaaggtcaccatcatgtggacaccgcctgagagtgcagtgaccggctaccgtgtggatgtgatccccgtcaacctgcctggcgagcacgggcagaggctgcccatcagcaggaacacctttgcagaagtcaccgggctgtcccctggggtcacctattacttcaaagtctttgcagtgagccatgggagggagagcaagcctctgactgctcaacagacaaccaaactggatgctcccactaacctccagtttgtcaatgaaactgattctactgtcctggtgagatggactccacctcgggcccagataacaggataccgactgaccgtgggccttacccgaagaggacagcccaggcagtacaatgtgggtccctctgtctccaagtacccactgaggaatctgcagcctgcatctgagtacaccgtatccctcgtggccataaagggcaaccaagagagccccaaagccactggagtctttaccacactgcagcctgggagctctattccaccttacaacaccgaggtgactgagaccaccattgtgatcacatggacgcctgctccaagaattggttttaagctgggtgtacgaccaagccagggaggagaggcaccacgagaagtgacttcagactcaggaagcatcgttgtgtccggcttgactccaggagtagaatacgtctacaccatccaagtcctgagagatggacaggaaagagatgcgccaattgtaaacaaagtggtgacaccattgtctccaccaacaaacttgcatctggaggcaaaccctgacactggagtgctcacagtctcctgggagaggagcaccaccccagacattactggttatagaattaccacaacccctacaaacggccagcagggaaattctttggaagaagtggtccatgctgatcagagctcctgcacttttgataacctgagtcccggcctggagtacaatgtcagtgtttacactgtcaaggatgacaaggaaagtgtccctatctctgataccatcatcccagctgttcctcctcccactgacctgcgattcaccaacattggtccagacaccatgcgtgtcacctgggctccacccccatccattgatttaaccaacttcctggtgcgttactcacctgtgaaaaatgaggaagatgttgcagagttgtcaatttctccttcagacaatgcagtggtcttaacaaatctcctgcctggtacagaatatgtagtgagtgtctccagtgtctacgaacaacatgagagcacacctcttagaggaagacagaaaacaggtcttgattccccaactggcattgacttttctgatattactgccaactcttttactgtgcactggattgctcctcgagccaccatcactggctacaggatccgccatcatcccgagcacttcagtgggagacctcgagaagatcgggtgccccactctcggaattccatcaccctcaccaacctcactccaggcacagagtatgtggtcagcatcgttgctcttaatggcagagaggaaagtcccttattgattggccaacaatcaacagtttctgatgttccgagggacctggaagttgttgctgcgacccccaccagcctactgatcagctgggatgctcctgctgtcacagtgagatattacaggatcacttacggagagacaggaggaaatagccctgtccaggagttcactgtgcctgggagcaagtctacagctaccatcagcggccttaaacctggagttgattataccatcactgtgtatgctgtcactggccgtggagacagccccgcaagcagcaagccaatttccattaattaccgaacagaaattgacaaaccatcccagatgcaagtgaccgatgttcaggacaacagcattagtgtcaagtggctgccttcaagttcccctgttactggttacagagtaaccaccactcccaaaaatggaccaggaccaacaaaaactaaaactgcaggtccagatcaaacagaaatgactattgaaggcttgcagcccacagtggagtatgtggttagtgtctatgctcagaatccaagcggagagagtcagcctctggttcagactgcagtaaccaacattgatcgccctaaaggactggcattcactgatgtggatgtcgattccatcaaaattgcttgggaaagcccacaggggcaagtttccaggtacagggtgacctactcgagccctgaggatggaatccatgagctattccctgcacctgatggtgaagaagacactgcagagctgcaaggcctcagaccgggttctgagtacacagtcagtgtggttgccttgcacgatgatatggagagccagcccctgattggaacccagtccacagctattcctgcaccaactgacctgaagttcactcaggtcacacccacaagcctgagcgcccagtggacaccacccaatgttcagctcactggatatcgagtgcgggtgacccccaaggagaagaccggaccaatgaaagaaatcaaccttgctcctgacagctcatccgtggttgtatcaggacttatggtggccaccaaatatgaagtgagtgtctatgctcttaaggacactttgacaagcagaccagctcagggagttgtcaccactctggagaatgtcagcccaccaagaagggctcgtgtgacagatgctactgagaccaccatcaccattagctggagaaccaagactgagacgatcactggcttccaagttgatgccgttccagccaatggccagactccaatccagagaaccatcaagccagatgtcagaagctacaccatcacaggtttacaaccaggcactgactacaagatctacctgtacaccttgaatgacaatgctcggagctcccctgtggtcatcgacgcctccactgccattgatgcaccatccaacctgcgtttcctggccaccacacccaattccttgctggtatcatggcagccgccacgtgccaggattaccggctacatcatcaagtatgagaagcctgggtctcctcccagagaagtggtccctcggccccgccctggtgtcacagaggctactattactggcctggaaccgggaaccgaatatacaatttatgtcattgccctgaagaataatcagaagagcgagcccctgattggaaggaaaaagacagacgagcttccccaactggtaacccttccacaccccaatcttcatggaccagagatcttggatgttccttccacagttcaaaagacccctttcgtcacccaccctgggtatgacactggaaatggtattcagcttcctggcacttctggtcagcaacccagtgttgggcaacaaatgatctttgaggaacatggttttaggcggaccacaccgcccacaacggccacccccataaggcataggccaagaccatacccgccgaatgtaggtgaggaaatccaaattggtcacatccccagggaagatgtagactatcacctgtacccacacggtccgggactcaatccaaatgcctctacaggacaagaagctctctctcagacaaccatctcatgggccccattccaggacacttctgagtacatcatttcatgtcatcctgttggcactgatgaagaacccttacagttcagggttcctggaacttctaccagtgccactctgacaggcctcaccagaggtgccacctacaacgtcatagtggaggcactgaaagaccagcagaggcataaggttcgggaagaggttgttaccgtgggcaactctgtcaacgaaggcttgaaccaacctacggatgactcgtgctttgacccctacacagtttcccattatgccgttggagatgagtgggaacgaatgtctgaatcaggctttaaactgttgtgccagtgcttaggctttggaagtggtcatttcagatgtgattcatctagatggtgccatgacaatggtgtgaactacaagattggagagaagtgggaccgtcagggagaaaatggccagatgatgagctgcacatgtcttgggaacggaaaaggagaattcaagtgtgaccctcatgaggcaacgtgttatgatgatgggaagacataccacgtaggagaacagtggcagaaggaatatctcggtgccatttgctcctgcacatgctttggaggccagcggggctggcgctgtgacaactgccgcagacctgggggtgaacccagtcccgaaggcactactggccagtcctacaaccagtattctcagagataccatcagagaacaaacactaatgttaattgcccaattgagtgcttcatgcctttagatgtacaggctgacagagaagattcccgagagtaaatcatctttccaatccagaggaacaagcatgtctctctgccaagatccatctaaactggagtgatgttagcagacccagcttagagttcttctttctttcttaagccctttgctctggaggaagttctccagcttcagctcaactcacagcttctccaagcatcaccctgggagtttcctgagggttttctcataaatgagggctgcacattgcctgttctgcttcgaagtattcaataccgctcagtattttaaatgaagtgattctaagatttggtttgggatcaataggaaagcatatgcagccaaccaagatgcaaatgttttgaaatgatatgaccaaaattttaagtaggaaagtcacccaaacacttctgctttcacttaagtgtctggcccgcaatactgtaggaacaagcatgatcttgttactgtgatattttaaatatccacagtactcactttttccaaatgatcctagtaattgcctagaaatatctttctcttacctgttatttatcaatttttcccagtatttttatacggaaaaaattgtattgaaaacacttagtatgcagttgataagaggaatttggtataattatggtgggtgattattttttatactgtatgtgccaaagctttactactgtggaaagacaactgttttaataaaagatttacattccacaacttgaagttcatctatttgatataagacaccttcgggggaaataattcctgtgaatattctttttcaattcagcaaacatttgaaaatctatgatgtgcaagtctaattgttgatttcagtacaagattttctaaatcagttgctacaaaaactgattggtttttgtcacttcatctcttcactaatggagatagctttacactttctgctttaatagatttaagtggaccccaatatttattaaaattgctagtttaccgttcagaagtataatagaaataatctttagttgctcttttctaaccattgtaattcttcccttcttccctccacctttccttcattgaataaacctctgttcaaagagattgcctgcaagggaaataaaaatgactaagatatt

SEQ ID NO: 1713 - DNA, 8103 bp, Homo sapiens
  source 1..8103: mol_type = genomic DNA
cccgcgccggctgtgctgcacagggggaggagagggaaccccaggcgcgagcgggaagaggggacctgcagccacaacttctctggtcctctgcatcccttctgtccctccacccgtccccttccccaccctctggcccccaccttcttggaggcgacaacccccgggaggcattagaagggatttttcccgcaggttgcgaagggaagcaaacttggtggcaacttgcctcccggtgcgggcgtctctcccccaccgtctcaacatgcttaggggtccggggcccgggctgctgctgctggccgtccagtgcctggggacagcggtgccctccacgggagcctcgaagagcaagaggcaggctcagcaaatggttcagccccagtccccggtggctgtcagtcaaagcaagcccggttgttatgacaatggaaaacactatcagataaatcaacagtgggagcggacctacctaggcaatgcgttggtttgtacttgttatggaggaagccgaggttttaactgcgagagtaaacctgaagctgaagagacttgctttgacaagtacactgggaacacttaccgagtgggtgacacttatgagcgtcctaaagactccatgatctgggactgtacctgcatcggggctgggcgagggagaataagctgtaccatcgcaaaccgctgccatgaagggggtcagtcctacaagattggtgacacctggaggagaccacatgagactggtggttacatgttagagtgtgtgtgtcttggtaatggaaaaggagaatggacctgcaagcccatagctgagaagtgttttgatcatgctgctgggacttcctatgtggtcggagaaacgtgggagaagccctaccaaggctggatgatggtagattgtacttgcctgggagaaggcagcggacgcatcacttgcacttctagaaatagatgcaacgatcaggacacaaggacatcctatagaattggagacacctggagcaagaaggataatcgaggaaacctgctccagtgcatctgcacaggcaacggccgaggagagtggaagtgtgagaggcacacctctgtgcagaccacatcgagcggatctggccccttcaccgatgttcgtgcagctgtttaccaaccgcagcctcacccccagcctcctccctatggccactgtgtcacagacagtggtgtggtctactctgtggggatgcagtggctgaagacacaaggaaataagcaaatgctttgcacgtgcctgggcaacggagtcagctgccaagagacagctgtaacccagacttacggtggcaactcaaatggagagccatgtgtcttaccattcacctacaatggcaggacgttctactcctgcaccacagaagggcgacaggacggacatctttggtgcagcacaacttcgaattatgagcaggaccagaaatactctttctgcacagaccacactgttttggttcagactcgaggaggaaattccaatggtgccttgtgccacttccccttcctatacaacaaccacaattacactgattgcacttctgagggcagaagagacaacatgaagtggtgtgggaccacacagaactatgatgccgaccagaagtttgggttctgccccatggctgcccacgaggaaatctgcacaaccaatgaaggggtcatgtaccgcattggagatcagtgggataagcagcatgacatgggtcacatgatgaggtgcacgtgtgttgggaatggtcgtggggaatggacatgcattgcctactcgcagcttcgagatcagtgcattgttgatgacatcacttacaatgtgaacgacacattccacaagcgtcatgaagaggggcacatgctgaactgtacatgcttcggtcagggtcggggcaggtggaagtgtgatcccgtcgaccaatgccaggattcagagactgggacgttttatcaaattggagattcatgggagaagtatgtgcatggtgtcagataccagtgctactgctatggccgtggcattggggagtggcattgccaacctttacagacctatccaagctcaagtggtcctgtcgaagtatttatcactgagactccgagtcagcccaactcccaccccatccagtggaatgcaccacagccatctcacatttccaagtacattctcaggtggagacctaaaaattctgtaggccgttggaaggaagctaccataccaggccacttaaactcctacaccatcaaaggcctgaagcctggtgtggtatacgagggccagctcatcagcatccagcagtacggccaccaagaagtgactcgctttgacttcaccaccaccagcaccagcacacctgtgaccagcaacaccgtgacaggagagacgactcccttttctcctcttgtggccacttctgaatctgtgaccgaaatcacagccagtagctttgtggtctcctgggtctcagcttccgacaccgtgtcgggattccgggtggaatatgagctgagtgaggagggagatgagccacagtacctggatcttccaagcacagccacttctgtgaacatccctgacctgcttcctggccgaaaatacattgtaaatgtctatcagatatctgaggatggggagcagagtttgatcctgtctacttcacaaacaacagcgcctgatgcccctcctgacacgactgtggaccaagttgatgacacctcaattgttgttcgctggagcagaccccaggctcccatcacagggtacagaatagtctattcgccatcagtagaaggtagcagcacagaactcaaccttcctgaaactgcaaactccgtcaccctcagtgacttgcaacctggtgttcagtataacatcactatctatgctgtggaagaaaatcaagaaagtacacctgttgtcattcaacaagaaaccactggcaccccacgctcagatacagtgccctctcccagggacctgcagtttgtggaagtgacagacgtgaaggtcaccatcatgtggacaccgcctgagagtgcagtgaccggctaccgtgtggatgtgatccccgtcaacctgcctggcgagcacgggcagaggctgcccatcagcaggaacacctttgcagaagtcaccgggctgtcccctggggtcacctattacttcaaagtctttgcagtgagccatgggagggagagcaagcctctgactgctcaacagacaaccaaactggatgctcccactaacctccagtttgtcaatgaaactgattctactgtcctggtgagatggactccacctcgggcccagataacaggataccgactgaccgtgggccttacccgaagaggacagcccaggcagtacaatgtgggtccctctgtctccaagtacccactgaggaatctgcagcctgcatctgagtacaccgtatccctcgtggccataaagggcaaccaagagagccccaaagccactggagtctttaccacactgcagcctgggagctctattccaccttacaacaccgaggtgactgagaccaccattgtgatcacatggacgcctgctccaagaattggttttaagctgggtgtacgaccaagccagggaggagaggcaccacgagaagtgacttcagactcaggaagcatcgttgtgtccggcttgactccaggagtagaatacgtctacaccatccaagtcctgagagatggacaggaaagagatgcgccaattgtaaacaaagtggtgacaccattgtctccaccaacaaacttgcatctggaggcaaaccctgacactggagtgctcacagtctcctgggagaggagcaccaccccagacattactggttatagaattaccacaacccctacaaacggccagcagggaaattctttggaagaagtggtccatgctgatcagagctcctgcacttttgataacctgagtcccggcctggagtacaatgtcagtgtttacactgtcaaggatgacaaggaaagtgtccctatctctgataccatcatcccagctgttcctcctcccactgacctgcgattcaccaacattggtccagacaccatgcgtgtcacctgggctccacccccatccattgatttaaccaacttcctggtgcgttactcacctgtgaaaaatgaggaagatgttgcagagttgtcaatttctccttcagacaatgcagtggtcttaacaaatctcctgcctggtacagaatatgtagtgagtgtctccagtgtctacgaacaacatgagagcacacctcttagaggaagacagaaaacaggtcttgattccccaactggcattgacttttctgatattactgccaactcttttactgtgcactggattgctcctcgagccaccatcactggctacaggatccgccatcatcccgagcacttcagtgggagacctcgagaagatcgggtgccccactctcggaattccatcaccctcaccaacctcactccaggcacagagtatgtggtcagcatcgttgctcttaatggcagagaggaaagtcccttattgattggccaacaatcaacagtttctgatgttccgagggacctggaagttgttgctgcgacccccaccagcctactgatcagctgggatgctcctgctgtcacagtgagatattacaggatcacttacggagagacaggaggaaatagccctgtccaggagttcactgtgcctgggagcaagtctacagctaccatcagcggccttaaacctggagttgattataccatcactgtgtatgctgtcactggccgtggagacagccccgcaagcagcaagccaatttccattaattaccgaacagaaattgacaaaccatcccagatgcaagtgaccgatgttcaggacaacagcattagtgtcaagtggctgccttcaagttcccctgttactggttacagagtaaccaccactcccaaaaatggaccaggaccaacaaaaactaaaactgcaggtccagatcaaacagaaatgactattgaaggcttgcagcccacagtggagtatgtggttagtgtctatgctcagaatccaagcggagagagtcagcctctggttcagactgcagtaaccactattcctgcaccaactgacctgaagttcactcaggtcacacccacaagcctgagcgcccagtggacaccacccaatgttcagctcactggatatcgagtgcgggtgacccccaaggagaagaccggaccaatgaaagaaatcaaccttgctcctgacagctcatccgtggttgtatcaggacttatggtggccaccaaatatgaagtgagtgtctatgctcttaaggacactttgacaagcagaccagctcagggagttgtcaccactctggagaatgtcagcccaccaagaagggctcgtgtgacagatgctactgagaccaccatcaccattagctggagaaccaagactgagacgatcactggcttccaagttgatgccgttccagccaatggccagactccaatccagagaaccatcaagccagatgtcagaagctacaccatcacaggtttacaaccaggcactgactacaagatctacctgtacaccttgaatgacaatgctcggagctcccctgtggtcatcgacgcctccactgccattgatgcaccatccaacctgcgtttcctggccaccacacccaattccttgctggtatcatggcagccgccacgtgccaggattaccggctacatcatcaagtatgagaagcctgggtctcctcccagagaagtggtccctcggccccgccctggtgtcacagaggctactattactggcctggaaccgggaaccgaatatacaatttatgtcattgccctgaagaataatcagaagagcgagcccctgattggaaggaaaaagacagttcaaaagacccctttcgtcacccaccctgggtatgacactggaaatggtattcagcttcctggcacttctggtcagcaacccagtgttgggcaacaaatgatctttgaggaacatggttttaggcggaccacaccgcccacaacggccacccccataaggcataggccaagaccatacccgccgaatgtaggacaagaagctctctctcagacaaccatctcatgggccccattccaggacacttctgagtacatcatttcatgtcatcctgttggcactgatgaagaacccttacagttcagggttcctggaacttctaccagtgccactctgacaggcctcaccagaggtgccacctacaacgtcatagtggaggcactgaaagaccagcagaggcataaggttcgggaagaggttgttaccgtgggcaactctgtcaacgaaggcttgaaccaacctacggatgactcgtgctttgacccctacacagtttcccattatgccgttggagatgagtgggaacgaatgtctgaatcaggctttaaactgttgtgccagtgcttaggctttggaagtggtcatttcagatgtgattcatctagatggtgccatgacaatggtgtgaactacaagattggagagaagtgggaccgtcagggagaaaatggccagatgatgagctgcacatgtcttgggaacggaaaaggagaattcaagtgtgaccctcatgaggcaacgtgttatgatgatgggaagacataccacgtaggagaacagtggcagaaggaatatctcggtgccatttgctcctgcacatgctttggaggccagcggggctggcgctgtgacaactgccgcagacctgggggtgaacccagtcccgaaggcactactggccagtcctacaaccagtattctcagagataccatcagagaacaaacactaatgttaattgcccaattgagtgcttcatgcctttagatgtacaggctgacagagaagattcccgagagtaaatcatctttccaatccagaggaacaagcatgtctctctgccaagatccatctaaactggagtgatgttagcagacccagcttagagttcttctttctttcttaagccctttgctctggaggaagttctccagcttcagctcaactcacagcttctccaagcatcaccctgggagtttcctgagggttttctcataaatgagggctgcacattgcctgttctgcttcgaagtattcaataccgctcagtattttaaatgaagtgattctaagatttggtttgggatcaataggaaagcatatgcagccaaccaagatgcaaatgttttgaaatgatatgaccaaaattttaagtaggaaagtcacccaaacacttctgctttcacttaagtgtctggcccgcaatactgtaggaacaagcatgatcttgttactgtgatattttaaatatccacagtactcactttttccaaatgatcctagtaattgcctagaaatatctttctcttacctgttatttatcaatttttcccagtatttttatacggaaaaaattgtattgaaaacacttagtatgcagttgataagaggaatttggtataattatggtgggtgattattttttatactgtatgtgccaaagctttactactgtggaaagacaactgttttaataaaagatttacattccacaacttgaagttcatctatttgatataagacaccttcgggggaaataattcctgtgaatattctttttcaattcagcaaacatttgaaaatctatgatgtgcaagtctaattgttgatttcagtacaagattttctaaatcagttgctacaaaaactgattggtttttgtcacttcatctcttcactaatggagatagctttacactttctgctttaatagatttaagtggaccccaatatttattaaaattgctagtttaccgttcagaagtataatagaaataatctttagttgctcttttctaaccattgtaattcttcccttcttccctccacctttccttcattgaataaacctctgttcaaagagattgcctgcaagggaaataaaaatgactaagatattaaaagtatttgaatagta

SEQ ID NO: 1714 - DNA, 2388 bp, Homo sapiens
  source 1..2388: mol_type = genomic DNA
cggacgcccgcgccggctgtgctgcacagggggaggagagggaaccccaggcgcgagcgggaagaggggacctgcagccacaacttctctggtcctctgcatcccttctgtccctccacccgtccccttccccaccctctggcccccaccttcttggaggcgacaacccccgggaggcattagaagggatttttcccgcaggttgcgaagggaagcaaacttggtggcaacttgcctcccggtgcgggcgtctctcccccaccgtctcaacatgcttaggggtccggggcccgggctgctgctgctggccgtccagtgcctggggacagcggtgccctccacgggagcctcgaagagcaagaggcaggctcagcaaatggttcagccccagtccccggtggctgtcagtcaaagcaagcccggttgttatgacaatggaaaacactatcagataaatcaacagtgggagcggacctacctaggcaatgcgttggtttgtacttgttatggaggaagccgaggttttaactgcgagagtaaacctgaagctgaagagacttgctttgacaagtacactgggaacacttaccgagtgggtgacacttatgagcgtcctaaagactccatgatctgggactgtacctgcatcggggctgggcgagggagaataagctgtaccatcgcaaaccgctgccatgaagggggtcagtcctacaagattggtgacacctggaggagaccacatgagactggtggttacatgttagagtgtgtgtgtcttggtaatggaaaaggagaatggacctgcaagcccatagctgagaagtgttttgatcatgctgctgggacttcctatgtggtcggagaaacgtgggagaagccctaccaaggctggatgatggtagattgtacttgcctgggagaaggcagcggacgcatcacttgcacttctagaaatagatgcaacgatcaggacacaaggacatcctatagaattggagacacctggagcaagaaggataatcgaggaaacctgctccagtgcatctgcacaggcaacggccgaggagagtggaagtgtgagaggcacacctctgtgcagaccacatcgagcggatctggccccttcaccgatgttcgtgcagctgtttaccaaccgcagcctcacccccagcctcctccctatggccactgtgtcacagacagtggtgtggtctactctgtggggatgcagtggctgaagacacaaggaaataagcaaatgctttgcacgtgcctgggcaacggagtcagctgccaagagacagctgtaacccagacttacggtggcaactcaaatggagagccatgtgtcttaccattcacctacaatggcaggacgttctactcctgcaccacagaagggcgacaggacggacatctttggtgcagcacaacttcgaattatgagcaggaccagaaatactctttctgcacagaccacactgttttggttcagactcgaggaggaaattccaatggtgccttgtgccacttccccttcctatacaacaaccacaattacactgattgcacttctgagggcagaagagacaacatgaagtggtgtgggaccacacagaactatgatgccgaccagaagtttgggttctgccccatggctgcccacgaggaaatctgcacaaccaatgaaggggtcatgtaccgcattggagatcagtgggataagcagcatgacatgggtcacatgatgaggtgcacgtgtgttgggaatggtcgtggggaatggacatgcattgcctactcgcagcttcgagatcagtgcattgttgatgacatcacttacaatgtgaacgacacattccacaagcgtcatgaagaggggcacatgctgaactgtacatgcttcggtcagggtcggggcaggtggaagtgtgatcccgtcgaccaatgccaggattcagagactgggacgttttatcaaattggagattcatgggagaagtatgtgcatggtgtcagataccagtgctactgctatggccgtggcattggggagtggcattgccaacctttacagacctatccaagctcaagtggtcctgtcgaagtatttatcactgagactccgagtcagcccaactcccaccccatccagtggaatgcaccacagccatctcacatttccaagtacattctcaggtggagacctgtgagtatcccacccagaaaccttggatactgagtctcctaatcttatcaattctgatggtttctttttttcccagcttttgagccaacaactctgattaactattcctatagcatttactatatttgtttagtgaacaaacaatatgtggtcaattaaattgacttgtagactga

SEQ ID NO: 1715 - DNA, 7759 bp, Homo sapiens
  source 1..7759: mol_type = genomic DNA
cccgcgccggctgtgctgcacagggggaggagagggaaccccaggcgcgagcgggaagaggggacctgcagccacaacttctctggtcctctgcatcccttctgtccctccacccgtccccttccccaccctctggcccccaccttcttggaggcgacaacccccgggaggcattagaagggatttttcccgcaggttgcgaagggaagcaaacttggtggcaacttgcctcccggtgcgggcgtctctcccccaccgtctcaacatgcttaggggtccggggcccgggctgctgctgctggccgtccagtgcctggggacagcggtgccctccacgggagcctcgaagagcaagaggcaggctcagcaaatggttcagccccagtccccggtggctgtcagtcaaagcaagcccggttgttatgacaatggaaaacactatcagataaatcaacagtgggagcggacctacctaggcaatgcgttggtttgtacttgttatggaggaagccgaggttttaactgcgagagtaaacctgaagctgaagagacttgctttgacaagtacactgggaacacttaccgagtgggtgacacttatgagcgtcctaaagactccatgatctgggactgtacctgcatcggggctgggcgagggagaataagctgtaccatcgcaaaccgctgccatgaagggggtcagtcctacaagattggtgacacctggaggagaccacatgagactggtggttacatgttagagtgtgtgtgtcttggtaatggaaaaggagaatggacctgcaagcccatagctgagaagtgttttgatcatgctgctgggacttcctatgtggtcggagaaacgtgggagaagccctaccaaggctggatgatggtagattgtacttgcctgggagaaggcagcggacgcatcacttgcacttctagaaatagatgcaacgatcaggacacaaggacatcctatagaattggagacacctggagcaagaaggataatcgaggaaacctgctccagtgcatctgcacaggcaacggccgaggagagtggaagtgtgagaggcacacctctgtgcagaccacatcgagcggatctggccccttcaccgatgttcgtgcagctgtttaccaaccgcagcctcacccccagcctcctccctatggccactgtgtcacagacagtggtgtggtctactctgtggggatgcagtggctgaagacacaaggaaataagcaaatgctttgcacgtgcctgggcaacggagtcagctgccaagagacagctgtaacccagacttacggtggcaactcaaatggagagccatgtgtcttaccattcacctacaatggcaggacgttctactcctgcaccacagaagggcgacaggacggacatctttggtgcagcacaacttcgaattatgagcaggaccagaaatactctttctgcacagaccacactgttttggttcagactcgaggaggaaattccaatggtgccttgtgccacttccccttcctatacaacaaccacaattacactgattgcacttctgagggcagaagagacaacatgaagtggtgtgggaccacacagaactatgatgccgaccagaagtttgggttctgccccatggctgcccacgaggaaatctgcacaaccaatgaaggggtcatgtaccgcattggagatcagtgggataagcagcatgacatgggtcacatgatgaggtgcacgtgtgttgggaatggtcgtggggaatggacatgcattgcctactcgcagcttcgagatcagtgcattgttgatgacatcacttacaatgtgaacgacacattccacaagcgtcatgaagaggggcacatgctgaactgtacatgcttcggtcagggtcggggcaggtggaagtgtgatcccgtcgaccaatgccaggattcagagactgggacgttttatcaaattggagattcatgggagaagtatgtgcatggtgtcagataccagtgctactgctatggccgtggcattggggagtggcattgccaacctttacagacctatccaagctcaagtggtcctgtcgaagtatttatcactgagactccgagtcagcccaactcccaccccatccagtggaatgcaccacagccatctcacatttccaagtacattctcaggtggagacctaaaaattctgtaggccgttggaaggaagctaccataccaggccacttaaactcctacaccatcaaaggcctgaagcctggtgtggtatacgagggccagctcatcagcatccagcagtacggccaccaagaagtgactcgctttgacttcaccaccaccagcaccagcacacctgtgaccagcaacaccgtgacaggagagacgactcccttttctcctcttgtggccacttctgaatctgtgaccgaaatcacagccagtagctttgtggtctcctgggtctcagcttccgacaccgtgtcgggattccgggtggaatatgagctgagtgaggagggagatgagccacagtacctggatcttccaagcacagccacttctgtgaacatccctgacctgcttcctggccgaaaatacattgtaaatgtctatcagatatctgaggatggggagcagagtttgatcctgtctacttcacaaacaacagcgcctgatgcccctcctgacacgactgtggaccaagttgatgacacctcaattgttgttcgctggagcagaccccaggctcccatcacagggtacagaatagtctattcgccatcagtagaaggtagcagcacagaactcaaccttcctgaaactgcaaactccgtcaccctcagtgacttgcaacctggtgttcagtataacatcactatctatgctgtggaagaaaatcaagaaagtacacctgttgtcattcaacaagaaaccactggcaccccacgctcagatacagtgccctctcccagggacctgcagtttgtggaagtgacagacgtgaaggtcaccatcatgtggacaccgcctgagagtgcagtgaccggctaccgtgtggatgtgatccccgtcaacctgcctggcgagcacgggcagaggctgcccatcagcaggaacacctttgcagaagtcaccgggctgtcccctggggtcacctattacttcaaagtctttgcagtgagccatgggagggagagcaagcctctgactgctcaacagacaaccaaactggatgctcccactaacctccagtttgtcaatgaaactgattctactgtcctggtgagatggactccacctcgggcccagataacaggataccgactgaccgtgggccttacccgaagaggacagcccaggcagtacaatgtgggtccctctgtctccaagtacccactgaggaatctgcagcctgcatctgagtacaccgtatccctcgtggccataaagggcaaccaagagagccccaaagccactggagtctttaccacactgcagcctgggagctctattccaccttacaacaccgaggtgactgagaccaccattgtgatcacatggacgcctgctccaagaattggttttaagctgggtgtacgaccaagccagggaggagaggcaccacgagaagtgacttcagactcaggaagcatcgttgtgtccggcttgactccaggagtagaatacgtctacaccatccaagtcctgagagatggacaggaaagagatgcgccaattgtaaacaaagtggtgacaccattgtctccaccaacaaacttgcatctggaggcaaaccctgacactggagtgctcacagtctcctgggagaggagcaccaccccagacattactggttatagaattaccacaacccctacaaacggccagcagggaaattctttggaagaagtggtccatgctgatcagagctcctgcacttttgataacctgagtcccggcctggagtacaatgtcagtgtttacactgtcaaggatgacaaggaaagtgtccctatctctgataccatcatcccagaggtgccccaactcactgacctaagctttgttgatataaccgattcaagcatcggcctgaggtggaccccgctaaactcttccaccattattgggtaccgcatcacagtagttgcggcaggagaaggtatccctatttttgaagattttgtggactcctcagtaggatactacacagtcacagggctggagccgggcattgactatgatatcagcgttatcactctcattaatggcggcgagagtgcccctactacactgacacaacaaacggctgttcctcctcccactgacctgcgattcaccaacattggtccagacaccatgcgtgtcacctgggctccacccccatccattgatttaaccaacttcctggtgcgttactcacctgtgaaaaatgaggaagatgttgcagagttgtcaatttctccttcagacaatgcagtggtcttaacaaatctcctgcctggtacagaatatgtagtgagtgtctccagtgtctacgaacaacatgagagcacacctcttagaggaagacagaaaacaggtcttgattccccaactggcattgacttttctgatattactgccaactcttttactgtgcactggattgctcctcgagccaccatcactggctacaggatccgccatcatcccgagcacttcagtgggagacctcgagaagatcgggtgccccactctcggaattccatcaccctcaccaacctcactccaggcacagagtatgtggtcagcatcgttgctcttaatggcagagaggaaagtcccttattgattggccaacaatcaacagtttctgatgttccgagggacctggaagttgttgctgcgacccccaccagcctactgatcagctgggatgctcctgctgtcacagtgagatattacaggatcacttacggagagacaggaggaaatagccctgtccaggagttcactgtgcctgggagcaagtctacagctaccatcagcggccttaaacctggagttgattataccatcactgtgtatgctgtcactggccgtggagacagccccgcaagcagcaagccaatttccattaattaccgaacagaaattgacaaaccatcccagatgcaagtgaccgatgttcaggacaacagcattagtgtcaagtggctgccttcaagttcccctgttactggttacagagtaaccaccactcccaaaaatggaccaggaccaacaaaaactaaaactgcaggtccagatcaaacagaaatgactattgaaggcttgcagcccacagtggagtatgtggttagtgtctatgctcagaatccaagcggagagagtcagcctctggttcagactgcagtaaccactattcctgcaccaactgacctgaagttcactcaggtcacacccacaagcctgagcgcccagtggacaccacccaatgttcagctcactggatatcgagtgcgggtgacccccaaggagaagaccggaccaatgaaagaaatcaaccttgctcctgacagctcatccgtggttgtatcaggacttatggtggccaccaaatatgaagtgagtgtctatgctcttaaggacactttgacaagcagaccagctcagggagttgtcaccactctggagaatgtcagcccaccaagaagggctcgtgtgacagatgctactgagaccaccatcaccattagctggagaaccaagactgagacgatcactggcttccaagttgatgccgttccagccaatggccagactccaatccagagaaccatcaagccagatgtcagaagctacaccatcacaggtttacaaccaggcactgactacaagatctacctgtacaccttgaatgacaatgctcggagctcccctgtggtcatcgacgcctccactgccattgatgcaccatccaacctgcgtttcctggccaccacacccaattccttgctggtatcatggcagccgccacgtgccaggattaccggctacatcatcaagtatgagaagcctgggtctcctcccagagaagtggtccctcggccccgccctggtgtcacagaggctactattactggcctggaaccgggaaccgaatatacaatttatgtcattgccctgaagaataatcagaagagcgagcccctgattggaaggaaaaagacaggacaagaagctctctctcagacaaccatctcatgggccccattccaggacacttctgagtacatcatttcatgtcatcctgttggcactgatgaagaacccttacagttcagggttcctggaacttctaccagtgccactctgacaggcctcaccagaggtgccacctacaacgtcatagtggaggcactgaaagaccagcagaggcataaggttcgggaagaggttgttaccgtgggcaactctgtcaacgaaggcttgaaccaacctacggatgactcgtgctttgacccctacacagtttcccattatgccgttggagatgagtgggaacgaatgtctgaatcaggctttaaactgttgtgccagtgcttaggctttggaagtggtcatttcagatgtgattcatctagatggtgccatgacaatggtgtgaactacaagattggagagaagtgggaccgtcagggagaaaatggccagatgatgagctgcacatgtcttgggaacggaaaaggagaattcaagtgtgaccctcatgaggcaacgtgttatgatgatgggaagacataccacgtaggagaacagtggcagaaggaatatctcggtgccatttgctcctgcacatgctttggaggccagcggggctggcgctgtgacaactgccgcagacctgggggtgaacccagtcccgaaggcactactggccagtcctacaaccagtattctcagagataccatcagagaacaaacactaatgttaattgcccaattgagtgcttcatgcctttagatgtacaggctgacagagaagattcccgagagtaaatcatctttccaatccagaggaacaagcatgtctctctgccaagatccatctaaactggagtgatgttagcagacccagcttagagttcttctttctttcttaagccctttgctctggaggaagttctccagcttcagctcaactcacagcttctccaagcatcaccctgggagtttcctgagggttttctcataaatgagggctgcacattgcctgttctgcttcgaagtattcaataccgctcagtattttaaatgaagtgattctaagatttggtttgggatcaataggaaagcatatgcagccaaccaagatgcaaatgttttgaaatgatatgaccaaaattttaagtaggaaagtcacccaaacacttctgctttcacttaagtgtctggcccgcaatactgtaggaacaagcatgatcttgttactgtgatattttaaatatccacagtactcactttttccaaatgatcctagtaattgcctagaaatatctttctcttacctgttatttatcaatttttcccagtatttttatacggaaaaaattgtattgaaaacacttagtatgcagttgataagaggaatttggtataattatggtgggtgattattttttatactgtatgtgccaaagctttactactgtggaaagacaactgttttaataaaagatttacattcca

SEQ ID NO: 1716 - DNA, 7762 bp, Homo sapiens
  source 1..7762: mol_type = genomic DNA
cggacgcccgcgccggctgtgctgcacagggggaggagagggaaccccaggcgcgagcgggaagaggggacctgcagccacaacttctctggtcctctgcatcccttctgtccctccacccgtccccttccccaccctctggcccccaccttcttggaggcgacaacccccgggaggcattagaagggatttttcccgcaggttgcgaagggaagcaaacttggtggcaacttgcctcccggtgcgggcgtctctcccccaccgtctcaacatgcttaggggtccggggcccgggctgctgctgctggccgtccagtgcctggggacagcggtgccctccacgggagcctcgaagagcaagaggcaggctcagcaaatggttcagccccagtccccggtggctgtcagtcaaagcaagcccggttgttatgacaatggaaaacactatcagataaatcaacagtgggagcggacctacctaggcaatgcgttggtttgtacttgttatggaggaagccgaggttttaactgcgagagtaaacctgaagctgaagagacttgctttgacaagtacactgggaacacttaccgagtgggtgacacttatgagcgtcctaaagactccatgatctgggactgtacctgcatcggggctgggcgagggagaataagctgtaccatcgcaaaccgctgccatgaagggggtcagtcctacaagattggtgacacctggaggagaccacatgagactggtggttacatgttagagtgtgtgtgtcttggtaatggaaaaggagaatggacctgcaagcccatagctgagaagtgttttgatcatgctgctgggacttcctatgtggtcggagaaacgtgggagaagccctaccaaggctggatgatggtagattgtacttgcctgggagaaggcagcggacgcatcacttgcacttctagaaatagatgcaacgatcaggacacaaggacatcctatagaattggagacacctggagcaagaaggataatcgaggaaacctgctccagtgcatctgcacaggcaacggccgaggagagtggaagtgtgagaggcacacctctgtgcagaccacatcgagcggatctggccccttcaccgatgttcgtgcagctgtttaccaaccgcagcctcacccccagcctcctccctatggccactgtgtcacagacagtggtgtggtctactctgtggggatgcagtggctgaagacacaaggaaataagcaaatgctttgcacgtgcctgggcaacggagtcagctgccaagagacagctgtaacccagacttacggtggcaactcaaatggagagccatgtgtcttaccattcacctacaatggcaggacgttctactcctgcaccacagaagggcgacaggacggacatctttggtgcagcacaacttcgaattatgagcaggaccagaaatactctttctgcacagaccacactgttttggttcagactcgaggaggaaattccaatggtgccttgtgccacttccccttcctatacaacaaccacaattacactgattgcacttctgagggcagaagagacaacatgaagtggtgtgggaccacacagaactatgatgccgaccagaagtttgggttctgccccatggctgcccacgaggaaatctgcacaaccaatgaaggggtcatgtaccgcattggagatcagtgggataagcagcatgacatgggtcacatgatgaggtgcacgtgtgttgggaatggtcgtggggaatggacatgcattgcctactcgcagcttcgagatcagtgcattgttgatgacatcacttacaatgtgaacgacacattccacaagcgtcatgaagaggggcacatgctgaactgtacatgcttcggtcagggtcggggcaggtggaagtgtgatcccgtcgaccaatgccaggattcagagactgggacgttttatcaaattggagattcatgggagaagtatgtgcatggtgtcagataccagtgctactgctatggccgtggcattggggagtggcattgccaacctttacagacctatccaagctcaagtggtcctgtcgaagtatttatcactgagactccgagtcagcccaactcccaccccatccagtggaatgcaccacagccatctcacatttccaagtacattctcaggtggagacctaaaaattctgtaggccgttggaaggaagctaccataccaggccacttaaactcctacaccatcaaaggcctgaagcctggtgtggtatacgagggccagctcatcagcatccagcagtacggccaccaagaagtgactcgctttgacttcaccaccaccagcaccagcacacctgtgaccagcaacaccgtgacaggagagacgactcccttttctcctcttgtggccacttctgaatctgtgaccgaaatcacagccagtagctttgtggtctcctgggtctcagcttccgacaccgtgtcgggattccgggtggaatatgagctgagtgaggagggagatgagccacagtacctggatcttccaagcacagccacttctgtgaacatccctgacctgcttcctggccgaaaatacattgtaaatgtctatcagatatctgaggatggggagcagagtttgatcctgtctacttcacaaacaacagcgcctgatgcccctcctgacacgactgtggaccaagttgatgacacctcaattgttgttcgctggagcagaccccaggctcccatcacagggtacagaatagtctattcgccatcagtagaaggtagcagcacagaactcaaccttcctgaaactgcaaactccgtcaccctcagtgacttgcaacctggtgttcagtataacatcactatctatgctgtggaagaaaatcaagaaagtacacctgttgtcattcaacaagaaaccactggcaccccacgctcagatacagtgccctctcccagggacctgcagtttgtggaagtgacagacgtgaaggtcaccatcatgtggacaccgcctgagagtgcagtgaccggctaccgtgtggatgtgatccccgtcaacctgcctggcgagcacgggcagaggctgcccatcagcaggaacacctttgcagaagtcaccgggctgtcccctggggtcacctattacttcaaagtctttgcagtgagccatgggagggagagcaagcctctgactgctcaacagacaaccaaactggatgctcccactaacctccagtttgtcaatgaaactgattctactgtcctggtgagatggactccacctcgggcccagataacaggataccgactgaccgtgggccttacccgaagaggacagcccaggcagtacaatgtgggtccctctgtctccaagtacccactgaggaatctgcagcctgcatctgagtacaccgtatccctcgtggccataaagggcaaccaagagagccccaaagccactggagtctttaccacactgcagcctgggagctctattccaccttacaacaccgaggtgactgagaccaccattgtgatcacatggacgcctgctccaagaattggttttaagctgggtgtacgaccaagccagggaggagaggcaccacgagaagtgacttcagactcaggaagcatcgttgtgtccggcttgactccaggagtagaatacgtctacaccatccaagtcctgagagatggacaggaaagagatgcgccaattgtaaacaaagtggtgacaccattgtctccaccaacaaacttgcatctggaggcaaaccctgacactggagtgctcacagtctcctgggagaggagcaccaccccagacattactggttatagaattaccacaacccctacaaacggccagcagggaaattctttggaagaagtggtccatgctgatcagagctcctgcacttttgataacctgagtcccggcctggagtacaatgtcagtgtttacactgtcaaggatgacaaggaaagtgtccctatctctgataccatcatcccagctgttcctcctcccactgacctgcgattcaccaacattggtccagacaccatgcgtgtcacctgggctccacccccatccattgatttaaccaacttcctggtgcgttactcacctgtgaaaaatgaggaagatgttgcagagttgtcaatttctccttcagacaatgcagtggtcttaacaaatctcctgcctggtacagaatatgtagtgagtgtctccagtgtctacgaacaacatgagagcacacctcttagaggaagacagaaaacaggtcttgattccccaactggcattgacttttctgatattactgccaactcttttactgtgcactggattgctcctcgagccaccatcactggctacaggatccgccatcatcccgagcacttcagtgggagacctcgagaagatcgggtgccccactctcggaattccatcaccctcaccaacctcactccaggcacagagtatgtggtcagcatcgttgctcttaatggcagagaggaaagtcccttattgattggccaacaatcaacagtttctgatgttccgagggacctggaagttgttgctgcgacccccaccagcctactgatcagctgggatgctcctgctgtcacagtgagatattacaggatcacttacggagagacaggaggaaatagccctgtccaggagttcactgtgcctgggagcaagtctacagctaccatcagcggccttaaacctggagttgattataccatcactgtgtatgctgtcactggccgtggagacagccccgcaagcagcaagccaatttccattaattaccgaacagaaattgacaaaccatcccagatgcaagtgaccgatgttcaggacaacagcattagtgtcaagtggctgccttcaagttcccctgttactggttacagagtaaccaccactcccaaaaatggaccaggaccaacaaaaactaaaactgcaggtccagatcaaacagaaatgactattgaaggcttgcagcccacagtggagtatgtggttagtgtctatgctcagaatccaagcggagagagtcagcctctggttcagactgcagtaaccactattcctgcaccaactgacctgaagttcactcaggtcacacccacaagcctgagcgcccagtggacaccacccaatgttcagctcactggatatcgagtgcgggtgacccccaaggagaagaccggaccaatgaaagaaatcaaccttgctcctgacagctcatccgtggttgtatcaggacttatggtggccaccaaatatgaagtgagtgtctatgctcttaaggacactttgacaagcagaccagctcagggagttgtcaccactctggagaatgtcagcccaccaagaagggctcgtgtgacagatgctactgagaccaccatcaccattagctggagaaccaagactgagacgatcactggcttccaagttgatgccgttccagccaatggccagactccaatccagagaaccatcaagccagatgtcagaagctacaccatcacaggtttacaaccaggcactgactacaagatctacctgtacaccttgaatgacaatgctcggagctcccctgtggtcatcgacgcctccactgccattgatgcaccatccaacctgcgtttcctggccaccacacccaattccttgctggtatcatggcagccgccacgtgccaggattaccggctacatcatcaagtatgagaagcctgggtctcctcccagagaagtggtccctcggccccgccctggtgtcacagaggctactattactggcctggaaccgggaaccgaatatacaatttatgtcattgccctgaagaataatcagaagagcgagcccctgattggaaggaaaaagacagacgagcttccccaactggtaacccttccacaccccaatcttcatggaccagagatcttggatgttccttccacagttcaaaagacccctttcgtcacccaccctgggtatgacactggaaatggtattcagcttcctggcacttctggtcagcaacccagtgttgggcaacaaatgatctttgaggaacatggttttaggcggaccacaccgcccacaacggccacccccataaggcataggccaagaccatacccgccgaatgtaggacaagaagctctctctcagacaaccatctcatgggccccattccaggacacttctgagtacatcatttcatgtcatcctgttggcactgatgaagaacccttacagttcagggttcctggaacttctaccagtgccactctgacaggcctcaccagaggtgccacctacaacgtcatagtggaggcactgaaagaccagcagaggcataaggttcgggaagaggttgttaccgtgggcaactctgtcaacgaaggcttgaaccaacctacggatgactcgtgctttgacccctacacagtttcccattatgccgttggagatgagtgggaacgaatgtctgaatcaggctttaaactgttgtgccagtgcttaggctttggaagtggtcatttcagatgtgattcatctagatggtgccatgacaatggtgtgaactacaagattggagagaagtgggaccgtcagggagaaaatggccagatgatgagctgcacatgtcttgggaacggaaaaggagaattcaagtgtgaccctcatgaggcaacgtgttatgatgatgggaagacataccacgtaggagaacagtggcagaaggaatatctcggtgccatttgctcctgcacatgctttggaggccagcggggctggcgctgtgacaactgccgcagacctgggggtgaacccagtcccgaaggcactactggccagtcctacaaccagtattctcagagataccatcagagaacaaacactaatgttaattgcccaattgagtgcttcatgcctttagatgtacaggctgacagagaagattcccgagagtaaatcatctttccaatccagaggaacaagcatgtctctctgccaagatccatctaaactggagtgatgttagcagacccagcttagagttcttctttctttcttaagccctttgctctggaggaagttctccagcttcagctcaactcacagcttctccaagcatcaccctgggagtttcctgagggttttctcataaatgagggctgcacattgcctgttctgcttcgaagtattcaataccgctcagtattttaaatgaagtgattctaagatttggtttgggatcaataggaaagcatatgcagccaaccaagatgcaaatgttttgaaatgatatgaccaaaattttaagtaggaaagtcacccaaacacttctgctttcacttaagtgtctggcccgcaatactgtaggaacaagcatgatcttgttactgtgatattttaaatatccacagtactcactttttccaaatgatcctagtaattgcctagaaatatctttctcttacctgttatttatcaatttttcccagtatttttatacggaaaaaattgtattgaaaacacttagtatgcagttgataagaggaatttggtataattatggtgggtgattattttttatactgtatgtgccaaagctttactactgtggaaagacaactgttttaataaaagatttacattccacaa

SEQ ID NO: 1717 - DNA, 7952 bp, Homo sapiens
  source 1..7952: mol_type = genomic DNA
gcccgcgccggctgtgctgcacagggggaggagagggaaccccaggcgcgagcgggaagaggggacctgcagccacaacttctctggtcctctgcatcccttctgtccctccacccgtccccttccccaccctctggcccccaccttcttggaggcgacaacccccgggaggcattagaagggatttttcccgcaggttgcgaagggaagcaaacttggtggcaacttgcctcccggtgcgggcgtctctcccccaccgtctcaacatgcttaggggtccggggcccgggctgctgctgctggccgtccagtgcctggggacagcggtgccctccacgggagcctcgaagagcaagaggcaggctcagcaaatggttcagccccagtccccggtggctgtcagtcaaagcaagcccggttgttatgacaatggaaaacactatcagataaatcaacagtgggagcggacctacctaggcaatgcgttggtttgtacttgttatggaggaagccgaggttttaactgcgagagtaaacctgaagctgaagagacttgctttgacaagtacactgggaacacttaccgagtgggtgacacttatgagcgtcctaaagactccatgatctgggactgtacctgcatcggggctgggcgagggagaataagctgtaccatcgcaaaccgctgccatgaagggggtcagtcctacaagattggtgacacctggaggagaccacatgagactggtggttacatgttagagtgtgtgtgtcttggtaatggaaaaggagaatggacctgcaagcccatagctgagaagtgttttgatcatgctgctgggacttcctatgtggtcggagaaacgtgggagaagccctaccaaggctggatgatggtagattgtacttgcctgggagaaggcagcggacgcatcacttgcacttctagaaatagatgcaacgatcaggacacaaggacatcctatagaattggagacacctggagcaagaaggataatcgaggaaacctgctccagtgcatctgcacaggcaacggccgaggagagtggaagtgtgagaggcacacctctgtgcagaccacatcgagcggatctggccccttcaccgatgttcgtgcagctgtttaccaaccgcagcctcacccccagcctcctccctatggccactgtgtcacagacagtggtgtggtctactctgtggggatgcagtggctgaagacacaaggaaataagcaaatgctttgcacgtgcctgggcaacggagtcagctgccaagagacagctgtaacccagacttacggtggcaactcaaatggagagccatgtgtcttaccattcacctacaatggcaggacgttctactcctgcaccacagaagggcgacaggacggacatctttggtgcagcacaacttcgaattatgagcaggaccagaaatactctttctgcacagaccacactgttttggttcagactcgaggaggaaattccaatggtgccttgtgccacttccccttcctatacaacaaccacaattacactgattgcacttctgagggcagaagagacaacatgaagtggtgtgggaccacacagaactatgatgccgaccagaagtttgggttctgccccatggctgcccacgaggaaatctgcacaaccaatgaaggggtcatgtaccgcattggagatcagtgggataagcagcatgacatgggtcacatgatgaggtgcacgtgtgttgggaatggtcgtggggaatggacatgcattgcctactcgcagcttcgagatcagtgcattgttgatgacatcacttacaatgtgaacgacacattccacaagcgtcatgaagaggggcacatgctgaactgtacatgcttcggtcagggtcggggcaggtggaagtgtgatcccgtcgaccaatgccaggattcagagactgggacgttttatcaaattggagattcatgggagaagtatgtgcatggtgtcagataccagtgctactgctatggccgtggcattggggagtggcattgccaacctttacagacctatccaagctcaagtggtcctgtcgaagtatttatcactgagactccgagtcagcccaactcccaccccatccagtggaatgcaccacagccatctcacatttccaagtacattctcaggtggagacctaaaaattctgtaggccgttggaaggaagctaccataccaggccacttaaactcctacaccatcaaaggcctgaagcctggtgtggtatacgagggccagctcatcagcatccagcagtacggccaccaagaagtgactcgctttgacttcaccaccaccagcaccagcacacctgtgaccagcaacaccgtgacaggagagacgactcccttttctcctcttgtggccacttctgaatctgtgaccgaaatcacagccagtagctttgtggtctcctgggtctcagcttccgacaccgtgtcgggattccgggtggaatatgagctgagtgaggagggagatgagccacagtacctggatcttccaagcacagccacttctgtgaacatccctgacctgcttcctggccgaaaatacattgtaaatgtctatcagatatctgaggatggggagcagagtttgatcctgtctacttcacaaacaacagcgcctgatgcccctcctgacacgactgtggaccaagttgatgacacctcaattgttgttcgctggagcagaccccaggctcccatcacagggtacagaatagtctattcgccatcagtagaaggtagcagcacagaactcaaccttcctgaaactgcaaactccgtcaccctcagtgacttgcaacctggtgttcagtataacatcactatctatgctgtggaagaaaatcaagaaagtacacctgttgtcattcaacaagaaaccactggcaccccacgctcagatacagtgccctctcccagggacctgcagtttgtggaagtgacagacgtgaaggtcaccatcatgtggacaccgcctgagagtgcagtgaccggctaccgtgtggatgtgatccccgtcaacctgcctggcgagcacgggcagaggctgcccatcagcaggaacacctttgcagaagtcaccgggctgtcccctggggtcacctattacttcaaagtctttgcagtgagccatgggagggagagcaagcctctgactgctcaacagacaaccaaactggatgctcccactaacctccagtttgtcaatgaaactgattctactgtcctggtgagatggactccacctcgggcccagataacaggataccgactgaccgtgggccttacccgaagaggacagcccaggcagtacaatgtgggtccctctgtctccaagtacccactgaggaatctgcagcctgcatctgagtacaccgtatccctcgtggccataaagggcaaccaagagagccccaaagccactggagtctttaccacactgcagcctgggagctctattccaccttacaacaccgaggtgactgagaccaccattgtgatcacatggacgcctgctccaagaattggttttaagctgggtgtacgaccaagccagggaggagaggcaccacgagaagtgacttcagactcaggaagcatcgttgtgtccggcttgactccaggagtagaatacgtctacaccatccaagtcctgagagatggacaggaaagagatgcgccaattgtaaacaaagtggtgacaccattgtctccaccaacaaacttgcatctggaggcaaaccctgacactggagtgctcacagtctcctgggagaggagcaccaccccagacattactggttatagaattaccacaacccctacaaacggccagcagggaaattctttggaagaagtggtccatgctgatcagagctcctgcacttttgataacctgagtcccggcctggagtacaatgtcagtgtttacactgtcaaggatgacaaggaaagtgtccctatctctgataccatcatcccagctgttcctcctcccactgacctgcgattcaccaacattggtccagacaccatgcgtgtcacctgggctccacccccatccattgatttaaccaacttcctggtgcgttactcacctgtgaaaaatgaggaagatgttgcagagttgtcaatttctccttcagacaatgcagtggtcttaacaaatctcctgcctggtacagaatatgtagtgagtgtctccagtgtctacgaacaacatgagagcacacctcttagaggaagacagaaaacaggtcttgattccccaactggcattgacttttctgatattactgccaactcttttactgtgcactggattgctcctcgagccaccatcactggctacaggatccgccatcatcccgagcacttcagtgggagacctcgagaagatcgggtgccccactctcggaattccatcaccctcaccaacctcactccaggcacagagtatgtggtcagcatcgttgctcttaatggcagagaggaaagtcccttattgattggccaacaatcaacagtttctgatgttccgagggacctggaagttgttgctgcgacccccaccagcctactgatcagctgggatgctcctgctgtcacagtgagatattacaggatcacttacggagagacaggaggaaatagccctgtccaggagttcactgtgcctgggagcaagtctacagctaccatcagcggccttaaacctggagttgattataccatcactgtgtatgctgtcactggccgtggagacagccccgcaagcagcaagccaatttccattaattaccgaacagaaattgacaaaccatcccagatgcaagtgaccgatgttcaggacaacagcattagtgtcaagtggctgccttcaagttcccctgttactggttacagagtaaccaccactcccaaaaatggaccaggaccaacaaaaactaaaactgcaggtccagatcaaacagaaatgactattgaaggcttgcagcccacagtggagtatgtggttagtgtctatgctcagaatccaagcggagagagtcagcctctggttcagactgcagtaaccaacattgatcgccctaaaggactggcattcactgatgtggatgtcgattccatcaaaattgcttgggaaagcccacaggggcaagtttccaggtacagggtgacctactcgagccctgaggatggaatccatgagctattccctgcacctgatggtgaagaagacactgcagagctgcaaggcctcagaccgggttctgagtacacagtcagtgtggttgccttgcacgatgatatggagagccagcccctgattggaacccagtccacagctattcctgcaccaactgacctgaagttcactcaggtcacacccacaagcctgagcgcccagtggacaccacccaatgttcagctcactggatatcgagtgcgggtgacccccaaggagaagaccggaccaatgaaagaaatcaaccttgctcctgacagctcatccgtggttgtatcaggacttatggtggccaccaaatatgaagtgagtgtctatgctcttaaggacactttgacaagcagaccagctcagggagttgtcaccactctggagaatgtcagcccaccaagaagggctcgtgtgacagatgctactgagaccaccatcaccattagctggagaaccaagactgagacgatcactggcttccaagttgatgccgttccagccaatggccagactccaatccagagaaccatcaagccagatgtcagaagctacaccatcacaggtttacaaccaggcactgactacaagatctacctgtacaccttgaatgacaatgctcggagctcccctgtggtcatcgacgcctccactgccattgatgcaccatccaacctgcgtttcctggccaccacacccaattccttgctggtatcatggcagccgccacgtgccaggattaccggctacatcatcaagtatgagaagcctgggtctcctcccagagaagtggtccctcggccccgccctggtgtcacagaggctactattactggcctggaaccgggaaccgaatatacaatttatgtcattgccctgaagaataatcagaagagcgagcccctgattggaaggaaaaagacagttcaaaagacccctttcgtcacccaccctgggtatgacactggaaatggtattcagcttcctggcacttctggtcagcaacccagtgttgggcaacaaatgatctttgaggaacatggttttaggcggaccacaccgcccacaacggccacccccataaggcataggccaagaccatacccgccgaatgtaggacaagaagctctctctcagacaaccatctcatgggccccattccaggacacttctgagtacatcatttcatgtcatcctgttggcactgatgaagaacccttacagttcagggttcctggaacttctaccagtgccactctgacaggcctcaccagaggtgccacctacaacgtcatagtggaggcactgaaagaccagcagaggcataaggttcgggaagaggttgttaccgtgggcaactctgtcaacgaaggcttgaaccaacctacggatgactcgtgctttgacccctacacagtttcccattatgccgttggagatgagtgggaacgaatgtctgaatcaggctttaaactgttgtgccagtgcttaggctttggaagtggtcatttcagatgtgattcatctagatggtgccatgacaatggtgtgaactacaagattggagagaagtgggaccgtcagggagaaaatggccagatgatgagctgcacatgtcttgggaacggaaaaggagaattcaagtgtgaccctcatgaggcaacgtgttatgatgatgggaagacataccacgtaggagaacagtggcagaaggaatatctcggtgccatttgctcctgcacatgctttggaggccagcggggctggcgctgtgacaactgccgcagacctgggggtgaacccagtcccgaaggcactactggccagtcctacaaccagtattctcagagataccatcagagaacaaacactaatgttaattgcccaattgagtgcttcatgcctttagatgtacaggctgacagagaagattcccgagagtaaatcatctttccaatccagaggaacaagcatgtctctctgccaagatccatctaaactggagtgatgttagcagacccagcttagagttcttctttctttcttaagccctttgctctggaggaagttctccagcttcagctcaactcacagcttctccaagcatcaccctgggagtttcctgagggttttctcataaatgagggctgcacattgcctgttctgcttcgaagtattcaataccgctcagtattttaaatgaagtgattctaagatttggtttgggatcaataggaaagcatatgcagccaaccaagatgcaaatgttttgaaatgatatgaccaaaattttaagtaggaaagtcacccaaacacttctgctttcacttaagtgtctggcccgcaatactgtaggaacaagcatgatcttgttactgtgatattttaaatatccacagtactcactttttccaaatgatcctagtaattgcctagaaatatctttctcttacctgttatttatcaatttttcccagtatttttatacggaaaaaattgtattgaaaacacttagtatgcagttgataagaggaatttggtataattatggtgggtgattattttttatactgtatgtgccaaagctttactactgtggaaagacaactgttttaataaaagatttacattccacaa

SEQ ID NO: 1718 - DNA, 3720 bp, Homo sapiens
  source 1..3720: mol_type = genomic DNA
ctgaggtggaccccgctaaactcttccaccattattgggtaccgcatcacagtagttgcggcaggagaaggtatccctatttttgaagattttgtggactcctcagtaggatactacacagtcacagggctggagccgggcattgactatgatatcagcgttatcactctcattaatggcggcgagagtgcccctactacactgacacaacaaacggctgttcctcctcccactgacctgcgattcaccaacattggtccagacaccatgcgtgtcacctgggctccacccccatccattgatttaaccaacttcctggtgcgttactcacctgtgaaaaatgaggaagatgttgcagagttgtcaatttctccttcagacaatgcagtggtcttaacaaatctcctgcctggtacagaatatgtagtgagtgtctccagtgtctacgaacaacatgagagcacacctcttagaggaagacagaaaacaggtcttgattccccaactggcattgacttttctgatattactgccaactcttttactgtgcactggattgctcctcgagccaccatcactggctacaggatccgccatcatcccgagcacttcagtgggagacctcgagaagatcgggtgccccactctcggaattccatcaccctcaccaacctcactccaggcacagagtatgtggtcagcatcgttgctcttaatggcagagaggaaagtcccttattgattggccaacaatcaacagtttctgatgttccgagggacctggaagttgttgctgcgacccccaccagcctactgatcagctgggatgctcctgctgtcacagtgagatattacaggatcacttacggagagacaggaggaaatagccctgtccaggagttcactgtgcctgggagcaagtctacagctaccatcagcggccttaaacctggagttgattataccatcactgtgtatgctgtcactggccgtggagacagccccgcaagcagcaagccaatttccattaattaccgaacagaaattgacaaaccatcccagatgcaagtgaccgatgttcaggacaacagcattagtgtcaagtggctgccttcaagttcccctgttactggttacagagtaaccaccactcccaaaaatggaccaggaccaacaaaaactaaaactgcaggtccagatcaaacagaaatgactattgaaggcttgcagcccacagtggagtatgtggttagtgtctatgctcagaatccaagcggagagagtcagcctctggttcagactgcagtaaccactattcctgcaccaactgacctgaagttcactcaggtcacacccacaagcctgagcgcccagtggacaccacccaatgttcagctcactggatatcgagtgcgggtgacccccaaggagaagaccggaccaatgaaagaaatcaaccttgctcctgacagctcatccgtggttgtatcaggacttatggtggccaccaaatatgaagtgagtgtctatgctcttaaggacactttgacaagcagaccagctcagggagttgtcaccactctggagaatgtcagcccaccaagaagggctcgtgtgacagatgctactgagaccaccatcaccattagctggagaaccaagactgagacgatcactggcttccaagttgatgccgttccagccaatggccagactccaatccagagaaccatcaagccagatgtcagaagctacaccatcacaggtttacaaccaggcactgactacaagatctacctgtacaccttgaatgacaatgctcggagctcccctgtggtcatcgacgcctccactgccattgatgcaccatccaacctgcgtttcctggccaccacacccaattccttgctggtatcatggcagccgccacgtgccaggattaccggctacatcatcaagtatgagaagcctgggtctcctcccagagaagtggtccctcggccccgccctggtgtcacagaggctactattactggcctggaaccgggaaccgaatatacaatttatgtcattgccctgaagaataatcagaagagcgagcccctgattggaaggaaaaagacagacgagcttccccaactggtaacccttccacaccccaatcttcatggaccagagatcttggatgttccttccacagttcaaaagacccctttcgtcacccaccctgggtatgacactggaaatggtattcagcttcctggcacttctggtcagcaacccagtgttgggcaacaaatgatctttgaggaacatggttttaggcggaccacaccgcccacaacggccacccccataaggcataggccaagaccatacccgccgaatgtaggtgaggaaatccaaattggtcacatccccagggaagatgtagactatcacctgtacccacacggtccgggactcaatccaaatgcctctacaggacaagaagctctctctcagacaaccatctcatgggccccattccaggacacttctgagtacatcatttcatgtcatcctgttggcactgatgaagaacccttacagttcagggttcctggaacttctaccagtgccactctgacaggcctcaccagaggtgccacctacaacgtcatagtggaggcactgaaagaccagcagaggcataaggttcgggaagaggttgttaccgtgggcaactctgtcaacgaaggcttgaaccaacctacggatgactcgtgctttgacccctacacagtttcccattatgccgttggagatgagtgggaacgaatgtctgaatcaggctttaaactgttgtgccagtgcttaggctttggaagtggtcatttcagatgtgattcatctagatggtgccatgacaatggtgtgaactacaagattggagagaagtgggaccgtcagggagaaaatggccagatgatgagctgcacatgtcttgggaacggaaaaggagaattcaagtgtgaccctcatgaggcaacgtgttatgatgatgggaagacataccacgtaggagaacagtggcagaaggaatatctcggtgccatttgctcctgcacatgctttggaggccagcggggctggcgctgtgacaactgccgcagacctgggggtgaacccagtcccgaaggcactactggccagtcctacaaccagtattctcagagataccatcagagaacaaacactaatgttaattgcccaattgagtgcttcatgcctttagatgtacaggctgacagagaagattcccgagagtaaatcatctttccaatccagaggaacaagcatgtctctctgccaagatccatctaaactggagtgatgttagcagacccagcttagagttcttctttctttcttaagccctttgctctggaggaagttctccagcttcagctcaactcacagcttctccaagcatcaccctgggagtttcctgagggttttctcataaatgagggctgcacattgcctgttctgcttcgaagtattcaataccgctcagtattttaaatgaagtgattctaagatttggtttgggatcaataggaaagcatatgcagccaaccaagatgcaaatgttttgaaatgatatgaccaaaattttaagtaggaaagtcacccaaacacttctgctttcacttaagtgtctggcccgcaatactg

SEQ ID NO: 1719 - DNA, 705 bp, Homo sapiens
  source 1..705: mol_type = genomic DNA
ggtgagtagtggcgcgcggcggctcggagtacctctgccgccgcgcgcatcggctcagcatgcccgtctctgtctcctcagggcgcaccttccccaagcgcggccagacctgcgtggtgcactacaccgggatgcttgaagatggaaagaaatttgattcctcccgggacagaaacaagccctttaagtttatgctaggcaagcaggaggtgatccgaggctgggaagaaggggttgcccagatgagtgtgggtcagagagccaaactgactatatctccagattatgcctatggtgccactgggcacccaggcatcatcccaccacatgccactctcgtcttcgatgtggagcttctaaaactggaatgacaggaatggcctcctcccttagctccctgttcttgggtaaggaaatggaatactgaagggcccttcactgcctttgctcctcccatgttatgcccagcgtttgatgggtagcagagagaacaaaaaacaccacaaggctatttttccccctgcattctttctgtattgagtatcctttcagtgttattagtgtatgctttgaatgtaaaaattggtcaccctaaggaaaggaattggcatgtgtatgttcccagttcaactcatggagatggcagctgtttaaatgtttttctatgtagtttataaattaaaactgaattgaggactatggaaa

SEQ ID NO: 1720 - DNA, 747 bp, Homo sapiens
  source 1..747: mol_type = genomic DNA
ccgcccgcccgctcagcgtccgccgccgccatgggagtgcaggtggaaaccatctccccaggagacgggcgcaccttccccaagcgcggccagacctgcgtggtgcactacaccgggatgcttgaagatggaaagaaatttgattcctcccgggacagaaacaagccctttaagtttatgctaggcaagcaggaggtgatccgaggctgggaagaaggggttgcccagatgagtgtgggtcagagagccaaactgactatatctccagattatgcctatggtgccactgggcacccaggcatcatcccaccacatgccactctcgtcttcgatgtggagcttctaaaactggaatgacaggaatggcctcctcccttagctccctgttcttgggtaaggaaatggaatactgaagggcccttcactgcctttgctcctcccatgttatgcccagcgtttgatgggtagcagagagaacaaaaaacaccacaaggctatttttccccctgcattctttctgtattgagtatcctttcagtgttattagtgtatgctttgaatgtaaaaattggtcaccctaaggaaaggaattggcatgtgtatgttcccagttcaactcatggagatggcagctgtttaaatgtttttctatgtagtttataaattaaaactgaattgaggactatggaaatgtaggccaaatttgtagtgccaacattttagttctttggaaataagactcttaat

SEQ ID NO: 1721 - DNA, 976 bp, Homo sapiens
  source 1..976: mol_type = genomic DNA
gcccgtcgcgccgcccgcccgctcagcgtccgccgccgccatgggagtgcaggtggaaaccatctccccaggagacggtgagtagtggcgcgcggcggctcggagtacctctgccgccgcgcgcatcggctcagcatgcccgtctctgtctcctcagggcgcaccttccccaagcgcggccagacctgcgtggtgcactacaccgggatgcttgaagatggaaagaaatttgattcctcccgggacagaaacaagccctttaagtttatgctaggcaagcaggaggtgatccgaggctgggaagaaggggttgcccagatgagtgtgggtcagagagccaaactgactatatctccagattatgcctatggtgccactgggcacccaggcatcatcccaccacatgccactctcgtcttcgatgtggagcttctaaaactggaatgacaggaatggcctcctcccttagctccctgttcttggatctgccatggagggatctggtgcctccagacatgtgcacatgaatccatatggagcttttcctgatgttccactccactttgtatagacatctgccctgactgaatgtgttctgtcactcagctttgcttccgacacctctgtttcctcttcccctttctcctcgtatgtgtgtttacctaaactatatgccataaacctcaagttattcattttattttgttttcattttggggtgaagattcagtttcagtcttttggatataggtttccaattaagtacatggtcaagtattaacagcacaagtggtaggttaacattagaataggaattggtgttggggggggggtttgcaagaatattttattttaattttttggatgaaatttttatctattatatattaaacattcttgctgctgcgctgcaaagccatagcagatttgaggcgctgttgaggactgaattactctccaagttgagagatgtctt

SEQ ID NO: 1722 - DNA, 1622 bp, Homo sapiens
  source 1..1622: mol_type = genomic DNA
gtcgcgcgccgtgtggggcgcgcacgcagggctgggcgtgagggggcgtgcgcgtgcgcaggcgacgcgccgaggtactaggcagagccgtggaaccgccgccaggtcgctgttggtccacgccgcccgtcgcgccgcccgcccgctcagcgtccgccgccgccatgggagtgcaggtggaaaccatctccccaggagacgggcgcaccttccccaagcgcggccagacctgcgtggtgcactacaccgggatgcttgaagatggaaagaaatttgattcctcccgggacagaaacaagccctttaagtttatgctaggcaagcaggaggtgatccgaggctgggaagaaggggttgcccagatgagtgtgggtcagagagccaaactgactatatctccagattatgcctatggtgccactgggcacccaggcatcatcccaccacatgccactctcgtcttcgatgtggagcttctaaaactggaatgacaggaatggcctcctcccttagctccctgttcttggatctgccatggagggatctggtgcctccagacatgtgcacatgaatccatatggagcttttcctgatgttccactccactttgtatagacatctgccctgactgaatgtgttctgtcactcagctttgcttccgacacctctgtttcctcttcccctttctcctcgtatgtgtgtttacctaaactatatgccataaacctcaagttattcattttattttgttttcattttggggtgaagattcagtttcagtcttttggatataggtttccaattaagtacatggtcaagtattaacagcacaagtggtaggttaacattagaataggaattggtgttggggggggggtttgcaagaatattttattttaattttttggatgaaatttttatctattatatattaaacattcttgctgctgcgctgcaaagccatagcagatttgaggcgctgttgaggactgaattactctccaagttgagagatgtctttgggttaaattaaaagccctacctaaaactgaggtggggatggggagagcctttgcctccaccattcccacccaccctccccttaaaccctctgcctttgaaagtagatcatgttcactgcaatgctggacactacaggtatctgtccctgggccagcagggacctctgaagccttctttgtggccttttttttttttcatcctgtggtttttctaatggactttcaggaattttgtaatctcataactttccaagctccaccacttcctaaatcttaagaactttaattgacagtttcaattgaaggtgctgtttgtagacttaacacccagtgaaagcccagccatcatgacaaatccttgaatgttctcttaagaaaatgatgctggtcatcgcagcttcagcatctcctgttttttgatgcttggctccctctgctgatctcagtttcctggcttttcctccctcagccccttctcacccctttgctgtcctgtgtagtgatttggtgagaaatcgttgctgcacccttcccccagcaccatttatgagtctcaagttttattattgcaataaaagtgctttatgccggcttttctca

SEQ ID NO: 1723 - DNA, 279 bp, Homo sapiens
  source 1..279: mol_type = genomic DNA
atgggagtgcaggtggaaaccatctccccaggagacgggatgcttgaagatggaaagaaatttgattcctcccgggacagaaacaagccctttaagtttatgctaggcaagcaggaggtgatccgaggctgggaagaaggggttgcccagatgagtgtgggtcagagagccaaactgactatatctccagattatgcctatggtgccactgggcacccaggcatcatcccaccacatgccactctcgtcttcgatgtggagcttctaaaactggaatga

SEQ ID NO: 1724 - DNA, 2296 bp, Homo sapiens
  source 1..2296: mol_type = genomic DNA
aaaggaagtgcctccggcgcaagtggcattgagggacttgtagtcctgcgatttcgggtgtagagggagcaggggcctgcggggacctggtgtgggtggagtggggacaagcggtggagaagggtacgccagggtcgctgagagactctgttctccctggagggactggttgccatgagagcagccgtctgaggggacgcagcctgcactacgcgccccaagaggctgtgcgtggcgagcaggtcacgtgacgggagcgcgggctttggaaggcggctgaacgtcaggccacccgccgctaagctgagaagggagagcgagcttaggaccgcctgcccggggcaaccccgaaccaagctttagccgccgaggccgcgtgtcccaaaggccagtcatccctcctctgtgttgccatgggaattcaaggcctggccaaactaattgctgatgtggcccccagtgccatccgggagaatgacatcaagagctactttggccgtaaggtggccattgatgcctctatgagcatttatcagttcctgattgctgttcgccagggtggggatgtgctgcagaatgaggagggtgagaccaccagccacctgatgggcatgttctaccgcaccattcgcatgatggagaacggcatcaagcccgtgtatgtctttgatggcaagccgccacagctcaagtcaggcgagctggccaaacgcagtgagcggcgggctgaggcagagaagcagctgcagcaggctcaggctgctggggccgagcaggaggtggaaaaattcactaagcggctggtgaaggtcactaagcagcacaatgatgagtgcaaacatctgctgagcctcatgggcatcccttatcttgatgcacccagtgaggcagaggccagctgtgctgccctggtgaaggctggcaaagtctatgctgcggctaccgaggacatggactgcctcaccttcggcagccctgtgctaatgcgacacctgactgccagtgaagccaaaaagctgccaatccaggaattccacctgagccggattctgcaggagctgggcctgaaccaggaacagtttgtggatctgtgcatcctgctaggcagtgactactgtgagagtatccggggtattgggcccaagcgggctgtggacctcatccagaagcacaagagcatcgaggagatcgtgcggcgacttgaccccaacaagtaccctgtgccagaaaattggctccacaaggaggctcaccagctcttcttggaacctgaggtgctggacccagagtctgtggagctgaagtggagcgagccaaatgaagaagagctgatcaagttcatgtgtggtgaaaagcagttctctgaggagcgaatccgcagtggggtcaagaggctgagtaagagccgccaaggcagcacccagggccgcctggatgatttcttcaaggtgaccggctcactctcttcagctaagcgcaaggagccagaacccaagggatccactaagaagaaggcaaagactggggcagcagggaagtttaaaaggggaaaataaatgtgtttccccattatacctccttcaccccagaatatttgccgtcttgtacccttaagagctacagctagagaaaccttcacggggtggagagaggattctaaggcttttctagcgtgacccttttcagtagtgctagtcccttttttacttgatcttaatggcaagaaggccacagaggtacttttccttttttagctcaggaaaatatgtcaggctcaaaccacttctcaggcagtttaatggacactaagtccattgttacatgaaagtgatagatagcaacaagttttggagaagagagagggagataaaagggggagacaaaagatgtacagaaatgatttcctggctggccaactggtggccagtgggaggtgatggtggacctagactgtgcttttctgtcttgttcagccttgacccaccttgagagagagccaccaggaaggcgcatcttagcagatgggaggaactgctgagagaagatgggcagaaagctggagcccctggagttggctgtgtctgtgtttgtgactgattactggctgtgtcttgggtgggcagaaactcgaacttgctatgtaatttgtgtctagttattcagaggagtaagatggtgatgttcacctggcaatcagctgagttgagactttggaataagacactggttttcatgcgctgtttttgttttaaagttatgaagaaaaaagtcaataaaattctaaaagtaaccaaaa

SEQ ID NO: 1725 - DNA, 776 bp, Homo sapiens
  source 1..776: mol_type = genomic DNA
gagcgagcttaggaccgcctgcccggggcaaccccgaaccaagctttagccgccgaggccgcgtgtcccaaaggccaggtgagaccccatgggaagcgcctccgggagcgacggggtccgcttggcgctgggggccgtggggagccggggtctggagtgcgcgggattcgcagtcaagaggtcccgccacttttccccctgtgagccttgggccagtcgcgtaagctccgagcctctctttcctccattgtagaaaagcgtcatccctcctctgtgttgccatgggaattcaaggcctggccaaactaattgctgatgtggcccccagtgccatccgggagaatgacatcaagagctactttggccgtaaggtggccattgatgcctctatgagcatttatcagttcctgattgctgttcgccagggtggggatgtgctgcagaatgaggagggtgagaccaccagccacctgatgggcatgttctaccgcaccattcgcatgatggagaacggcatcaagcccgtgtatgtctttgatggcaagccgccacagctcaagtcaggcgagctggccaaacgcagtgagcggcgggctgaggcagagaagcagctgcagcaggctcaggctgctggggccgagcaggaggtggaaaaattcactaagcggctggtgaaggtcactaagcagcacaatgatgagtgcaaacatctgctgagcctcatgggcatcccttatcttgatgcacccagtgaggcagaggccagctgtgctgcc

SEQ ID NO: 1726 - DNA, 7084 bp, Homo sapiens
  source 1..7084: mol_type = genomic DNA
gcggacactcctctcggctcctccccggcagcggcggcggctcggagcgggctccggggctcgggtgcagcggccagcgggcgcctggcggcgaggattacccggggaagtggttgtctcctggctggagccgcgagacgggcgctcagggcgcggggccggcggcggcgaacgagaggacggactctggcggccgggtcgttggccgcggggagcgcgggcaccgggcgagcaggccgcgtcgcgctcaccatggtcagctactgggacaccggggtcctgctgtgcgcgctgctcagctgtctgcttctcacaggatctagttcaggttcaaaattaaaagatcctgaactgagtttaaaaggcacccagcacatcatgcaagcaggccagacactgcatctccaatgcaggggggaagcagcccataaatggtctttgcctgaaatggtgagtaaggaaagcgaaaggctgagcataactaaatctgcctgtggaagaaatggcaaacaattctgcagtactttaaccttgaacacagctcaagcaaaccacactggcttctacagctgcaaatatctagctgtacctacttcaaagaagaaggaaacagaatctgcaatctatatatttattagtgatacaggtagacctttcgtagagatgtacagtgaaatccccgaaattatacacatgactgaaggaagggagctcgtcattccctgccgggttacgtcacctaacatcactgttactttaaaaaagtttccacttgacactttgatccctgatggaaaacgcataatctgggacagtagaaagggcttcatcatatcaaatgcaacgtacaaagaaatagggcttctgacctgtgaagcaacagtcaatgggcatttgtataagacaaactatctcacacatcgacaaaccaatacaatcatagatgtccaaataagcacaccacgcccagtcaaattacttagaggccatactcttgtcctcaattgtactgctaccactcccttgaacacgagagttcaaatgacctggagttaccctgatgaaaaaaataagagagcttccgtaaggcgacgaattgaccaaagcaattcccatgccaacatattctacagtgttcttactattgacaaaatgcagaacaaagacaaaggactttatacttgtcgtgtaaggagtggaccatcattcaaatctgttaacacctcagtgcatatatatgataaagcattcatcactgtgaaacatcgaaaacagcaggtgcttgaaaccgtagctggcaagcggtcttaccggctctctatgaaagtgaaggcatttccctcgccggaagttgtatggttaaaagatgggttacctgcgactgagaaatctgctcgctatttgactcgtggctactcgttaattatcaaggacgtaactgaagaggatgcagggaattatacaatcttgctgagcataaaacagtcaaatgtgtttaaaaacctcactgccactctaattgtcaatgtgaaaccccagatttacgaaaaggccgtgtcatcgtttccagacccggctctctacccactgggcagcagacaaatcctgacttgtaccgcatatggtatccctcaacctacaatcaagtggttctggcacccctgtaaccataatcattccgaagcaaggtgtgacttttgttccaataatgaagagtcctttatcctggatgctgacagcaacatgggaaacagaattgagagcatcactcagcgcatggcaataatagaaggaaagaataagatggctagcaccttggttgtggctgactctagaatttctggaatctacatttgcatagcttccaataaagttgggactgtgggaagaaacataagcttttatatcacagatgtgccaaatgggtttcatgttaacttggaaaaaatgccgacggaaggagaggacctgaaactgtcttgcacagttaacaagttcttatacagagacgttacttggattttactgcggacagttaataacagaacaatgcactacagtattagcaagcaaaaaatggccatcactaaggagcactccatcactcttaatcttaccatcatgaatgtttccctgcaagattcaggcacctatgcctgcagagccaggaatgtatacacaggggaagaaatcctccagaagaaagaaattacaatcagagatcaggaagcaccatacctcctgcgaaacctcagtgatcacacagtggccatcagcagttccaccactttagactgtcatgctaatggtgtccccgagcctcagatcacttggtttaaaaacaaccacaaaatacaacaagagcctggaattattttaggaccaggaagcagcacgctgtttattgaaagagtcacagaagaggatgaaggtgtctatcactgcaaagccaccaaccagaagggctctgtggaaagttcagcatacctcactgttcaaggaacctcggacaagtctaatctggagctgatcactctaacatgcacctgtgtggctgcgactctcttctggctcctattaaccctctttatccgaaaaatgaaaaggtcttcttctgaaataaagactgactacctatcaattataatggacccagatgaagttcctttggatgagcagtgtgagcggctcccttatgatgccagcaagtgggagtttgcccgggagagacttaaactgggcaaatcacttggaagaggggcttttggaaaagtggttcaagcatcagcatttggcattaagaaatcacctacgtgccggactgtggctgtgaaaatgctgaaagagggggccacggccagcgagtacaaagctctgatgactgagctaaaaatcttgacccacattggccaccatctgaacgtggttaacctgctgggagcctgcaccaagcaaggagggcctctgatggtgattgttgaatactgcaaatatggaaatctctccaactacctcaagagcaaacgtgacttattttttctcaacaaggatgcagcactacacatggagcctaagaaagaaaaaatggagccaggcctggaacaaggcaagaaaccaagactagatagcgtcaccagcagcgaaagctttgcgagctccggctttcaggaagataaaagtctgagtgatgttgaggaagaggaggattctgacggtttctacaaggagcccatcactatggaagatctgatttcttacagttttcaagtggccagaggcatggagttcctgtcttccagaaagtgcattcatcgggacctggcagcgagaaacattcttttatctgagaacaacgtggtgaagatttgtgattttggccttgcccgggatatttataagaaccccgattatgtgagaaaaggagatactcgacttcctctgaaatggatggctcctgaatctatctttgacaaaatctacagcaccaagagcgacgtgtggtcttacggagtattgctgtgggaaatcttctccttaggtgggtctccatacccaggagtacaaatggatgaggacttttgcagtcgcctgagggaaggcatgaggatgagagctcctgagtactctactcctgaaatctatcagatcatgctggactgctggcacagagacccaaaagaaaggccaagatttgcagaacttgtggaaaaactaggtgatttgcttcaagcaaatgtacaacaggatggtaaagactacatcccaatcaatgccatactgacaggaaatagtgggtttacatactcaactcctgccttctctgaggacttcttcaaggaaagtatttcagctccgaagtttaattcaggaagctctgatgatgtcagatacgtaaatgctttcaagttcatgagcctggaaagaatcaaaacctttgaagaacttttaccgaatgccacctccatgtttgatgactaccagggcgacagcagcactctgttggcctctcccatgctgaagcgcttcacctggactgacagcaaacccaaggcctcgctcaagattgacttgagagtaaccagtaaaagtaaggagtcggggctgtctgatgtcagcaggcccagtttctgccattccagctgtgggcacgtcagcgaaggcaagcgcaggttcacctacgaccacgctgagctggaaaggaaaatcgcgtgctgctccccgcccccagactacaactcggtggtcctgtactccaccccacccatctagagtttgacacgaagccttatttctagaagcacatgtgtatttatacccccaggaaactagcttttgccagtattatgcatatataagtttacacctttatctttccatgggagccagctgctttttgtgatttttttaatagtgcttttttttttttgactaacaagaatgtaactccagatagagaaatagtgacaagtgaagaacactactgctaaatcctcatgttactcagtgttagagaaatccttcctaaacccaatgacttccctgctccaacccccgccacctcagggcacgcaggaccagtttgattgaggagctgcactgatcacccaatgcatcacgtaccccactgggccagccctgcagcccaaaacccagggcaacaagcccgttagccccagggatcactggctggcctgagcaacatctcgggagtcctctagcaggcctaagacatgtgaggaggaaaaggaaaaaaagcaaaaagcaagggagaaaagagaaaccgggagaaggcatgagaaagaatttgagacgcaccatgtgggcacggagggggacggggctcagcaatgccatttcagtggcttcccagctctgacccttctacatttgagggcccagccaggagcagatggacagcgatgaggggacattttctggattctgggaggcaagaaaaggacaaatatcttttttggaactaaagcaaattttagaactttacctatggaagtggttctatgtccattctcattcgtggcatgttttgatttgtagcactgagggtggcactcaactctgagcccatacttttggctcctctagtaagatgcactgaaaacttagccagagttaggttgtctccaggccatgatggccttacactgaaaatgtcacattctattttgggtattaatatatagtccagacacttaactcaatttcttggtattattctgttttgcacagttagttgtgaaagaaagctgagaagaatgaaaatgcagtcctgaggagaggagttttctccatatcaaaacgagggctgatggaggaaaaaggtcaataaggtcaagggaaaaccccgtctctataccaaccaaaccaattcaccaacacagttgggacccaaaacacaggaagtcagtcacgtttccttttcatttaatggggattccactatctcacactaatctgaaaggatgtggaagagcattagctggcgcatattaagcactttaagctccttgagtaaaaaggtggtatgtaatttatgcaaggtatttctccagttgggactcaggatattagttaatgagccatcactagaagaaaagcccattttcaactgctttgaaacttgcctggggtctgagcatgatgggaatagggagacagggtaggaaagggcgcctactcttcagggtctaaagatcaagtgggccttggatcgctaagctggctctgtttgatgctatttatgcaagttagggtctatgtatttatgatgtctgcaccttctgcagccagtcagaagctggagaggcaacagtggattgctgcttcttggggagaagagtatgcttccttttatccatgtaatttaactgtagaacctgagctctaagtaaccgaagaatgtatgcctctgttcttatgtgccacatccttgtttaaaggctctctgtatgaagagatgggaccgtcatcagcacattccctagtgagcctactggctcctggcagcggcttttgtggaagactcactagccagaagagaggagtgggacagtcctctccaccaagatctaaatccaaacaaaagcaggctagagccagaagagaggacaaatctttgttcttcctcttctttacatacgcaaaccacctgtgacagctggcaattttataaatcaggtaactggaaggaggttaaacacagaaaaaagaagacctcagtcaattctctacttttttttttttttccaaatcagataatagcccagcaaatagtgataacaaataaaaccttagctattcatgtcttgatttcaataattaattcttaatcattaagagaccataataaatactccttttcaagagaaaagcaaaaccattagaattgttactcagctccttcaaactcaggtttgtagcatacatgagtccatccatcagtcaaagaatggttccatctggagtcttaatgtagaaagaaaaatggagacttgtaataatgagctagttacaaagtgcttgttcattaaaatagcactgaaaattgaaacatgaattaactgataatattccaatcatttgccatttatgacaaaaatggttggcactaacaaagaacgagcacttcctttcagagtttctgagataatgtacgtggaacagtctgggtggaatggggctgaaaccatgtgcaagtctgtgtcttgtcagtccaagaagtgacaccgagatgttaattttagggacccgtgccttgtttcctagcccacaagaatgcaaacatcaaacagatactcgctagcctcatttaaattgattaaaggaggagtgcatctttggccgacagtggtgtaactgtatgtgtgtgtgtgtgtgtgtgtgtgtgtgtgtgtgtgggtgtatgtgtgttttgtgcataactatttaaggaaactggaattttaaagttacttttatacaaaccaagaatatatgctacagatataagacagacatggtttggtcctatatttctagtcatgatgaatgtattttgtataccatcttcatataataaacttccaaa

SEQ ID NO: 1727 - DNA, 2668 bp, Homo sapiens
  source 1..2668: mol_type = genomic DNA
atcgaggtccgcgggaggctcggagcgcgccaggcggacactcctctcggctcctccccggcagcggcggcggctcggagcgggctccggggctcgggtgcagcggccagcgggcgcctggcggcgaggattacccggggaagtggttgtctcctggctggagccgcgagacgggcgctcagggcgcggggccggcggcggcgaacgagaggacggactctggcggccgggtcgttggccgcggggagcgcgggcaccgggcgagcaggccgcgtcgcgctcaccatggtcagctactgggacaccggggtcctgctgtgcgcgctgctcagctgtctgcttctcacaggatctagttcaggttcaaaattaaaagatcctgaactgagtttaaaaggcacccagcacatcatgcaagcaggccagacactgcatctccaatgcaggggggaagcagcccataaatggtctttgcctgaaatggtgagtaaggaaagcgaaaggctgagcataactaaatctgcctgtggaagaaatggcaaacaattctgcagtactttaaccttgaacacagctcaagcaaaccacactggcttctacagctgcaaatatctagctgtacctacttcaaagaagaaggaaacagaatctgcaatctatatatttattagtgatacaggtagacctttcgtagagatgtacagtgaaatccccgaaattatacacatgactgaaggaagggagctcgtcattccctgccgggttacgtcacctaacatcactgttactttaaaaaagaaaaataagagagcttccgtaaggcgacgaattgaccaaagcaattcccatgccaacatattctacagtgttcttactattgacaaaatgcagaacaaagacaaaggactttatacttgtcgtgtaaggagtggaccatcattcaaatctgttaacacctcagtgcatatatatgataaagcattcatcactgtgaaacatcgaaaacagcaggtgcttgaaaccgtagctggcaagcggtcttaccggctctctatgaaagtgaaggcatttccctcgccggaagttgtatggttaaaagatgggttacctgcgactgagaaatctgctcgctatttgactcgtggctactcgttaattatcaaggacgtaactgaagaggatgcagggaattatacaatcttgctgagcataaaacagtcaaatgtgtttaaaaacctcactgccactctaattgtcaatgtgaaaccccagatttacgaaaaggccgtgtcatcgtttccagacccggctctctacccactgggcagcagacaaatcctgacttgtaccgcatatggtatccctcaacctacaatcaagtggttctggcacccctgtaaccataatcattccgaagcaaggtgtgacttttgttccaataatgaagagtcctttatcctggatgctgacagcaacatgggaaacagaattgagagcatcactcagcgcatggcaataatagaaggaaagaataagatggctagcaccttggttgtggctgactctagaatttctggaatctacatttgcatagcttccaataaagttgggactgtgggaagaaacataagcttttatatcacagatgtgccaaatgggtttcatgttaacttggaaaaaatgccgacggaaggagaggacctgaaactgtcttgcacagttaacaagttcttatacagagacgttacttggattttactgcggacagttaataacagaacaatgcactacagtattagcaagcaaaaaatggccatcactaaggagcactccatcactcttaatcttaccatcatgaatgtttccctgcaagattcaggcacctatgcctgcagagccaggaatgtatacacaggggaagaaatcctccagaagaaagaaattacaatcagagatcaggaagcaccatacctcctgcgaaacctcagtgatcacacagtggccatcagcagttccaccactttagactgtcatgctaatggtgtccccgagcctcagatcacttggtttaaaaacaaccacaaaatacaacaagagcctgaactgtatacatcaacgtcaccatcgtcatcgtcatcatcaccattgtcatcatcatcatcatcgtcatcatcatcatcatcatagctatcatcattatcatcatcatcatcatcatcatcatagctaccatttattgaaaactattatgtgtcaacttcaaagaacttatcctttagttggagagccaagacaatcataacaataacaaatggccgggcatggtggctcacgcctgtaatcccagcactttgggaggccaaggcaggtggatcatttgaggtcaggagttcaagaccagcctgaccaagatggtgaaatgctgtctctattaaaaatacaaaattagccaggcatggtggctcatgcctgtaatgccagctactcgggaggctgagacaggagaatcacttgaacccaggaggcagaggttgcagggagccgagatcgtgtactgcactccagcctgggcaacaagagcgaaactccgtctcaaaaaacaaataaataaataaataaataaacagacaaaattcactttttattctattaaacttaacatacatgc

SEQ ID NO: 1728 - DNA, 1911 bp, Homo sapiens
  source 1..1911: mol_type = genomic DNA
atcgaggtccgcgggaggctcggagcgcgccaggcggacactcctctcggctcctccccggcagcggcggcggctcggagcgggctccggggctcgggtgcagcggccagcgggcgcctggcggcgaggattacccggggaagtggttgtctcctggctggagccgcgagacgggcgctcagggcgcggggccggcggcggcgaacgagaggacggactctggcggccgggtcgttggccgcggggagcgcgggcaccgggcgagcaggccgcgtcgcgctcaccatggtcagctactgggacaccggggtcctgctgtgcgcgctgctcagctgtctgcttctcacaggatctagttcaggttcaaaattaaaagatcctgaactgagtttaaaaggcacccagcacatcatgcaagcaggccagacactgcatctccaatgcaggggggaagcagcccataaatggtctttgcctgaaatggtgagtaaggaaagcgaaaggctgagcataactaaatctgcctgtggaagaaatggcaaacaattctgcagtactttaaccttgaacacagctcaagcaaaccacactggcttctacagctgcaaatatctagctgtacctacttcaaagaagaaggaaacagaatctgcaatctatatatttattagtgatacaggtagacctttcgtagagatgtacagtgaaatccccgaaattatacacatgactgaaggaagggagctcgtcattccctgccgggttacgtcacctaacatcactgttactttaaaaaagtttccacttgacactttgatccctgatggaaaacgcataatctgggacagtagaaagggcttcatcatatcaaatgcaacgtacaaagaaatagggcttctgacctgtgaagcaacagtcaatgggcatttgtataagacaaactatctcacacatcgacaaaccaatacaatcatagatgtccaaataagcacaccacgcccagtcaaattacttagaggccatactcttgtcctcaattgtactgctaccactcccttgaacacgagagttcaaatgacctggagttaccctgatgaaaaaaataagagagcttccgtaaggcgacgaattgaccaaagcaattcccatgccaacatattctacagtgttcttactattgacaaaatgcagaacaaagacaaaggactttatacttgtcgtgtaaggagtggaccatcattcaaatctgttaacacctcagtgcatatatatgataaagcattcatcactgtgaaacatcgaaaacagcaggtgcttgaaaccgtagctggcaagcggtcttaccggctctctatgaaagtgaaggcatttccctcgccggaagttgtatggttaaaagatgggttacctgcgactgagaaatctgctcgctatttgactcgtggctactcgttaattatcaaggacgtaactgaagaggatgcagggaattatacaatcttgctgagcataaaacagtcaaatgtgtttaaaaacctcactgccactctaattgtcaatgtgaaaccccagatttacgaaaaggccgtgtcatcgtttccagacccggctctctacccactgggcagcagacaaatcctgacttgtaccgcatatggtatccctcaacctacaatcaagtggttctggcacccctgtaaccataatcattccgaagcaaggtgtgacttttgttccaataatgaagagtcctttatcctggatgctgacagcaacatgggaaacagaattgagagcatcactcagcgcatggcaataatagaaggaaagaataagcttccaccagctaacagttctttcatgttgccacctacaagcttctcttccaactacttccatttccttccgtga

SEQ ID NO: 1729 - DNA, 1927 bp, Homo sapiens
  source 1..1927: mol_type = genomic DNA
actttaagtcttttccttttggtcttggaggaacagtgctcagcttttgatctctgtgattctgatagagaagctgtttctggaattacaaagtttgcaaacttgacagcaaaatttctggaaagccttttctatgaacctcggacaagtctaatctggagctgatcactctaacatgcacctgtgtggctgcgactctcttctggctcctattaaccctctttatccgaaaaatgaaaaggtcttcttctgaaataaagactgactacctatcaattataatggacccagatgaagttcctttggatgagcagtgtgagcggctcccttatgatgccagcaagtgggagtttgcccgggagagacttaaactgggcaaatcacttggaagaggggcttttggaaaagtggttcaagcatcagcatttggcattaagaaatcacctacgtgccggactgtggctgtgaaaatgctgaaagagggggccacggccagcgagtacaaagctctgatgactgagctaaaaatcttgacccacattggccaccatctgaacgtggttaacctgctgggagcctgcaccaagcaaggagggcctctgatggtgattgttgaatactgcaaatatggaaatctctccaactacctcaagagcaaacgtgacttattttttctcaacaaggatgcagcactacacatggagcctaagaaagaaaaaatggagccaggcctggaacaaggcaagaaaccaagactagatagcgtcaccagcagcgaaagctttgcgagctccggctttcaggaagataaaagtctgagtgatgttgaggaagaggaggattctgacggtttctacaaggagcccatcactatggaagatctgatttcttacagttttcaagtggccagaggcatggagttcctgtcttccagaaagtgcattcatcgggacctggcagcgagaaacattcttttatctgagaacaacgtggtgaagatttgtgattttggccttgcccgggatatttataagaaccccgattatgtgagaaaaggagatactcgacttcctctgaaatggatggctcctgaatctatctttgacaaaatctacagcaccaagagcgacgtgtggtcttacggagtattgctgtgggaaatcttctccttaggtgggtctccatacccaggagtacaaatggatgaggacttttgcagtcgcctgagggaaggcatgaggatgagagctcctgagtactctactcctgaaatctatcagatcatgctggactgctggcacagagacccaaaagaaaggccaagatttgcagaacttgtggaaaaactaggtgatttgcttcaagcaaatgtacaacaggatggtaaagactacatcccaatcaatgccatactgacaggaaatagtgggtttacatactcaactcctgccttctctgaggacttcttcaaggaaagtatttcagctccgaagtttaattcaggaagctctgatgatgtcagatacgtaaatgctttcaagttcatgagcctggaaagaatcaaaacctttgaagaacttttaccgaatgccacctccatgtttgatgactaccagggcgacagcagcactctgttggcctctcccatgctgaagcgcttcacctggactgacagcaaacccaaggcctcgctcaagattgacttgagagtaaccagtaaaagtaaggagtcggggctgtctgatgtcagcaggcccagtttctgccattccagctgtgggcacgtcagcgaaggcaagcgcaggttcacctacgaccacgctgagctggaaaggaaaatcgcgtgctgctccccgcccccagactacaactcggtggtcctgtactccaccccacccatctagagtttgacacgaagccttatttc

SEQ ID NO: 1730 - DNA, 338 bp, Homo sapiens
  source 1..338: mol_type = genomic DNA
gagagcatcactcagcgcatggcaataatagaaggaaagaataagatggctagcaccttggttgtggctgactctagaatttctggaatctacatttgcatagcttccaataaagttgggactgtgggaagaaacataagcttttatatcacagaattgtcaaactttgagtgccttcatccttgctctcaggaatagaattctacctcatcggatctcatgtgccaaatgggtttcatgttaacttggaaaaaatgccgacggaaggagaggacctgaaactgtcttgcacagttaacaagttcttatacagagacgttacttggattttactgcgg

SEQ ID NO: 1731 - DNA, 2968 bp, Homo sapiens
  source 1..2968: mol_type = genomic DNA
atcgaggtccgcgggaggctcggagcgcgccaggcggacactcctctcggctcctccccggcagcggcggcggctcggagcgggctccggggctcgggtgcagcggccagcgggcgcctggcggcgaggattacccggggaagtggttgtctcctggctggagccgcgagacgggcgctcagggcgcggggccggcggcggcgaacgagaggacggactctggcggccgggtcgttggccgcggggagcgcgggcaccgggcgagcaggccgcgtcgcgctcaccatggtcagctactgggacaccggggtcctgctgtgcgcgctgctcagctgtctgcttctcacaggatctagttcaggttcaaaattaaaagatcctgaactgagtttaaaaggcacccagcacatcatgcaagcaggccagacactgcatctccaatgcaggggggaagcagcccataaatggtctttgcctgaaatggtgagtaaggaaagcgaaaggctgagcataactaaatctgcctgtggaagaaatggcaaacaattctgcagtactttaaccttgaacacagctcaagcaaaccacactggcttctacagctgcaaatatctagctgtacctacttcaaagaagaaggaaacagaatctgcaatctatatatttattagtgatacaggtagacctttcgtagagatgtacagtgaaatccccgaaattatacacatgactgaaggaagggagctcgtcattccctgccgggttacgtcacctaacatcactgttactttaaaaaagtttccacttgacactttgatccctgatggaaaacgcataatctgggacagtagaaagggcttcatcatatcaaatgcaacgtacaaagaaatagggcttctgacctgtgaagcaacagtcaatgggcatttgtataagacaaactatctcacacatcgacaaaccaatacaatcatagatgtccaaataagcacaccacgcccagtcaaattacttagaggccatactcttgtcctcaattgtactgctaccactcccttgaacacgagagttcaaatgacctggagttaccctgatgaaaaaaataagagagcttccgtaaggcgacgaattgaccaaagcaattcccatgccaacatattctacagtgttcttactattgacaaaatgcagaacaaagacaaaggactttatacttgtcgtgtaaggagtggaccatcattcaaatctgttaacacctcagtgcatatatatgataaagcattcatcactgtgaaacatcgaaaacagcaggtgcttgaaaccgtagctggcaagcggtcttaccggctctctatgaaagtgaaggcatttccctcgccggaagttgtatggttaaaagatgggttacctgcgactgagaaatctgctcgctatttgactcgtggctactcgttaattatcaaggacgtaactgaagaggatgcagggaattatacaatcttgctgagcataaaacagtcaaatgtgtttaaaaacctcactgccactctaattgtcaatgtgaaaccccagatttacgaaaaggccgtgtcatcgtttccagacccggctctctacccactgggcagcagacaaatcctgacttgtaccgcatatggtatccctcaacctacaatcaagtggttctggcacccctgtaaccataatcattccgaagcaaggtgtgacttttgttccaataatgaagagtcctttatcctggatgctgacagcaacatgggaaacagaattgagagcatcactcagcgcatggcaataatagaaggaaagaataagatggctagcaccttggttgtggctgactctagaatttctggaatctacatttgcatagcttccaataaagttgggactgtgggaagaaacataagcttttatatcacagatgtgccaaatgggtttcatgttaacttggaaaaaatgccgacggaaggagaggacctgaaactgtcttgcacagttaacaagttcttatacagagacgttacttggattttactgcggacagttaataacagaacaatgcactacagtattagcaagcaaaaaatggccatcactaaggagcactccatcactcttaatcttaccatcatgaatgtttccctgcaagattcaggcacctatgcctgcagagccaggaatgtatacacaggggaagaaatcctccagaagaaagaaattacaatcagagatcaggaagcaccatacctcctgcgaaacctcagtgatcacacagtggccatcagcagttccaccactttagactgtcatgctaatggtgtccccgagcctcagatcacttggtttaaaaacaaccacaaaatacaacaagagcctgaactgtatacatcaacgtcaccatcgtcatcgtcatcatcaccattgtcatcatcatcatcatcgtcatcatcatcatcatcatagctatcatcattatcatcatcatcatcatcatcatcatagctaccatttattgaaaactattatgtgtcaacttcaaagaacttatcctttagttggagagccaagacaatcataacaataacaaatggccgggcatggtggctcacgcctgtaatcccagcactttgggaggccaaggcaggtggatcatttgaggtcaggagttcaagaccagcctgaccaagatggtgaaatgctgtctctattaaaaatacaaaattagccaggcatggtggctcatgcctgtaatgccagctactcgggaggctgagacaggagaatcacttgaacccaggaggcagaggttgcagggagccgagatcgtgtactgcactccagcctgggcaacaagagcgaaactccgtctcaaaaaacaaataaataaataaataaataaacagacaaaattcactttttattctattaaacttaacatacatgc

SEQ ID NO: 1732 - DNA, 1275 bp, Homo sapiens
  source 1..1275: mol_type = genomic DNA
acagagttactaattttgacagggaactgtaccgttttctcccctcagggattttcatcttaatggatcatccccctgcccccatgcttggataaagtgggctggaggcctggaaaaatctctggtgttcatgttgaaactcaaatactcttaaaaatgaactctgatctacttgttgattctgacggtttctacaaggagcccatcactatggaagatctgatttcttacagttttcaagtggccagaggcatggagttcctgtcttccagaaagtgcattcatcgggacctggcagcgagaaacattcttttatctgagaacaacgtggtgaagatttgtgattttggccttgcccgggatatttataagaaccccgattatgtgagaaaaggagatactcgacttcctctgaaatggatggctcctgaatctatctttgacaaaatctacagcaccaagagcgacgtgtggtcttacggagtattgctgtgggaaatcttctccttaggtgggtctccatacccaggagtacaaatggatgaggacttttgcagtcgcctgagggaaggcatgaggatgagagctcctgagtactctactcctgaaatctatcagatcatgctggactgctggcacagagacccaaaagaaaggccaagatttgcagaacttgtggaaaaactaggtgatttgcttcaagcaaatgtacaacaggatggtaaagactacatcccaatcaatgccatactgacaggaaatagtgggtttacatactcaactcctgccttctctgaggacttcttcaaggaaagtatttcagctccgaagtttaattcaggaagctctgatgatgtcagatacgtaaatgctttcaagttcatgagcctggaaagaatcaaaacctttgaagaacttttaccgaatgccacctccatgtttgatgactaccagggcgacagcagcactctgttggcctctcccatgctgaagcgcttcacctggactgacagcaaacccaaggcctcgctcaagattgacttgagagtaaccagtaaaagtaaggagtcggggctgtctgatgtcagcaggcccagtttctgccattccagctgtgggcacgtcagcgaaggcaagcgcaggttcacctacgaccacgctgagctggaaaggaaaatcgcgtgctgctccccgcccccagactacaactcggtggtcctgtactccaccccacccatctagagtttgacacgaagccttatttctagaagcaca

SEQ ID NO: 1733 - DNA, 358 bp, Homo sapiens
  source 1..358: mol_type = genomic DNA
gagagcatcactcagcgcatggcaataatagaaggaaagaataagcttccaccagctaacagttctttcatgttgccacctacaagcttctcttccaactacttccatttccttccgtgactctaaacggatggctagcaccttggttgtggctgactctagaatttctggaatctacatttgcatagcttccaataaagttgggactgtgggaagaaacataagcttttatatcacagatgtgccaaatgggtttcatgttaacttggaaaaaatgccgacggaaggagaggacctgaaactgtcttgcacagttaacaagttcttatacagagacgttacttggattttactgcgg

SEQ ID NO: 1734 - DNA, 1035 bp, Homo sapiens
  source 1..1035: mol_type = genomic DNA
tctctggctgtcacccggcttggccccttccacacccaactggggcaagcctgacccggcgacaggaggcatgaggggcccccggccgaaatgacagtgctggcgccagcctggagcccaacaacctatctcctcctgctgctgctgctgagctcgggactcagtgggacccaggactgctccttccaacacagccccatctcctccgacttcgctgtcaaaatccgtgagctgtctgactacctgcttcaagattacccagtcaccgtggcctccaacctgcaggacgaggagctctgcgggggcctctggcggctggtcctggcacagcgctggatggagcggctcaagactgtcgctgggtccaagatgcaaggcttgctggagcgcgtgaacacggagatacactttgtcaccaaatgtgcctttcagcccccccccagctgtcttcgcttcgtccagaccaacatctcccgcctcctgcaggagacctccgagcagctggtggcgctgaagccctggatcactcgccagaacttctcccggtgcctggagctgcagtgtcagcccgactcctcaaccctgccacccccatggagtccccggcccctggaggccacagccccgacagccccgcagccccctctgctcctcctactgctgctgcccgtgggcctcctgctgctggccgctgcctggtgcctgcactggcagaggacgcggcggaggacaccccgccctggggagcaggtgccccccgtccccagtccccaggacctgctgcttgtggagcactgacctggccaaggcctcatcctggggaggatactgaggcacacagaggggagtcaccagccagaggatgcatagcctggacacagaggaagttggctagaggccggtcccttccttgggcccctctcattccctccccagaatggaggcaacgccagaatccagcaccggccccatttacccaactctgtacaaagcccttgtccccatgaaattgtatataaatcatccttttctacc

SEQ ID NO: 1735 - DNA, 627 bp, Homo sapiens
  source 1..627: mol_type = genomic DNA
tctctggctgtcacccggcttggccccttccacacccaactggggcaagcctgacccggcgacaggaggcatgaggggcccccggccgaaatgacagtgctggcgccagcctggagcccaacaacctatctcctcctgctgctgctgctgagctcgggactcagtgggacccaggactgctccttccaacacagccccatctcctccgacttcgctgtcaaaatccgtgagctgtctgactacctgcttcaagattacccagtcaccgtggcctccaacctgcaggacgaggagctctgcgggggcctctggcggctggtcctggcacagcgctggatggagcggctcaagactgtcgctgggtccaagatgcaaggcttgctggagcgcgtgaacacggagatacactttgtcaccaaatgtgcctttcagcccccccccagctgtcttcgcttcgtccagaccaacatctcccgcctcctgcaggagacctccgagcagctggtggcgctgaagccctggatcactcgccagaacttctcccggtgcctggagctgcagtgtcagcccgtagagacggtgtttcaccgtgtcagccaggatggtctcgatctcctgacctcgtga

SEQ ID NO: 1736 - DNA, 1076 bp, Homo sapiens
  source 1..1076: mol_type = genomic DNA
ggggcatgagggtccgagacttgttcttctgtcccttccaagacccggcgacaggaggcatgaggggcccccggccgaaatgacagtgctggcgccagcctggagcccaacaacctatctcctcctgctgctgctgctgagctcgggactcagtgggacccaggactgctccttccaacacagccccatctcctccgacttcgctgtcaaaatccgtgagctgtctgactacctgcttcaagattacccagtcaccgtggcctccaacctgcaggacgaggagctctgcgggggcctctggcggctggtcctggcacagcgctggatggagcggctcaagactgtcgctgggtccaagatgcaaggcttgctggagcgcgtgaacacggagatacactttgtcaccaaatgtgcctttcagcccccccccagctgtcttcgcttcgtccagaccaacatctcccgcctcctgcaggagacctccgagcagctggtggcgctgaagccctggatcactcgccagaacttctcccggtgcctggagctgcagtgtcagcccgactcctcaaccctgccacccccatggagtccccggcccctggaggccacagccccgacagccccgcagccccctctgctcctcctactgctgctgcccgtgggcctcctgctgctggccgctgcctggtgcctgcactggcagaggacgcggcggaggacaccccgccctggggagcaggtgccccccgtccccagtccccaggacctgctgcttgtggagcactgacctggccaaggcctcatcctgcggagccttaaacaacgcagtgagacagacatctatcatcccattttacaggggaggatactgaggcacacagaggggagtcaccagccagaggatgcatagcctggacacagaggaagttggctagaggccggtcccttccttgggcccctctcattccctccccagaatggaggcaacgccagaatccagcaccggccccatttacccaactctgtacaaagcccttgtccccatgaaattgtatataaatcatccttttctacca

SEQ ID NO: 1737 - DNA, 5857 bp, Homo sapiens
  source 1..5857: mol_type = genomic DNA
aggccagccggcgcccgcgcggacactttcagccccgagccgcggccgctcgggtcggacccacgcgcagcggccggagatgcagcggggcgccgcgctgtgcctgcgactgtggctctgcctgggactcctggacggcctggtgagtggctactccatgacccccccgaccttgaacatcacggaggagtcacacgtcatcgacaccggtgacagcctgtccatctcctgcaggggacagcaccccctcgagtgggcttggccaggagctcaggaggcgccagccaccggagacaaggacagcgaggacacgggggtggtgcgagactgcgagggcacagacgccaggccctactgcaaggtgttgctgctgcacgaggtacatgccaacgacacaggcagctacgtctgctactacaagtacatcaaggcacgcatcgagggcaccacggccgccagctcctacgtgttcgtgagagactttgagcagccattcatcaacaagcctgacacgctcttggtcaacaggaaggacgccatgtgggtgccctgtctggtgtccatccccggcctcaatgtcacgctgcgctcgcaaagctcggtgctgtggccagacgggcaggaggtggtgtgggatgaccggcggggcatgctcgtgtccacgccactgctgcacgatgccctgtacctgcagtgcgagaccacctggggagaccaggacttcctttccaaccccttcctggtgcacatcacaggcaacgagctctatgacatccagctgttgcccaggaagtcgctggagctgctggtaggggagaagctggtcctgaactgcaccgtgtgggctgagtttaactcaggtgtcacctttgactgggactacccagggaagcaggcagagcggggtaagtgggtgcccgagcgacgctcccagcagacccacacagaactctccagcatcctgaccatccacaacgtcagccagcacgacctgggctcgtatgtgtgcaaggccaacaacggcatccagcgatttcgggagagcaccgaggtcattgtgcatgaaaatcccttcatcagcgtcgagtggctcaaaggacccatcctggaggccacggcaggagacgagctggtgaagctgcccgtgaagctggcagcgtaccccccgcccgagttccagtggtacaaggatggaaaggcactgtccgggcgccacagtccacatgccctggtgctcaaggaggtgacagaggccagcacaggcacctacaccctcgccctgtggaactccgctgctggcctgaggcgcaacatcagcctggagctggtggtgaatgtgcccccccagatacatgagaaggaggcctcctcccccagcatctactcgcgtcacagccgccaggccctcacctgcacggcctacggggtgcccctgcctctcagcatccagtggcactggcggccctggacaccctgcaagatgtttgcccagcgtagtctccggcggcggcagcagcaagacctcatgccacagtgccgtgactggagggcggtgaccacgcaggatgccgtgaaccccatcgagagcctggacacctggaccgagtttgtggagggaaagaataagactgtgagcaagctggtgatccagaatgccaacgtgtctgccatgtacaagtgtgtggtctccaacaaggtgggccaggatgagcggctcatctacttctatgtgaccaccatccccgacggcttcaccatcgaatccaagccatccgaggagctactagagggccagccggtgctcctgagctgccaagccgacagctacaagtacgagcatctgcgctggtaccgcctcaacctgtccacgctgcacgatgcgcacgggaacccgcttctgctcgactgcaagaacgtgcatctgttcgccacccctctggccgccagcctggaggaggtggcacctggggcgcgccacgccacgctcagcctgagtatcccccgcgtcgcgcccgagcacgagggccactatgtgtgcgaagtgcaagaccggcgcagccatgacaagcactgccacaagaagtacctgtcggtgcaggccctggaagcccctcggctcacgcagaacttgaccgacctcctggtgaacgtgagcgactcgctggagatgcagtgcttggtggccggagcgcacgcgcccagcatcgtgtggtacaaagacgagaggctgctggaggaaaagtctggagtcgacttggcggactccaaccagaagctgagcatccagcgcgtgcgcgaggaggatgcgggacgctatctgtgcagcgtgtgcaacgccaagggctgcgtcaactcctccgccagcgtggccgtggaaggctccgaggataagggcagcatggagatcgtgatccttgtcggtaccggcgtcatcgctgtcttcttctgggtcctcctcctcctcatcttctgtaacatgaggaggccggcccacgcagacatcaagacgggctacctgtccatcatcatggaccccggggaggtgcctctggaggagcaatgcgaatacctgtcctacgatgccagccagtgggaattcccccgagagcggctgcacctggggagagtgctcggctacggcgccttcgggaaggtggtggaagcctccgctttcggcatccacaagggcagcagctgtgacaccgtggccgtgaaaatgctgaaagagggcgccacggccagcgagcaccgcgcgctgatgtcggagctcaagatcctcattcacatcggcaaccacctcaacgtggtcaacctcctcggggcgtgcaccaagccgcagggccccctcatggtgatcgtggagttctgcaagtacggcaacctctccaacttcctgcgcgccaagcgggacgccttcagcccctgcgcggagaagtctcccgagcagcgcggacgcttccgcgccatggtggagctcgccaggctggatcggaggcggccggggagcagcgacagggtcctcttcgcgcggttctcgaagaccgagggcggagcgaggcgggcttctccagaccaagaagctgaggacctgtggctgagcccgctgaccatggaagatcttgtctgctacagcttccaggtggccagagggatggagttcctggcttcccgaaagtgcatccacagagacctggctgctcggaacattctgctgtcggaaagcgacgtggtgaagatctgtgactttggccttgcccgggacatctacaaagaccccgactacgtccgcaagggcagtgcccggctgcccctgaagtggatggcccctgaaagcatcttcgacaaggtgtacaccacgcagagtgacgtgtggtcctttggggtgcttctctgggagatcttctctctgggggcctccccgtaccctggggtgcagatcaatgaggagttctgccagcggctgagagacggcacaaggatgagggccccggagctggccactcccgccatacgccgcatcatgctgaactgctggtccggagaccccaaggcgagacctgcattctcggagctggtggagatcctgggggacctgctccagggcaggggcctgcaagaggaagaggaggtctgcatggccccgcgcagctctcagagctcagaagagggcagcttctcgcaggtgtccaccatggccctacacatcgcccaggctgacgctgaggacagcccgccaagcctgcagcgccacagcctggccgccaggtattacaactgggtgtcctttcccgggtgcctggccagaggggctgagacccgtggttcctccaggatgaagacatttgaggaattccccatgaccccaacgacctacaaaggctctgtggacaaccagacagacagtgggatggtgctggcctcggaggagtttgagcagatagagagcaggcatagacaagaaagcggcttcagctgtaaaggacctggccagaatgtggctgtgaccagggcacaccctgactcccaagggaggcggcggcggcctgagcggggggcccgaggaggccaggtgttttacaacagcgagtatggggagctgtcggagccaagcgaggaggaccactgctccccgtctgcccgcgtgactttcttcacagacaacagctactaagcagcatcggacaagacccccagcacttgggggttcaggcccggcagggcgggcagagggctggaggcccaggctgggaactcatctggttgaactctggtggcacaggagtgtcctcttccctctctgcagacttcccagctaggaagagcaggactccaggcccaaggctcccggaattccgtcaccacgactggccagggccacgctccagctgccccggcccctccccctgagattcagatgtcatttagttcagcatccgcaggtgctggtcccggggccagcacttccatgggaatgtctctttggcgacctcctttcatcacactgggtggtggcctggtccctgttttcccacgaggaatctgtgggtctgggagtcacacagtgttggaggttaaggcatacgagagcagaggtctcccaaacgccctttcctcctcaggcacacagctactctccccacgagggctggctggcctcacccacccctgcacagttgaagggaggggctgtgtttccatctcaaagaaggcatttgcagggtcctcttctgggcctgaccaaacagccaactagcccctggggtggccaccagtatgacagtattatacgctggcaacacagaggcagcccgcacacctgcgcctgggtgttgagagccatcctgcaagtctttttcaacagaacttcacagactgttagagctgctgagaagaatttgctttccgaattcagcctggaaggcgcccagggacagctgtactgagtctagatgactctgacccccgccccaggtcaaggccagcagagcagtcagtgcctctggagaaggcccttgctctcccacctggcccagactccgaggagcctgggtctggagctgccggtctggttcttccctttagagcccggatctgccacctgcggcccctcccaagccgtgaaccagctcatgagagatgaacactgtgggatccactcaggaaggctcggggctggcacaaaggaccacccagcattgccctgtgccacccagcactcagtggacattctggggacctgccttcagccttttcctgccctgtgcctgacatcagcaccctggctggtcagaatgccgccctcccagaggagcagccgagagatcccctgaaggctggaggcattctgctcaggacccctatcccagctcacagtgcccaaccatctcaccaggagaaagagccacatccccacgttaggaccacggagactgaccaccaccctgaccccccaaacccacgcaccagacgcttgcaggacaggcgccgcgcagcgggcaggggcttgcccggccgaccctcccctccccacctcccccactgcgcgttactccaggatatgccgagtgcacgtataaggtcatcttcgtcgtccccgtggacctcccccttcctctgcacgtcgtccaacgtgggactggcgtgtcaggcttccctgggaggatctggaggttgttctctgcagagaaccagcctggctcctggcgcgcacctctgctcccttctcctcactacccacccacgcatgtaccgggaaaaaaactactatgcccttctagaccatgttctgagaaaagatcgaaaatatttaacaagagataataataaatctgatgccggtctttgtgtgtgttgcgga

SEQ ID NO: 1738 - DNA, 2932 bp, Homo sapiens
  source 1..2932: mol_type = genomic DNA
aggccagccggcgcccgcgcggacactttcagccccgagccgcggccgctcgggtcggacccacgcgcagcggccggagatgcagcggggcgccgcgctgtgcctgcgactgtggctctgcctgggactcctggacggcctggtgagtggctactccatgacccccccgaccttgaacatcacggaggagtcacacgtcatcgacaccggtgacagcctgtccatctcctgcaggggacagcaccccctcgagtgggcttggccaggagctcaggaggcgccagccaccggagacaaggacagcgaggacacgggggtggtgcgagactgcgagggcacagacgccaggccctactgcaaggtgttgctgctgcacgaggtacatgccaacgacacaggcagctacgtctgctactacaagtacatcaaggcacgcatcgagggcaccacggccgccagctcctacgtgttcgtgagagactttgagcagccattcatcaacaagcctgacacgctcttggtcaacaggaaggacgccatgtgggtgccctgtctggtgtccatccccggcctcaatgtcacgctgcgctcgcaaagctcggtgctgtggccagacgggcaggaggtggtgtgggatgaccggcggggcatgctcgtgtccacgccactgctgcacgatgccctgtacctgcagtgcgagaccacctggggagaccaggacttcctttccaaccccttcctggtgcacatcacaggcaacgagctctatgacatccagctgttgcccaggaagtcgctggagctgctggtaggggagaagctggtcctgaactgcaccgtgtgggctgagtttaactcaggtgtcacctttgactgggactacccagggaagcaggcagagcggggtaagtgggtgcccgagcgacgctcccagcagacccacacagaactctccagcatcctgaccatccacaacgtcagccagcacgacctgggctcgtatgtgtgcaaggccaacaacggcatccagcgatttcgggagagcaccgaggtcattgtgcatgaaaatcccttcatcagcgtcgagtggctcaaaggacccatcctggaggccacggcaggagacgagctggtgaagctgcccgtgaagctggcagcgtaccccccgcccgagttccagtggtacaaggatggaaaggcactgtccgggcgccacagtccacatgccctggtgctcaaggaggtgacagaggccagcacaggcacctacaccctcgccctgtggaactccgctgctggcctgaggcgcaacatcagcctggagctggtggtgaatgtgcccccccagatacatgagaaggaggcctcctcccccagcatctactcgcgtcacagccgccaggccctcacctgcacggcctacggggtgcccctgcctctcagcatccagtggcactggcggccctggacaccctgcaagatgtttgcccagcgtagtctccggcggcggcagcagcaagacctcatgccacagtgccgtgactggagggcggtgaccacgcaggatgccgtgaaccccatcgagagcctggacacctggaccgagtttgtggagggaaagaataagactgtgagcaagctggtgatccagaatgccaacgtgtctgccatgtacaagtgtgtggtctccaacaaggtgggccaggatgagcggctcatctacttctatgtgaccaccatccccgacggcttcaccatcgaatccaagccatccgaggagctactagagggccagccggtgctcctgagctgccaagccgacagctacaagtacgagcatctgcgctggtaccgcctcaacctgtccacgctgcacgatgcgcacgggaacccgcttctgctcgactgcaagaacgtgcatctgttcgccacccctctggccgccagcctggaggaggtggcacctggggcgcgccacgccacgctcagcctgagtatcccccgcgtcgcgcccgagcacgagggccactatgtgtgcgaagtgcaagaccggcgcagccatgacaagcactgccacaagaagtacctgtcggtgcaggccctggaagcccctcggctcacgcagaacttgaccgacctcctggtgaacgtgagcgactcgctggagatgcagtgcttggtggccggagcgcacgcgcccagcatcgtgtggtacaaagacgagaggctgctggaggaaaagtctggagtcgacttggcggactccaaccagaagctgagcatccagcgcgtgcgcgaggaggatgcgggacgctatctgtgcagcgtgtgcaacgccaagggctgcgtcaactcctccgccagcgtggccgtggaaggctccgaggataagggcagcatggagatcgtgatccttgtcggtaccggcgtcatcgctgtcttcttctgggtcctcctcctcctcatcttctgtaacatgaggaggccggcccacgcagacatcaagacgggctacctgtccatcatcatggaccccggggaggtgcctctggaggagcaatgcgaatacctgtcctacgatgccagccagtgggaattcccccgagagcggctgcacctggggagagtgctcggctacggcgccttcgggaaggtggtggaagcctccgctttcggcatccacaagggcagcagctgtgacaccgtggccgtgaaaatgctgaaaggtgtggggtcagcgggcggaaggggcagcctagctggtgaggagcagcagctcggggtgggccggtgggacggcaactcgggaagggagactgaggctggaagccagtctcatccgagattctacagggaggctgcgggcttcagagccgagggaccacccgaacccccttcagtggggccggcaggatgtcctgggggcccttag

SEQ ID NO: 1739 - DNA, 4292 bp, Homo sapiens
  source 1..4292: mol_type = genomic DNA
aggccagccggcgcccgcgcggacactttcagccccgagccgcggccgctcgggtcggacccacgcgcagcggccggagatgcagcggggcgccgcgctgtgcctgcgactgtggctctgcctgggactcctggacggcctggtgagtggctactccatgacccccccgaccttgaacatcacggaggagtcacacgtcatcgacaccggtgacagcctgtccatctcctgcaggggacagcaccccctcgagtgggcttggccaggagctcaggaggcgccagccaccggagacaaggacagcgaggacacgggggtggtgcgagactgcgagggcacagacgccaggccctactgcaaggtgttgctgctgcacgaggtacatgccaacgacacaggcagctacgtctgctactacaagtacatcaaggcacgcatcgagggcaccacggccgccagctcctacgtgttcgtgagagactttgagcagccattcatcaacaagcctgacacgctcttggtcaacaggaaggacgccatgtgggtgccctgtctggtgtccatccccggcctcaatgtcacgctgcgctcgcaaagctcggtgctgtggccagacgggcaggaggtggtgtgggatgaccggcggggcatgctcgtgtccacgccactgctgcacgatgccctgtacctgcagtgcgagaccacctggggagaccaggacttcctttccaaccccttcctggtgcacatcacaggcaacgagctctatgacatccagctgttgcccaggaagtcgctggagctgctggtaggggagaagctggtcctgaactgcaccgtgtgggctgagtttaactcaggtgtcacctttgactgggactacccagggaagcaggcagagcggggtaagtgggtgcccgagcgacgctcccagcagacccacacagaactctccagcatcctgaccatccacaacgtcagccagcacgacctgggctcgtatgtgtgcaaggccaacaacggcatccagcgatttcgggagagcaccgaggtcattgtgcatgaaaatcccttcatcagcgtcgagtggctcaaaggacccatcctggaggccacggcaggagacgagctggtgaagctgcccgtgaagctggcagcgtaccccccgcccgagttccagtggtacaaggatggaaaggcactgtccgggcgccacagtccacatgccctggtgctcaaggaggtgacagaggccagcacaggcacctacaccctcgccctgtggaactccgctgctggcctgaggcgcaacatcagcctggagctggtggtgaatgtgcccccccagatacatgagaaggaggcctcctcccccagcatctactcgcgtcacagccgccaggccctcacctgcacggcctacggggtgcccctgcctctcagcatccagtggcactggcggccctggacaccctgcaagatgtttgcccagcgtagtctccggcggcggcagcagcaagacctcatgccacagtgccgtgactggagggcggtgaccacgcaggatgccgtgaaccccatcgagagcctggacacctggaccgagtttgtggagggaaagaataagactgtgagcaagctggtgatccagaatgccaacgtgtctgccatgtacaagtgtgtggtctccaacaaggtgggccaggatgagcggctcatctacttctatgtgaccaccatccccgacggcttcaccatcgaatccaagccatccgaggagctactagagggccagccggtgctcctgagctgccaagccgacagctacaagtacgagcatctgcgctggtaccgcctcaacctgtccacgctgcacgatgcgcacgggaacccgcttctgctcgactgcaagaacgtgcatctgttcgccacccctctggccgccagcctggaggaggtggcacctggggcgcgccacgccacgctcagcctgagtatcccccgcgtcgcgcccgagcacgagggccactatgtgtgcgaagtgcaagaccggcgcagccatgacaagcactgccacaagaagtacctgtcggtgcaggccctggaagcccctcggctcacgcagaacttgaccgacctcctggtgaacgtgagcgactcgctggagatgcagtgcttggtggccggagcgcacgcgcccagcatcgtgtggtacaaagacgagaggctgctggaggaaaagtctggagtcgacttggcggactccaaccagaagctgagcatccagcgcgtgcgcgaggaggatgcgggacgctatctgtgcagcgtgtgcaacgccaagggctgcgtcaactcctccgccagcgtggccgtggaaggctccgaggataagggcagcatggagatcgtgatccttgtcggtaccggcgtcatcgctgtcttcttctgggtcctcctcctcctcatcttctgtaacatgaggaggccggcccacgcagacatcaagacgggctacctgtccatcatcatggaccccggggaggtgcctctggaggagcaatgcgaatacctgtcctacgatgccagccagtgggaattcccccgagagcggctgcacctggggagagtgctcggctacggcgccttcgggaaggtggtggaagcctccgctttcggcatccacaagggcagcagctgtgacaccgtggccgtgaaaatgctgaaagagggcgccacggccagcgagcaccgcgcgctgatgtcggagctcaagatcctcattcacatcggcaaccacctcaacgtggtcaacctcctcggggcgtgcaccaagccgcagggccccctcatggtgatcgtggagttctgcaagtacggcaacctctccaacttcctgcgcgccaagcgggacgccttcagcccctgcgcggagaagtctcccgagcagcgcggacgcttccgcgccatggtggagctcgccaggctggatcggaggcggccggggagcagcgacagggtcctcttcgcgcggttctcgaagaccgagggcggagcgaggcgggcttctccagaccaagaagctgaggacctgtggctgagcccgctgaccatggaagatcttgtctgctacagcttccaggtggccagagggatggagttcctggcttcccgaaagtgcatccacagagacctggctgctcggaacattctgctgtcggaaagcgacgtggtgaagatctgtgactttggccttgcccgggacatctacaaagaccccgactacgtccgcaagggcagtgcccggctgcccctgaagtggatggcccctgaaagcatcttcgacaaggtgtacaccacgcagagtgacgtgtggtcctttggggtgcttctctgggagatcttctctctgggggcctccccgtaccctggggtgcagatcaatgaggagttctgccagcggctgagagacggcacaaggatgagggccccggagctggccactcccgccatacgccgcatcatgctgaactgctggtccggagaccccaaggcgagacctgcattctcggagctggtggagatcctgggggacctgctccagggcaggggcctgcaagaggaagaggaggtctgcatggccccgcgcagctctcagagctcagaagagggcagcttctcgcaggtgtccaccatggccctacacatcgcccaggctgacgctgaggacagcccgccaagcctgcagcgccacagcctggccgccaggtattacaactgggtgtcctttcccgggtgcctggccagaggggctgagacccgtggttcctccaggatgaagacatttgaggaattccccatgaccccaacgacctacaaaggctctgtggacaaccagacagacagtgggatggtgctggcctcggaggagtttgagcagatagagagcaggcatagacaagaaagcggcttcaggtagctgaagcagagagagagaaggcagcatacgtcagcattttcttctctgcacttataagaaagatcaaagactttaagactttcgctatttcttctactgctatctactacaaacttcaaagaggaaccaggaggacaagaggagcatgaaagtggacaaggagtgtgaccactgaagcaccacagggaggggttaggcctccggatgactgcgggcaggcctggataatatccagcctcccacaagaagctggtggagcagagtgttccctgactcctccaaggaaagggagacgccctttcatggtctgctgagt

SEQ ID NO: 1740 - DNA, 4140 bp, Homo sapiens
  source 1..4140: mol_type = genomic DNA
actttcagccccgagccgcggccgctcgggtcggacccacgcgcagcggccggagatgcagcggggcgccgcgctgtgcctgcgactgtggctctgcctgggactcctggacggcctggtgagtggctactccatgacccccccgaccttgaacatcacggaggagtcacacgtcatcgacaccggtgacagcctgtccatctcctgcaggggacagcaccccctcgagtgggcttggccaggagctcaggaggcgccagccaccggagacaaggacagcgaggacacgggggtggtgcgagactgcgagggcacagacgccaggccctactgcaaggtgttgctgctgcacgaggtacatgccaacgacacaggcagctacgtctgctactacaagtacatcaaggcacgcatcgagggcaccacggccgccagctcctacgtgttcgtgagagactttgagcagccattcatcaacaagcctgacacgctcttggtcaacaggaaggacgccatgtgggtgccctgtctggtgtccatccccggcctcaatgtcacgctgcgctcgcaaagctcggtgctgtggccagacgggcaggaggtggtgtgggatgaccggcggggcatgctcgtgtccacgccactgctgcacgatgccctgtacctgcagtgcgagaccacctggggagaccaggacttcctttccaaccccttcctggtgcacatcacaggcaacgagctctatgacatccagctgttgcccaggaagtcgctggagctgctggtaggggagaagctggtcctgaactgcaccgtgtgggctgagtttaactcaggtgtcacctttgactgggactacccagggaagcaggcagagcggggtaagtgggtgcccgagcgacgctcccagcagacccacacagaactctccagcatcctgaccatccacaacgtcagccagcacgacctgggctcgtatgtgtgcaaggccaacaacggcatccagcgatttcgggagagcaccgaggtcattgtgcatgaaaatcccttcatcagcgtcgagtggctcaaaggacccatcctggaggccacggcaggagacgagctggtgaagctgcccgtgaagctggcagcgtaccccccgcccgagttccagtggtacaaggatggaaaggcactgtccgggcgccacagtccacatgccctggtgctcaaggaggtgacagaggccagcacaggcacctacaccctcgccctgtggaactccgctgctggcctgaggcgcaacatcagcctggagctggtggtgaatgtgcccccccagatacatgagaaggaggcctcctcccccagcatctactcgcgtcacagccgccaggccctcacctgcacggcctacggggtgcccctgcctctcagcatccagtggcactggcggccctggacaccctgcaagatgtttgcccagcgtagtctccggcggcggcagcagcaagacctcatgccacagtgccgtgactggagggcggtgaccacgcaggatgccgtgaaccccatcgagagcctggacacctggaccgagtttgtggagggaaagaataagactgtgagcaagctggtgatccagaatgccaacgtgtctgccatgtacaagtgtgtggtctccaacaaggtgggccaggatgagcggctcatctacttctatgtgaccaccatccccgacggcttcaccatcgaatccaagccatccgaggagctactagagggccagccggtgctcctgagctgccaagccgacagctacaagtacgagcatctgcgctggtaccgcctcaacctgtccacgctgcacgatgcgcacgggaacccgcttctgctcgactgcaagaacgtgcatctgttcgccacccctctggccgccagcctggaggaggtggcacctggggcgcgccacgccacgctcagcctgagtatcccccgcgtcgcgcccgagcacgagggccactatgtgtgcgaagtgcaagaccggcgcagccatgacaagcactgccacaagaagtacctgtcggtgcaggccctggaagcccctcggctcacgcagaacttgaccgacctcctggtgaacgtgagcgactcgctggagatgcagtgcttggtggccggagcgcacgcgcccagcatcgtgtggtacaaagacgagaggctgctggaggaaaagtctggagtcgacttggcggactccaaccagaagctgagcatccagcgcgtgcgcgaggaggatgcgggacgctatctgtgcagcgtgtgcaacgccaagggctgcgtcaactcctccgccagcgtggccgtggaaggctccgaggataagggcagcatggagatcgtgatccttgtcggtaccggcgtcatcgctgtcttcttctgggtcctcctcctcctcatcttctgtaacatgaggaggccggcccacgcagacatcaagacgggctacctgtccatcatcatggaccccggggaggtgcctctggaggagcaatgcgaatacctgtcctacgatgccagccagtgggaattcccccgagagcggctgcacctggggagagtgctcggctacggcgccttcgggaaggtggtggaagcctccgctttcggcatccacaagggcagcagctgtgacaccgtggccgtgaaaatgctgaaagagggcgccacggccagcgagcaccgcgcgctgatgtcggagctcaagatcctcattcacatcggcaaccacctcaacgtggtcaacctcctcggggcgtgcaccaagccgcagggccccctcatggtgatcgtggagttctgcaagtacggcaacctctccaacttcctgcgcgccaagcgggacgccttcagcccctgcgcggagaagtctcccgagcagcgcggacgcttccgcgccatggtggagctcgccaggctggatcggaggcggccggggagcagcgacagggtcctcttcgcgcggttctcgaagaccgagggcggagcgaggcgggcttctccagaccaagaagctgaggacctgtggctgagcccgctgaccatggaagatcttgtctgctacagcttccaggtggccagagggatggagttcctggcttcccgaaagtgcatccacagagacctggctgctcggaacattctgctgtcggaaagcgacgtggtgaagatctgtgactttggccttgcccgggacatctacaaagaccccgactacgtccgcaagggcagtgcccggctgcccctgaagtggatggcccctgaaagcatcttcgacaaggtgtacaccacgcagagtgacgtgtggtcctttggggtgcttctctgggagatcttctctctgggggcctccccgtaccctggggtgcagatcaatgaggagttctgccagcggctgagagacggcacaaggatgagggccccggagctggccactcccgccatacgccgcatcatgctgaactgctggtccggagaccccaaggcgagacctgcattctcggagctggtggagatcctgggggacctgctccagggcaggggcctgcaagaggaagaggaggtctgcatggccccgcgcagctctcagagctcagaagagggcagcttctcgcaggtgtccaccatggccctacacatcgcccaggctgacgctgaggacagcccgccaagcctgcagcgccacagcctggccgccaggtattacaactgggtgtcctttcccgggtgcctggccagaggggctgagacccgtggttcctccaggatgaagacatttgaggaattccccatgaccccaacgacctacaaaggctctgtggacaaccagacagacagtgggatggtgctggcctcggaggagtttgagcagatagagagcaggcatagacaagaaagcggcttcagaggaaccaggaggacaagaggagcatgaaagtggacaaggagtgtgaccactgaagcaccacagggaggggttaggcctccggatgactgcgggcaggcctggataatatccagcctcccacaagaagctggtggagcagagtgttccctgactcctccaaggaaagggagacgccctttcatggtctgctg

SEQ ID NO: 1741 - DNA, 3638 bp, Homo sapiens
  source 1..3638: mol_type = genomic DNA
ggtcgctcctggttctgccagctcccctgagagcctgaacccgggcttgagagcctcgccaccccgggtgacatccctgccgtgggcttgggggctctgggtgtgattccgccggtccgggtcccgcagcgaccacctacccagcgcagtcaggggcggggctgggacccagagcgggaccccggctgccgagtccaggtgtcccgcgggcctcgatttggggagcagaaaacgccaggtcttcaagggtgtctgccaccaccatgcctgacccatttggcagcagcctcgtgtgtggtggtctggtgtggacggtggaagcgtgattctgctgagtgtcagtgtgaccactcgtgctcagccgtatctcagcaggaggacaggtgccggagcagctcgtgcagctaagcagccaactgcagaaacgtcaggcctgttgcagtctccaaggcaccatgaatgccatcgtggctctctgccacttctgcgagctccacggcccccgcactctcttctgcacggaggtgctgcacgccccacttcctcaaggggatgggaatgaggacagtcctggccagggtgagcaggcggaagaagaggaaggtggcattcagatgaacagtcggatgcgtgcgcacagccccgcagagggggccagcgtcgagtccagcagcccggggcccaaaaagtcggacatgtgcgagggctgccggtcacttgctgcagggcacccgggatatatcagccatgataaagagacctccattaaatacgtcagccaccagcaccccagccacccccagctcttcagcattgtccgccaggcctgtgtccggagcctgagctgtgaggtctgccctggccgtgaaggccccatcttcttcggagatgagcagcacggctttgtgttcagccacaccttcttcatcaaggacagcctggccaggggcttccagcgctggtacagcatcatcaccatcatgatggaccggatctacctcatcaactcctggcccttcctgctggggaaggtccggggaatcatcgatgagctccagggcaaggcgctcaaggtgtttgaggcagagcagtttggatgcccacagcgtgctcagaggatgaacacagccttcacgccattcctacaccagaggaacggcaacgccgcccgctcgctgacatcgctgacaagtgatgacaacctgtgggcgtgcctgcacacctcctttgcctggctcctgaaggcgtgtggcagccggctgaccgagaagctcctggaaggtgctccgaccgaggataccttggtccagatggagaagctcgctgatttagaagaggaatcagaaagctgggacaactctgaggctgaagaggaggagaaagcccctgtgttgccagagagtacagaagggcgggagctgacccagggcccggcagagtcctcctctctctcaggctgtgggagctggcagccccggaagctgccagtcttcaagtccctccggcacatgaggcaggtcctgggtgccccttctttccgcatgctggcctggcacgttctcatggggaaccaggtgatctggaaaagcagagacgtggacctcgtccagtcagcttttgaagtacttcggaccatgcttcccgtgggctgcgtccgcatcatcccatacagcagccagtacgaggaggcctatcggtgcaacttcctggggctcagcccgcacgtgcagatccccccccacgtgctctcctcagagtttgctgtcatcgtggaggtccacgcagccgcacgttccaccctccaccctgtggggtgtgaggatgaccagtctctcagcaagtacgagtttgtggtgaccagtgggagccctgtagctgcagaccgagtgggccccaccatcctgaataagattgaagcggctctgaccaaccagaacctgtctgtggatgtggtggaccagtgcctcgtctgcctcaaggaggagtggatgaacaaagtgaaggtgctttttaagttcaccaaggtggacagtcgacccaaagaggacacacagaagctgctgagcatcctgggtgcgtccgaggaggacaatgtcaagctgctgaagttctggatgactggcctgagcaagacctacaagtcacacctcatgtccacggtccgcagccccacagcctcggagtctcggaactgacccgtcacacacacctgcctaaagacagggatggctgtccacaggatcctccagccccgtgagagggactgtcccttgagtttctcaactgctggaaggagctgtgtcccagcaaggaagggaaaccatcagggctgggctcggccctgtcaggtttggggcctgtgtgcttcccagactctccctccagccgttggaatcgctgaagatggcaatgaaaggcggagggatgatgggctctctctgtgttcaaactccttggagagacgactaggaggacagcttgcctcccaggccccttgtggacttagactcaaaacccgcaggagaaacaggtccgactcagtatgcagtcgcaataacatgtctgctcccgaggttaacattcaagcgtttctactttgaaattcagcaagagtttctgggccttatgtttgagggtaccttttgctgcagttgtgaatattcagtacattgccagctcttggtcactgagtgattgagttagggctccgcaagagactttggggagtgaagtggatctcttcctcatcttttggtcctctgaaatgtgtgttctgaagccatggggctcgtcttctggggtgttcccctgcaggtgctggtgaaggtaacctggggcttaatgatggagtccctgatcatttttgcacaagacaggttgctgaggggtcggcaagcatctgacttgcccaatcccctggatatggtgagccccgccatgcttttattctgtatcgcttttgtctttattgctgctttcaacatttacgtttggttacagttaactattttcggagtgtggtgattgaagacaatttcatcatcccactgtacttttttttttgagagggagtttcactcttgttgcccaggctggagtgcaatggcacgatcttggctcactgcaacctctgcctcctgggttcaagcaattctcctgcctcagcctccagagtagctggaactacaggtgcccgccactatgcccagctaatttttgtattttttagtagagacggggtttcaccgtgttggccgggctggtctcaaactcctgacctcaggtgatccacccacctcagcctcccaaagtgctgggattacaagcgtgagccactgtgcctggcccttttttttttttttttttttttttttaaagagatggcatcttgctatgtcgtccaggctggtcttgaactcctgagttcaagcagtcctcctgcttcaacatacagctacaggtaccccccactatacatttttaataaggattcatggctcagagggattttctgatggttttgctgatttgtttctagtttttttgtgtttatatttaacatgaagaccaagtttatataactaggtatctgtataatgcaacaacattggaacacaataaagatgtatttttgtaaa

SEQ ID NO: 1742 - DNA, 3359 bp, Homo sapiens
  source 1..3359: mol_type = genomic DNA
tttaagtggaatcctacagtgtttatccgtttgtgaccagtgtagatcatttcgtgtaatgtccttcagtttcagccgtgccgtagcttgtggcagggtttccttcctttttaaggccatgtgacattccagtcccaccttgctaaagcagtttacctggtcactggggtgactctggagctcccctctggcctcactgcctgtgcttggtcatgttggctagctgtcctcccttctccacctctgagtctacaagggctgcactccacggaggtcccatgcgtcagccccgaccgcagcgcttggctctgctgctgtgtcccgtccccgtgaaggctcagcaggcactcactgggccttctcccctgctcactgctccgcactctgcaccccacccgcactgtgcgtcttcaccctgcctggcctgggccactgtcccttcctgctcagatcagtcagcagggtgcctcagcttgttccccacctccaccctggccccctgccatcttttctgcacatgggcatgagtgaacctattcaagtgaaattcacattttctcatgtctcatcagaacccccaaagcctccccagtctctgataacacatccagggtctttcggtggcctggaggagctataagatctgcttcctacagcctccaccctgtctgctgctgctctttggacaccggaccttacacacccctcagacagtacagcacccaccctgcccttcaactcttgcttggccccgtaagccagtccttccaggctcctgcctcctctggtcattccctgcgtgggcctctcgcaggaagcagttttcctgtgtcccccgccgaccccctgcaggaggtaagctgcatgagggcagtatcatgttgcctagcaccttggcccacatggagcaggtgccaagcagatatgtattgggtggaggaccctctccctgtggccttttatctatttgttctcacagggtttgccaggtttggctgcagttcatgtcacttgaggacattcctttccagcgccgttggctttgtggctgtggctctgtcacagctccagctgtgctatcattggtccacattgtcccctcccctatttgctgtgactcccatgggaagatcctatctctgttcctctcgcactggggcaaagcagtgctggcagggggctggggaactggcgggtggcctctcctgggcaggaagtccatggcacccaggtgctccctgtgctccagaggggctggggaggtttcatggagtcaataggcattggcaagctgacatgtcccctgtcccacgcaggcctgttgcagtctccaaggcaccatgaatgccatcgtggctctctgccacttctgcgagctccacggcccccgcactctcttctgcacggaggtgctgcacgccccacttcctcaaggggatgggaatgaggacagtcctggccagggtgagcaggcggaagaagaggaaggtggcattcagatgaacagtcggatgcgtgcgcacagccccgcagagggggccagcgtcgagtccagcagcccggggcccaaaaagtcggacatgtgcgagggctgccggtcacttgctgcagggcacccgggatatatcagccatgataaagagacctccattaaatacgtcagccaccagcaccccagccacccccagctcttcagcattgtccgccaggcctgtgtccggagcctgagctgtgaggtgagccttgtggccacagagcctgtctctgtgggagcccacatgctcccaggtgctctgggtgggctcggagccagcattgcacagggaggcaggcactggtcctctctcagggcggacccgcagatcagcacagcacagggtacaggacgcctcccttgtccagaattgcgggaggagtcatgttggacttgctgagcattttctgattgagtgctagcttttgcactttaagcaccgaacttttattatttgtcctttctttattattattgttttcttttttccttcttttgtgtcagggtctcgctctgtcgtccagactggagtgcagtggtgccgtcatggttcactgcaacctcaaactcctgggctcaagcgatcctcccgccttagcctcccaggtggctgggaccactggtgtgtgccaccatgctcaactggggtttgttttttgttgttgttaagacagagtctcactcggttgcccaggctggagtgcagtggtgcaatctcggcttactgcaacctccaccctgggtttaagtgattcttctgtctcagctatcctgagtagctgggacaacaggcgtgtgccaccatgcccggctaattttttgtatttttagtagagaagagatttcaccatgttggccgagctggtcttgaactcctgaccttgtgatttgcccgcctcggcctcccgaagtgctgggattacaggtgggagccactgtgccccacctttttaaaatttttttgtagagatgaggtctcagtatgttgcccaggttggtctcgaactcaagcaatcctctggctcatcctcccaaagcactaggattacaggtgtgagccgccatgcccagccatgtgtgtctattcttgatggatgtattcctaagataggaagcatttctaggttaggtggttcattgcatcaacatcacctttttttattatctcagtcctcattccaagtctcagtgatgatcccgtgctgctctcagcctgctgaggtgtggatgatttcttcctaaactacgtcgctgctgctgttgctcttgactctgagctcaggtctttgttacaaagaattcgtcgttcagttactaaacttccttgtcattggtgtccacccagttcgacacaccaagctcccttactgttctcattcagtgtggctgtgtgcctgccctcaactgtcctctccttttaatttcctaccgctggtctgctagcaggcagctcggcatgtctgttagaattgtgtgttaaggaagagtaagtatgtaatgaggagggactgaaatcctcttataagaataaagtacgtggggctgggcatggtggcccactcctgtaatcccagccctttgggaggccaaggccggcagatcacctgaggtcaggagttcgagaccagcctggccaacatggtgaaaccccctctctaaaaaaaatacaaaaaaattagccaggcgtggtggcacactcttacaatcccagctactcaggaggctgaggcaggagaattgcttgaacccaggagacggaggttgcagtgggccaggatcacaccactgcattccagcctgggtgacaagagcgagactccatctc

SEQ ID NO: 1743 - DNA, 1692 bp, Homo sapiens
  source 1..1692: mol_type = genomic DNA
ggtcgctcctggttctgccagctcccctgagagcctgaacccgggcttgagagcctcgccaccccgggtgacatccctgccgtgggcttgggggctctgggtgtgattccgccggtccgggtcccgcagcgaccacctacccagcgcagtcaggggcggggctgggacccagagcgggaccccggctgccgagtccaggtgtcccgcgggcctcgatttggggagcagaaaacgccaggtcttcaagggtgtctgccaccaccatgcctgacccatttggcagcagcctcgtgtgtggtggtctggtgtggacggtggaagcgtgattctgctgagtgtcagtgtgaccactcgtgctcagccgtatctcagcaggaggacaggtgccggagcagctcgtgcagctaagcagccaactgcagaaacgtcaggcctgttgcagtctccaaggcaccatgaatgccatcgtggctctctgccacttctgcgagctccacggcccccgcactctcttctgcacggaggtgctgcacgccccacttcctcaaggggatgggaatgaggacagtcctggccagggtgagcaggcggaagaagaggaaggtggcattcagatgaacagtcggatgcgtgcgcacagccccgcagagggggccagcgtcgagtccagcagcccggggcccaaaaagtcggacatgtgcgagggctgccggtcacttgctgcagggcacccgggatatatcagccatgataaagagacctccattaaatacgtcagccaccagcaccccagccacccccagctcttcagcattgtccgccaggcctgtgtccggagcctgagctgtgaggtctgccctggccgtgaaggccccatcttcttcggagatgagcagcacggctttgtgttcagccacaccttcttcatcaaggacagcctggccaggggcttccagcgctggtacagcatcatcaccatcatgatggaccggatctacctcatcaactcctggcccttcctgctggggaaggtccggggaatcatcgatgagctccagggcaaggcgctcaaggtgtttgaggcagagcagtttggatgcccacagcgtgctcagaggatgaacacagccttcacgccattcctacaccagaggaacggcaacgccgcccgctcgctgacatcgctgacaagtgatgacaacctgtgggcgtgcctgcacacctcctttgcctggctcctgaaggcgtgtggcagccggctgaccgagaagctcctggaaggtgctccgaccgaggataccttggtccagatggagaagctcgctggtgaggcaggggtgctgttgccggggccttggcccggatggccgtggggcggtaccagctgtctgctctcctggcaggaatcgctgagggagggaaacgcggctctgaatcagcccagaacgagccttcgggaagctcaccctccgatctcggtgtgattgttgtgattgttgtgatttcctgtctcgtttgccttgaccgccatgtgaaagaatctgttccccagctaggtggggaaaattcacaggtgggctgtctgtagagagaactggctgattaaaggcttctcgtcccgattttgtgatagccaagtgcttggcctggtcgacggtctttgctcctttacaaataaagtgttctgtttca

SEQ ID NO: 1744 - DNA, 2523 bp, Homo sapiens
  source 1..2523: mol_type = genomic DNA
gagtcacgcgcctgggtgtcggcggggctgcgggaccgcgagtgagtgtggtcgctcctggttctgccagctcccctgagagcctgaacccgggcttgagagcctcgccaccccgggtgacatccctgccgtgggcttgggggctctgggtgtgattccgccggtccgggtcccgcagcgaccacctacccagcgcagtcaggggcggggctgggacccagagcgggaccccggctgccgagtccaggtgtcccgcgggcctcgatttggggagcagaaaacgccaggtcttcaagggtgtctgccaccaccatgcctgacccatttggcagcagcctcgtgtgtggtggtctggtgtggacggtggaagcgtgattctgctgagtgtcagtgtgaccactcgtgctcagccgtatctcagcaggaggacaggtgccggagcagctcgtgcagctaagcagccaactgcagaaacgtcaggcctgttgcagtctccaaggcaccatgaatgccatcgtggctctctgccacttctgcgagctccacggcccccgcactctcttctgcacggaggtgctgcacgccccacttcctcaaggggatgggaatgaggacagtcctggccagggtgagcaggcggaagaagaggaaggtggcattcagatgaacagtcggatgcgtgcgcacagccccgcagagggggccagcgtcgagtccagcagcccggggcccaaaaagtcggacatgtgcgagggctgccggtcacttgctgcagggcacccgggatatatcagccatgataaagagacctccattaaatacgtcagccaccagcaccccagccacccccagctcttcagcattgtccgccaggcctgtgtccggagcctgagctgtgaggtgagccttgtggccacagagcctgtctctgtgggagcccacatgctcccaggtgctctgggtgggctcggagccagcattgcacagggaggcaggcactggtcctctctcagggcggacccgcagatcagcacagcacagggtacaggacgcctcccttgtccagaattgcgggaggagtcatgttggacttgctgagcattttctgattgagtgctagcttttgcactttaagcaccgaacttttattatttgtcctttctttattattattgttttcttttttccttcttttgtgtcagggtctcgctctgtcgtccagactggagtgcagtggtgccgtcatggttcactgcaacctcaaactcctgggctcaagcgatcctcccgccttagcctcccaggtggctgggaccactggtgtgtgccaccatgctcaactggggtttgttttttgttgttgttaagacagagtctcactcggttgcccaggctggagtgcagtggtgcaatctcggcttactgcaacctccaccctgggtttaagtgattcttctgtctcagctatcctgagtagctgggacaacaggcgtgtgccaccatgcccggctaattttttgtatttttagtagagaagagatttcaccatgttggccgagctggtcttgaactcctgaccttgtgatttgcccgcctcggcctcccgaagtgctgggattacaggtgggagccactgtgccccacctttttaaaatttttttgtagagatgaggtctcagtatgttgcccaggttggtctcgaactcaagcaatcctctggctcatcctcccaaagcactaggattacaggtgtgagccgccatgcccagccatgtgtgtctattcttgatggatgtattcctaagataggaagcatttctaggttaggtggttcattgcatcaacatcacctttttttattatctcagtcctcattccaagtctcagtgatgatcccgtgctgctctcagcctgctgaggtgtggatgatttcttcctaaactacgtcgctgctgctgttgctcttgactctgagctcaggtctttgttacaaagaattcgtcgttcagttactaaacttccttgtcattggtgtccacccagttcgacacaccaagctcccttactgttctcattcagtgtggctgtgtgcctgccctcaactgtcctctccttttaatttcctaccgctggtctgctagcaggcagctcggcatgtctgttagaattgtgtgttaaggaagagtaagtatgtaatgaggagggactgaaatcctcttataagaataaagtacgtggggctgggcatggtggcccactcctgtaatcccagccctttgggaggccaaggccggcagatcacctgaggtcaggagttcgagaccagcctggccaacatggtgaaaccccctctctaaaaaaaatacaaaaaaattagccaggcgtggtggcacactcttacaatcccagctactcaggaggctgaggcaggagaattgcttgaacccaggagacggaggttgcagtgggccaggatcacaccactgcattccagcctgggtgacaagagcgagactccatctc

SEQ ID NO: 1745 - DNA, 757 bp, Homo sapiens
  source 1..757: mol_type = genomic DNA
cgcgcctgggtgtcggcggggctgcgggaccgcgagtgagtgtggtcgctcctggttctgccagctcccctgagagcctgaacccgggcttgagagcctcgccaccccgggtgacatccctgccgtgggcttgggggctctgggtgtgattccgccggtccgggtcccgcagcgaccacctacccagcgcagtcaggggcggggctgggacccagagcgggaccccggctgccgagtccaggtgtcccgcgggcctcgatttggggagcaggcggaagaagaggaaggtggcattcagatgaacagtcggatgcgtgcgcacagccccgcagagggggccagcgtcgagtccagcagcccggggcccaaaaagtcggacatgtgcgagggctgccggtcacttgctgcagggcacccgggatatatcagccatgataaagagacctccattaaatacgtcagccaccagcaccccagccacccccagctcttcagcattgtccgccaggcctgtgtccggagcctgagctgtgaggtctgccctggccgtgaaggccccatcttcttcggagatgagcagcacggctttgtgttcagccacaccttcttcatcaaggacagcctggccaggggcttccagcgctggtacagcatcatcaccatcatgatggaccggatctacctcatcaactcctggcccttcctgctggggaaggtccggggaatcatcgatgagctccagggcaaggcgctcaag

SEQ ID NO: 1746 - DNA, 2862 bp, Homo sapiens
  source 1..2862: mol_type = genomic DNA
cgcgcggccgcccgtcgcttcgcacagggctggatggttgtattgggcagggtggctccaggatgttaggaactgtgaagatggaagggcatgaaaccagcgactggaacagctactacgcagacacgcaggaggcctactcctccgtcccggtcagcaacatgaactcaggcctgggctccatgaactccatgaacacctacatgaccatgaacaccatgactacgagcggcaacatgaccccggcgtccttcaacatgtcctatgccaacccgggcctaggggccggcctgagtcccggcgcagtagccggcatgccggggggctcggcgggcgccatgaacagcatgactgcggccggcgtgacggccatgggtacggcgctgagcccgagcggcatgggcgccatgggtgcgcagcaggcggcctccatgaatggcctgggcccctacgcggccgccatgaacccgtgcatgagccccatggcgtacgcgccgtccaacctgggccgcagccgcgcgggcggcggcggcgacgccaagacgttcaagcgcagctacccgcacgccaagccgccctactcgtacatctcgctcatcaccatggccatccagcaggcgcccagcaagatgctcacgctgagcgagatctaccagtggatcatggacctcttcccctattaccggcagaaccagcagcgctggcagaactccatccgccactcgctgtccttcaatgactgcttcgtcaaggtggcacgctccccggacaagccgggcaagggctcctactggacgctgcacccggactccggcaacatgttcgagaacggctgctacttgcgccgccagaagcgcttcaagtgcgagaagcagccgggggccggcggcgggggcgggagcggaagcgggggcagcggcgccaagggcggccctgagagccgcaaggacccctctggcgcctctaaccccagcgccgactcgcccctccatcggggtgtgcacgggaagaccggccagctagagggcgcgccggcccccgggcccgccgccagcccccagactctggaccacagtggggcgacggcgacagggggcgcctcggagttgaagactccagcctcctcaactgcgccccccataagctccgggcccggggcgctggcctctgtgcccgcctctcacccggcacacggcttggcaccccacgagtcccagctgcacctgaaaggggacccccactactccttcaaccacccgttctccatcaacaacctcatgtcctcctcggagcagcagcataagctggacttcaaggcatacgaacaggcactgcaatactcgccttacggctctacgttgcccgccagcctgcctctaggcagcgcctcggtgaccaccaggagccccatcgagccctcagccctggagccggcgtactaccaaggtgtgtattccagacccgtcctaaacacttcctagctcccgggactggggggtttgtctggcatagccatgctggtagcaagagagaaaaaatcaacagcaaacaaaaccacacaaaccaaaccgtcaacagcataataaaatcccaacaactatttttatttcatttttcatgcacaacctttcccccagtgcaaaagactgttactttattattgtattcaaaattcattgtgtatattactacaaagacaaccccaaaccaatttttttcctgcgaagtttaatgatccacaagtgtatatatgaaattctcctccttccttgcccccctctctttcttccctctttcccctccagacattctagtttgtggagggttatttaaaaaaacaaaaaaggaagatggtcaagtttgtaaaatatttgtttgtgctttttccccctccttacctgaccccctacgagtttacaggtctgtggcaatactcttaaccataagaattgaaatggtgaagaaacaagtatacactagaggctcttaaaagtattgaaagacaatactgctgttatatagcaagacataaacagattataaacatcagagccatttgcttctcagtttacatttctgatacatgcagatagcagatgtctttaaatgaaatacatgtatattgtgtatggacttaattatgcacatgctcagatgtgtagacatcctccgtatatttacataacatatagaggtaatagataggtgatatacatgatacattctcaagagttgcttgaccgaaagttacaaggaccccaacccctttgtcctctctacccacagatggccctgggaatcaattcctcaggaattgccctcaagaactctgcttcttgctttgcagagtgccatggtcatgtcattctgaggtcacataacacataaaattagtttctatgagtgtataccatttaaagaatttttttttcagtaaaagggaatattacaatgttggaggagagataagttatagggagctggatttcaaaacgtggtccaagattcaaaaatcctattgatagtggccattttaatcattgccatcgtgtgcttgtttcatccagtgttatgcactttccacagttggacatggtgttagtatagccagacgggtttcattattatttctctttgctttctcaatgttaatttattgcatggtttattctttttctttacagctgaaattgctttaaatgatggttaaaattacaaattaaattgttaatttttatcaatgtgattgtaattaaaaatattttgatttaaataacaaaaataataccagattttaagccgtggaaaatgttcttgatcatttgcagttaaggactttaaataaatcaaatgttaacaaaa

SEQ ID NO: 1747 - DNA, 1792 bp, Homo sapiens
  source 1..1792: mol_type = genomic DNA
aaagcccgaggatcctttcagcagcacagagcagagaccgcgctccccaggagggggatcggctggatgaggagggaccggctggggctgagcacgtcctccaacaggcgctgaccggtgtgaacaaaagcctactcctccgtcccggtcagcaacatgaactcaggcctgggctccatgaactccatgaacacctacatgaccatgaacaccatgactacgagcggcaacatgaccccggcgtccttcaacatgtcctatgccaacccgggcctaggggccggcctgagtcccggcgcagtagccggcatgccggggggctcggcgggcgccatgaacagcatgactgcggccggcgtgacggccatgggtacggcgctgagcccgagcggcatgggcgccatgggtgcgcagcaggcggcctccatgaatggcctgggcccctacgcggccgccatgaacccgtgcatgagccccatggcgtacgcgccgtccaacctgggccgcagccgcgcgggcggcggcggcgacgccaagacgttcaagcgcagctacccgcacgccaagccgccctactcgtacatctcgctcatcaccatggccatccagcaggcgcccagcaagatgctcacgctgagcgagatctaccagtggatcatggacctcttcccctattaccggcagaaccagcagcgctggcagaactccatccgccactcgctgtccttcaatgactgcttcgtcaaggtggcacgctccccggacaagccgggcaagggctcctactggacgctgcacccggactccggcaacatgttcgagaacggctgctacttgcgccgccagaagcgcttcaagtgcgagaagcagccgggggccggcggcgggggcgggagcggaagcgggggcagcggcgccaagggcggccctgagagccgcaaggacccctctggcgcctctaaccccagcgccgactcgcccctccatcggggtgtgcacgggaagaccggccagctagagggcgcgccggcccccgggcccgccgccagcccccagactctggaccacagtggggcgacggcgacagggggcgcctcggagttgaagactccagcctcctcaactgcgccccccataagctccgggcccggggcgctggcctctgtgcccgcctctcacccggcacacggcttggcaccccacgagtcccagctgcacctgaaaggggacccccactactccttcaaccacccgttctccatcaacaacctcatgtcctcctcggagcagcagcataagctggacttcaaggcatacgaacaggcactgcaatactcgccttacggctctacgttgcccgccagcctgcctctaggcagcgcctcggtgaccaccaggagccccatcgagccctcagccctggagccggcgtactaccaaggtgtgtattccagacccgtcctaaacacttcctagctcccgggactggggggtttgtctggcatagccatgctggtagcaagagagaaaaaatcaacagcaaacaaaaccacacaaaccaaaccgtcaacagcataataaaatcccaacaactatttttatttcatttttcatgcacaacctttcccccagtgcaaaagactgttactttattattgtattcaaaattcattgtgtatattactacaaagacaaccccaaaccaatttttttcctgcgaagtttaatgatccacaagtgtatatatgaaattctcctccttccttgcccccctctctttcttccctctttc

SEQ ID NO: 1748 - DNA, 1683 bp, Homo sapiens
  source 1..1683: mol_type = genomic DNA
cgcgctctctcgctctcagggcccccctcgctcccccggccgcagtccgtgcgcgagggcgccggcgagccgtctcggaagcagcatgcaggcgcgctactccgtgtccgaccccaacgccctgggagtggtgccctacctgagcgagcagaattactaccgggctgcgggcagctacggcggcatggccagccccatgggcgtctattccggccacccggagcagtacagcgcggggatgggccgctcctacgcgccctaccaccaccaccagcccgcggcgcctaaggacctggtgaagccgccctacagctacatcgcgctcatcaccatggccatccagaacgcgcccgagaagaagatcaccttgaacggcatctaccagttcatcatggaccgcttccccttctaccgggagaacaagcagggctggcagaacagcatccgccacaacctctcgctcaacgagtgcttcgtcaaggtgccccgcgacgacaagaagcccggcaagggcagttactggaccctggacccggactcctacaacatgttcgagaacggcagcttcctgcggcgccggcggcgcttcaaaaagaaggacgtgtccaaggagaaggaggagcgggcccacctcaaggagccgcccccggcggcgtccaagggcgccccggccaccccccacctagcggacgcccccaaggaggccgagaagaaggtggtgatcaagagcgaggcggcgtccccggcgctgccggtcatcaccaaggtggagacgctgagccccgagagcgcgctgcagggcagcccgcgcagcgcggcctccacgcccgccggctcccccgacggctcgctgccggagcaccacgccgcggcgcccaacgggctgcctggcttcagcgtggagaacatcatgaccctgcgaacgtcgccgccgggcggagagctgagcccgggggccggacgcgcgggcctggtggtgccgccgctggcgctgccctacgccgccgcgccgcccgccgcctacggccagccgtgcgctcagggcctggaggccggggccgccgggggctaccagtgcagcatgcgagcgatgagcctgtacaccggggccgagcggccggcgcacatgtgcgtcccgcccgccctggacgaggccctctcggaccacccgagcggccccacgtcgcccctgagcgctctcaacctcgccgccggccaggagggcgcgctcgccgccacgggccaccaccaccagcaccacggccaccaccacccgcaggcgccgccgcccccgccggctccccagccccagccgacgccgcagcccggggccgccgcggcgcaggcggcctcctggtatctcaaccacagcggggacctgaaccacctccccggccacacgttcgcggcccagcagcaaactttccccaacgtgcgggagatgttcaactcccaccggctggggattgagaactcgaccctcggggagtcccaggtgagtggcaatgccagctgccagctgccctacagatccacgccgcctctctatcgccacgcagccccctactcctacgactgcacgaaatactgacgtgtcccgggacctcccctccccggcccgctccggcttcgcttcccagccccgacccaaccagacaattaaggggctgcagagacgcaaaa

SEQ ID NO: 1749 - DNA, 5722 bp, Homo sapiens
  source 1..5722: mol_type = genomic DNA
gcagccgccacattcaacaggcagcagcgcagcgggcgcgccgctggggagagcaagcggcccgcggcgtccgtccgtccttccgtccgcggccctgtcagctggagcgcggcgcaggctctgccccggcccggcggctctggccggccgtccagtccgtgcggcggaccccgaggagcctcgatgtggatggccccgcgaagttaagttctgggctcgcgcttccactccgccgcgccttcctcccagtttccgtccgctcgccgcaccggcttcgttcccccaaatctcggaccgtcccttcgcgccccctccccgtccgcccccagtgctgcgttctccccctcttggctctcctgcggctgggggaggggcgggggtcaccatggccgaggcgcctcaggtggtggagatcgacccggacttcgagccgctgccccggccgcgctcgtgcacctggccgctgcccaggccggagtttagccagtccaactcggccacctccagcccggcgccgtcgggcagcgcggctgccaaccccgacgccgcggcgggcctgccctcggcctcggctgccgctgtcagcgccgacttcatgagcaacctgagcttgctggaggagagcgaggacttcccgcaggcgcccggctccgtggcggcggcggtggcggcggcggccgccgcggccgccaccggggggctgtgcggggacttccagggcccggaggcgggctgcctgcacccagcgccaccgcagcccccgccgcccgggccgctgtcgcagcacccgccggtgccccccgccgccgctgggccgctcgcggggcagccgcgcaagagcagctcgtcccgccgcaacgcgtggggcaacctgtcctacgccgacctcatcaccaaggccatcgagagctcggcggagaagcggctcacgctgtcgcagatctacgagtggatggtcaagagcgtgccctacttcaaggataagggtgacagcaacagctcggcgggctggaagaattcaattcgtcataatctgtccctacacagcaagttcattcgtgtgcagaatgaaggaactggaaaaagttcttggtggatgctcaatccagagggtggcaagagcgggaaatctcctaggagaagagctgcatccatggacaacaacagtaaatttgctaagagccgaagccgagctgccaagaagaaagcatctctccagtctggccaggagggtgctggggacagccctggatcacagttttccaaatggcctgcaagccctggctctcacagcaatgatgactttgataactggagtacatttcgccctcgaactagctcaaatgctagtactattagtgggagactctcacccattatgaccgaacaggatgatcttggagaaggggatgtgcattctatggtgtacccgccatctgccgcaaagatggcctctactttacccagtctgtctgagataagcaatcccgaaaacatggaaaatcttttggataatctcaaccttctctcatcaccaacatcattaactgtttcgacccagtcctcacctggcaccatgatgcagcagacgccgtgctactcgtttgcgccaccaaacaccagtttgaattcacccagcccaaactaccaaaaatatacatatggccaatccagcatgagccctttgccccagatgcctatacaaacacttcaggacaataagtcgagttatggaggtatgagtcagtataactgtgcgcctggactcttgaaggagttgctgacttctgactctcctccccataatgacattatgacaccagttgatcctggggtagcccagcccaacagccgggttctgggccagaacgtcatgatgggccctaattcggtcatgtcaacctatggcagccaggcatctcataacaaaatgatgaatcccagctcccatacccaccctggacatgctcagcagacatctgcagttaacgggcgtcccctgccccacacggtaagcaccatgccccacacctcgggtatgaaccgcctgacccaagtgaagacacctgtacaagtgcctctgccccaccccatgcagatgagtgccctggggggctactcctccgtgagcagctgcaatggctatggcagaatgggccttctccaccaggagaagctcccaagtgacttggatggcatgttcattgagcgcttagactgtgacatggaatccatcattcggaatgacctcatggatggagatacattggattttaactttgacaatgtgttgcccaaccaaagcttcccacacagtgtcaagacaacgacacatagctgggtgtcaggctgagggttagtgagcaggttacacttaaaagtacttcagattgtctgacagcaggaactgagagaagcagtccaaagatgtctttcaccaactcccttttagttttcttggttaaaaaaaaaaacaaaaaaaaaaaccctccttttttcctttcgtcagacttggcagcaaagacatttttcctgtacaggatgtttgcccaatgtgtgcaggttatgtgctgctgtagataaggactgtgccattggaaatttcattacaatgaagtgccaaactcactacaccatataattgcagaaaagattttcagatcctggtgtgctttcaagttttgtatataagcagtagatacagattgtatttgtgtgtgtttttggtttttctaaatatccaattggtccaaggaaagtttatactctttttgtaatactgtgatgggcctcatgtcttgataagttaaacttttgtttgtactacctgttttctgcggaactgacggatcacaaagaactgaatctccattctgcatctccattgaacagccttggacctgttcacgttgccacagaattcacatgagaaccaagtagcctgttatcaatctgctaaattaatggacttgttaaacttttggaaaaaaaaagattaaatgccagctttgtacaggtcttttctatttttttttgtttattttgttatttgcaaatttgtacaaacatttaaatggttctaatttccagataaatgatttttgatgttattgttgggacttaagaacatttttggaatagatattgaactgtaataatgttttcttaaaactagagtctactttgttacatagtcagcttgtaaattttgtggaaccacaggtatttggggcagcattcataattttcattttgtattctaactggattagtactaattttatacatgcttaactggtttgtacactttgggatgctacttagtgatgtttctgactaatcttaaatcattgtaattagtacttgcatattcaacgtttcaggccctggttgggcaggaaagtgatgtatagttatggacactttgcgtttcttatttaggataacttaatatgtttttatgtatgtattttaaagaaatttcatctgcttctactgaactatgcgtactgcatagcatcaagtcttctctagagacctctgtagtcctgggaggcctcataatgtttgtagatcagaaaagggagatctgcatctaaagcaatggtcctttgtcaaacgagggattttgatccacttcaccattttgagttgagctttagcaaaagtttcccctcataattctttgctcttgtttcagtccaggtggaggttggttttgtagttctgccttgaggaattatgtcaacactcatacttcatctcattctcccttctgccctgcagattagattacttagcacactgtggaagtttaagtggaaggagggaatttaaaaatgggacttgagtggtttgtagaatttgtgttcataagttcagatgggtagcaaatggaatagaacttacttaaaaattggggagatttatttgaaaaccagctgtaagttgtgcattgagattatgttaaaagccttggcttaagaatttgaaaatttctttagcctgtagcaacctaaactgtaattcctatcattatgttttattactttccaattacctgtaactgacagaccaaattaattggctttgtgtcctatttagtccatcagtattttcaagtcatgtggaaagcccaaagtcatcacaatgaagagaacaggtgcacagcactgttcctcttgtgttcttgagaaggatctaatttttctgtatatagcccacatcacacttgctttgtcttgtatgttaattgcatcttcattggcttggtatttcctaaatgtttaacaagaacacaagtgttcctgataagatttcctacagtaagccagctctattgtaagcttcccactgtgatgatcatttttttgaagattcattgaacagccaccactctatcatcctcattttggggcagtccaagacatagctggttttagaaacccaagttcctctaagcacagcctcccgggtatgtaactgaacttggtgccaaagtacttgtgtactaatttctattactacgtactgtcactttcctcccgtgccattactgcatcataatacaaggaacctcagagcccccatttgttcattaaagaggcaactacagccaaaatcactgttaaaatcttactacttcatggagtagctcttaggaaaatatatcttcctcctgagtctgggtaattatacctctcccaagcccccattgtgtgttgaaatcctgtcatgaatccttggtagctctctgagaacagtgaagtccagggaaaggcatctggtctgtctggaaagcaaacattatgtggcctctggtagtttttttcctgtaagaatactgactttctggagtaatgagtatatatcagttattgtacatgattgctttgtgaaatgtgcaaatgatatcacctatgcagccttgtttgatttattttctctggtttgtactgttattaaaagcatattgtattatagagctattcagatattttaaatataaagatgtattgtttccgtaatatagacgtatggaatatatttaggtaatagatgtattacttggaaagttctgctttgacaaactgacaaagtctaaatgagcacatgtatcccagtgagcagtaaatcaatggaacatcccaagaagaggataaggatgcttaaaatggaaatcattctccaacgatatacaaattggacttgttcaactgctggatatatgctaccaataaccccagccccaacttaaaattcttacattcaagctcctaagagttcttaatttataactaattttaaaagagaagtttcttttctggttttagtttgggaataatcattcattaaaaaaaatgtattgtggtttatgcgaacagaccaacctggcattacagttggcctctccttgaggtgggcacagcctggcagtgtggccaggggtggccatgtaagtcccatcaggacgtagtcatgcctcctgcatttcgctacccgagtttagtaacagtgcagattccacgttcttgttccgatactctgagaagtgcctgatgttgatgtacttacagacacaagaacaatctttgctataattgtataaagccataaatgtacataaattatgtttaaatggcttggtgtctttcttttctaattatgcagaataagctctttattaggaattttttgtgaagctattaaatacttgagttaa

SEQ ID NO: 1750 - DNA, 7308 bp, Homo sapiens
  source 1..7308: mol_type = genomic DNA
gggaggaggaggaatgtggaaggtggcggcgcgcgagctgacaggcggttcctcgggcgggctgcggcgacggcccgagcgcttctccttcgccgaggttgcgcgccccctcctcgccgtgccccgggcccgcgcgggatcgtgcgtcgtcccgccgcgtccctgaagggaaggaagcgaggcggcggcggcggcgcccgggagccggagccttcgcggcgtccacgtccctcccccgctgcaccccgccccggcgcgagaggagagcgcgagagccccagccgcgggcgggcgggcggcgaagatggcagaggcaccggcttccccggccccgctctctccgctcgaagtggagctggacccggagttcgagccccagagccgtccgcgatcctgtacgtggcccctgcaaaggccggagctccaagcgagccctgccaagccctcgggggagacggccgccgactccatgatccccgaggaggaggacgatgaagacgacgaggacggcgggggacgggccggctcggccatggcgatcggcggcggcggcgggagcggcacgctgggctccgggctgctccttgaggactcggcccgggtgctggcacccggagggcaagaccccgggtctgggccagccaccgcggcgggcgggctgagcgggggtacacaggcgctgctgcagcctcagcaaccgctgccaccgccgcagccgggggcggctgggggctccgggcagccgaggaaatgttcgtcgcggcggaacgcctggggaaacctgtcctacgcggacctgatcacccgcgccatcgagagctccccggacaaacggctcactctgtcccagatctacgagtggatggtgcgttgcgtgccctacttcaaggataagggcgacagcaacagctctgccggctggaagaactccatccggcacaacctgtcactgcatagtcgattcatgcgggtccagaatgagggaactggcaagagctcttggtggatcatcaaccctgatggggggaagagcggaaaagccccccggcggcgggctgtctccatggacaatagcaacaagtataccaagagccgtggccgcgcagccaagaagaaggcagccctgcagacagcccccgaatcagctgacgacagtccctcccagctctccaagtggcctggcagccccacgtcacgcagcagtgatgagctggatgcgtggacggacttccgttcacgcaccaattctaacgccagcacagtcagtggccgcctgtcgcccatcatggcaagcacagagttggatgaagtccaggacgatgatgcgcctctctcgcccatgctctacagcagctcagccagcctgtcaccttcagtaagcaagccgtgcacggtggaactgccacggctgactgatatggcaggcaccatgaatctgaatgatgggctgactgaaaacctcatggacgacctgctggataacatcacgctcccgccatcccagccatcgcccactgggggactcatgcagcggagctctagcttcccgtataccaccaagggctcgggcctgggctccccaaccagctcctttaacagcacggtgttcggaccttcatctctgaactccctacgccagtctcccatgcagaccatccaagagaacaagccagctaccttctcttccatgtcacactatggtaaccagacactccaggacctgctcacttcggactcacttagccacagcgatgtcatgatgacacagtcggaccccttgatgtctcaggccagcaccgctgtgtctgcccagaattcccgccggaacgtgatgcttcgcaatgatccgatgatgtcctttgctgcccagcctaaccagggaagtttggtcaatcagaacttgctccaccaccagcaccaaacccagggcgctcttggtggcagccgtgccttgtcgaattctgtcagcaacatgggcttgagtgagtccagcagccttgggtcagccaaacaccagcagcagtctcctgtcagccagtctatgcaaaccctctcggactctctctcaggctcctccttgtactcaactagtgcaaacctgcccgtcatgggccatgagaagttccccagcgacttggacctggacatgttcaatgggagcttggaatgtgacatggagtccattatccgtagtgaactcatggatgctgatgggttggattttaactttgattccctcatctccacacagaatgttgttggtttgaacgtggggaacttcactggtgctaagcaggcctcatctcagagctgggtgccaggctgaaggatcactgaggaaggggaagtgggcaaagcagaccctcaaactgacacaagacctacagagaaaaccctttgccaaatctgctctcagcaagtggacagtgataccgtttacagcttaacacctttgtgaatcccacgccattttcctaacccagcagagactgttaatggccccttaccctgggtgaagcacttacccttggaacagaactctaaaaagtatgcaaaatcttccttgtacagggtggtgagccgcctgccagtggaggacagcacccctcagcaccacccaccctcattcagagcacaccgtgagcccccgtcggccattctgtggtgttttaatattgcgatggtttatgggacgttttaagtgttgttcttgtgtttgttttcctttgactttctgagtttttcacatgcattaacttgcggtatttttctgttaaaatgttaaccgtccttcccctagcaaatttaaaaacagaaagaaaatgttgtaccagttaccattccgggttcgagcatcacaagcttttgagcgcatggaactccataaactaacaaattacataaactaaagggggattttctttcttcttttgtttggtagaaaattatccttttctaaaaactgaacaatggcacaattgtttgctatgtgcacccgtccaggacagaaccgtgcataggcaaaaggagtggagcacagcgtccggcccagtgtgtttccggttctgagtcagggtgatctgtggacgggaccccagcaccaagtctacgggtgccagatcagtagggcctgtgatttcctgtcagtgtcctcagctaatgtgaacagtgttggtctgctggttagaaactagaatattgatattttcaggaaagaaatcagctcagctctccactcattgccaaatgtcactaaagggtttagttttaaggagaaagaaaaggaaaaaaaaaaaaaacaaaaaagtcctgttttgctttgcagaacaaatgaacttacaggtgagcattaagcttgcagtgagaaatgtgcgaagagtaaaaacccaagtcaatgctgaggcagttctaacttcactgttttcctaaatacacatccttgattattttcagccttgctatataatctgatctgctagaagtgtatgagtgagaggcaatagcatacaaactgattttttaaatataagcttaggttgtaattgtacaagtgactcaatggaagtacaaaatagggcagttttaacttttttttctgcttctatggatttcattttgttgtgttttcaaaaagttatggtgctgtataggtgctttctgtttaacctggaaagtgtgattatattcgttaccttctttggtagacggaatagttgggaccacctttggtacataagaaattggtataacgatgctctgattagcacagtatatgcatacttctccaaagtgatatatgaagactcttttctttgcataaaaagcattaggcatataaatgtataaatatattttatcatgtacagtacaaaaatggaaccttatgcatgggccttaggaatacaggctagtatttcagcacagacttccctgcttgagttcttgctgatgcttgcaccgtgacagtgggcaccaacacagacgtgccacccaaccccctgcacacaccaccggccaccaggggcccccttgtgcgccttggctttataactcctctgggggtgatattggtggtgatcacagctcctagcataatgagagttccatttggtattgtcacacgtctcctgcctcgcttgggttgccatgtttgagcgatggccctgttgatttcaccctgccttttactgaatctgtaaattgttgtgcaattgtggttatagtagactgtagcacattgccttttctaaactgctacatgtttataatcttcatttttaaagtatgtgtaatttttttaagtatgtattctattcatatggtctgcttgtcagtgagccagacttgcttactatattcctttataataatgctagccacttcctggattctttagtaatgtgctgtatgcaagaactttccagtagcagtgaaggagggttgcctctccaagcttcctaagggatgctgccctgtgtggggatgcattgcagaggcactagtagcatgggggctagagtggggagcgagatgtaaaagggtggggggataggagaattccagagtgcttccagcattagggtcctgagaacttctgagttcagagaaacatgcaaagtgactaacaaaatagctacttacctttgcagttttacagaccctgggagctgctttgggagtgagaaaggcaaccctccaatgtgtttcaactttaaaatgttgaattcttttcagacatggtatctcatttattctccttttctagcgtttgttgaatttcaggcagaatgtcttacagaatgtcctagaaccagattatcatttaatctgaaacagctgaggaagggacagagaaggtacaagggcaaggcagcacaaaacagatcaggagaatgaagagggaatgctttggttttttgttttgttttgttttttctttttcaagtaactaaaacagcatctacatgtagagtgttgtggagagctgagaccagggtaaagtcaagtgcagcatcagtactgcgagacccaccagcccctggagagggtcagccgagaatctggtagtgaagcctgtctagggtcccggcaccctcaccctcagccacctgcagagaggccagggccccagagactagcctggttctgaagtgggcaggggtgctgccagagccctctgccccttatgttgagaccctgctttcaggacaggccagccgttggccaccatgtcacattctgagtgagtgtcacaggtccctaacaataattttctgatctggagcatatcagcagaatgcttagcctcaaggggcctggcagctgtaatgtttgatttatgatgagaactatccgaggccacccttggcctctaaataagctgctctagggagccgcctactttttgatgagaaattagaagagtacctaatgttgaaaacatgacatgcgctcttgggatctgctgttctctccagggctccagaacctgatacctgttaccaaagctaggaaagagctttatcacaagccttcactgtcctggcatgagaactggctgccaggctcagtgtaccccattaactgtgaatgaatctgagcttggtttcctttattgcttcctctgcaatatgattgctgaaacacattttaaaaattcagaagcttgtcactcctgttaatgggaggatcagtcacacatgtgtagtacaaggcggactttgtgtttgtttttggtgttaatttttagcattgtgtgtgttgcttccccaccctgaggagaggacaccatggcttactactcaggacaagtatgccccgctcagggtgtgatttcaggtggcttccaaacttgtacgcagtttaaagatggtggggacagactttgcctctacctagtgaaccccacttaaagaataaggagcatttgaatctcttggaaaaggccatgaagaataaagcagtcaaaaagaagtcctccatgttggtgccaaggacttgcgaggggaaataaaaatgttatccagcctgaccaacatggagaaaccccgtctccattaaaaatacaaaattagcctggcatggtggcgcatgcctgtaatcccagctactctggaggctgaggcaggagaatcgcttgaacccaggaggcggaggtcgcagtgagccgagatcatgccagtgcactccagcctgggtaacaagagtgaaactccgtgtcaaaaaaaaaaaaaaaatgttactcatcctctctgaaagcaaaaaggaaaccctaacagctctgaactctggttttatttttcttgctgtatttgggtgaacattgtatgattaggcataatgttaaaaaaaaaaatttttttttggtagaaatgcaatcaccagtaaagaggtacgaaaaagctagcctctctcagagaccggggaggcagagtactactagaggaagtgaagttctgatggaatcatgcctgtcaaatgaggtcttgaagcggatgcccaaataaaagagtatattttatctaaatcttaagtgggtaacattttatgcagtttaaatgaatggaatattttcctcttgtttagttgtatctgtttgtatttttctttgatgaatgattggtcatgaggcctcttgccacactccagaaatacgtgtgcggctgcttttaagaactatgtgtctggtcacttatttctctaaaattatctcattgcctggcaatcagtcttctcttgtatacttgtcctagcacattatgtacatgggaaatgtaaacaaatgtgaaggaggaccagaaaaattagttaatatttaaaaaaatgtattgtgcattttggcttcacatgtttaactttttttaagaaaaaagttgcatgaatggaaaaaaaaatctgtatacagtatctgtaaaaactatcttatctgtttcaattccttgctcatatcccatataatctagaactaaatatggtgtgtggccatatttaaacacctgagagtcaagcagttgagactttgatttgaagcacctcatccttctttcaatgcgaacactatcatatggcattcttactgaggattttgtctaaccatatgttgccatgaattaactctgccgcctttcttaaggatcaaaaccagtttgatttgggaatcttcccctttccaaatgaaatagagatgcagtacttaactttccttggtgtttgtagatattgccttgtgtattccacttaaaaccgtaatctagtttgtaaaagagatggtgacgcatgtaaataaagcatcagtgacactctatctta

SEQ ID NO: 1751 - DNA, 7341 bp, Homo sapiens
  source 1..7341: mol_type = genomic DNA
gcgcgaggccgtcgattcgctcgcggctccatcgcggcctggccggggggcggtgtctgctgcgccaggttcgctggccgcacgtcttcaggtcctcctgttcctgggaggcgggcgcggcaggactgggaggtggcggcagcgggcgaggactcgccgaggacggggctccggcccgggataaccaactctccttctctcttctttggtgcttccccaggcggcggcggcggcgcccgggagccggagccttcgcggcgtccacgtccctcccccgctgcaccccgccccggcgcgagaggagagcgcgagagccccagccgcgggcgggcgggcggcgaagatggcagaggcaccggcttccccggccccgctctctccgctcgaagtggagctggacccggagttcgagccccagagccgtccgcgatcctgtacgtggcccctgcaaaggccggagctccaagcgagccctgccaagccctcgggggagacggccgccgactccatgatccccgaggaggaggacgatgaagacgacgaggacggcgggggacgggccggctcggccatggcgatcggcggcggcggcgggagcggcacgctgggctccgggctgctccttgaggactcggcccgggtgctggcacccggagggcaagaccccgggtctgggccagccaccgcggcgggcgggctgagcgggggtacacaggcgctgctgcagcctcagcaaccgctgccaccgccgcagccgggggcggctgggggctccgggcagccgaggaaatgttcgtcgcggcggaacgcctggggaaacctgtcctacgcggacctgatcacccgcgccatcgagagctccccggacaaacggctcactctgtcccagatctacgagtggatggtgcgttgcgtgccctacttcaaggataagggcgacagcaacagctctgccggctggaagaactccatccggcacaacctgtcactgcatagtcgattcatgcgggtccagaatgagggaactggcaagagctcttggtggatcatcaaccctgatggggggaagagcggaaaagccccccggcggcgggctgtctccatggacaatagcaacaagtataccaagagccgtggccgcgcagccaagaagaaggcagccctgcagacagcccccgaatcagctgacgacagtccctcccagctctccaagtggcctggcagccccacgtcacgcagcagtgatgagctggatgcgtggacggacttccgttcacgcaccaattctaacgccagcacagtcagtggccgcctgtcgcccatcatggcaagcacagagttggatgaagtccaggacgatgatgcgcctctctcgcccatgctctacagcagctcagccagcctgtcaccttcagtaagcaagccgtgcacggtggaactgccacggctgactgatatggcaggcaccatgaatctgaatgatgggctgactgaaaacctcatggacgacctgctggataacatcacgctcccgccatcccagccatcgcccactgggggactcatgcagcggagctctagcttcccgtataccaccaagggctcgggcctgggctccccaaccagctcctttaacagcacggtgttcggaccttcatctctgaactccctacgccagtctcccatgcagaccatccaagagaacaagccagctaccttctcttccatgtcacactatggtaaccagacactccaggacctgctcacttcggactcacttagccacagcgatgtcatgatgacacagtcggaccccttgatgtctcaggccagcaccgctgtgtctgcccagaattcccgccggaacgtgatgcttcgcaatgatccgatgatgtcctttgctgcccagcctaaccagggaagtttggtcaatcagaacttgctccaccaccagcaccaaacccagggcgctcttggtggcagccgtgccttgtcgaattctgtcagcaacatgggcttgagtgagtccagcagccttgggtcagccaaacaccagcagcagtctcctgtcagccagtctatgcaaaccctctcggactctctctcaggctcctccttgtactcaactagtgcaaacctgcccgtcatgggccatgagaagttccccagcgacttggacctggacatgttcaatgggagcttggaatgtgacatggagtccattatccgtagtgaactcatggatgctgatgggttggattttaactttgattccctcatctccacacagaatgttgttggtttgaacgtggggaacttcactggtgctaagcaggcctcatctcagagctgggtgccaggctgaaggatcactgaggaaggggaagtgggcaaagcagaccctcaaactgacacaagacctacagagaaaaccctttgccaaatctgctctcagcaagtggacagtgataccgtttacagcttaacacctttgtgaatcccacgccattttcctaacccagcagagactgttaatggccccttaccctgggtgaagcacttacccttggaacagaactctaaaaagtatgcaaaatcttccttgtacagggtggtgagccgcctgccagtggaggacagcacccctcagcaccacccaccctcattcagagcacaccgtgagcccccgtcggccattctgtggtgttttaatattgcgatggtttatgggacgttttaagtgttgttcttgtgtttgttttcctttgactttctgagtttttcacatgcattaacttgcggtatttttctgttaaaatgttaaccgtccttcccctagcaaatttaaaaacagaaagaaaatgttgtaccagttaccattccgggttcgagcatcacaagcttttgagcgcatggaactccataaactaacaaattacataaactaaagggggattttctttcttcttttgtttggtagaaaattatccttttctaaaaactgaacaatggcacaattgtttgctatgtgcacccgtccaggacagaaccgtgcataggcaaaaggagtggagcacagcgtccggcccagtgtgtttccggttctgagtcagggtgatctgtggacgggaccccagcaccaagtctacgggtgccagatcagtagggcctgtgatttcctgtcagtgtcctcagctaatgtgaacagtgttggtctgctggttagaaactagaatattgatattttcaggaaagaaatcagctcagctctccactcattgccaaatgtcactaaagggtttagttttaaggagaaagaaaaggaaaaaaaaaaaaaacaaaaaagtcctgttttgctttgcagaacaaatgaacttacaggtgagcattaagcttgcagtgagaaatgtgcgaagagtaaaaacccaagtcaatgctgaggcagttctaacttcactgttttcctaaatacacatccttgattattttcagccttgctatataatctgatctgctagaagtgtatgagtgagaggcaatagcatacaaactgattttttaaatataagcttaggttgtaattgtacaagtgactcaatggaagtacaaaatagggcagttttaacttttttttctgcttctatggatttcattttgttgtgttttcaaaaagttatggtgctgtataggtgctttctgtttaacctggaaagtgtgattatattcgttaccttctttggtagacggaatagttgggaccacctttggtacataagaaattggtataacgatgctctgattagcacagtatatgcatacttctccaaagtgatatatgaagactcttttctttgcataaaaagcattaggcatataaatgtataaatatattttatcatgtacagtacaaaaatggaaccttatgcatgggccttaggaatacaggctagtatttcagcacagacttccctgcttgagttcttgctgatgcttgcaccgtgacagtgggcaccaacacagacgtgccacccaaccccctgcacacaccaccggccaccaggggcccccttgtgcgccttggctttataactcctctgggggtgatattggtggtgatcacagctcctagcataatgagagttccatttggtattgtcacacgtctcctgcctcgcttgggttgccatgtttgagcgatggccctgttgatttcaccctgccttttactgaatctgtaaattgttgtgcaattgtggttatagtagactgtagcacattgccttttctaaactgctacatgtttataatcttcatttttaaagtatgtgtaatttttttaagtatgtattctattcatatggtctgcttgtcagtgagccagacttgcttactatattcctttataataatgctagccacttcctggattctttagtaatgtgctgtatgcaagaactttccagtagcagtgaaggagggttgcctctccaagcttcctaagggatgctgccctgtgtggggatgcattgcagaggcactagtagcatgggggctagagtggggagcgagatgtaaaagggtggggggataggagaattccagagtgcttccagcattagggtcctgagaacttctgagttcagagaaacatgcaaagtgactaacaaaatagctacttacctttgcagttttacagaccctgggagctgctttgggagtgagaaaggcaaccctccaatgtgtttcaactttaaaatgttgaattcttttcagacatggtatctcatttattctccttttctagcgtttgttgaatttcaggcagaatgtcttacagaatgtcctagaaccagattatcatttaatctgaaacagctgaggaagggacagagaaggtacaagggcaaggcagcacaaaacagatcaggagaatgaagagggaatgctttggttttttgttttgttttgttttttctttttcaagtaactaaaacagcatctacatgtagagtgttgtggagagctgagaccagggtaaagtcaagtgcagcatcagtactgcgagacccaccagcccctggagagggtcagccgagaatctggtagtgaagcctgtctagggtcccggcaccctcaccctcagccacctgcagagaggccagggccccagagactagcctggttctgaagtgggcaggggtgctgccagagccctctgccccttatgttgagaccctgctttcaggacaggccagccgttggccaccatgtcacattctgagtgagtgtcacaggtccctaacaataattttctgatctggagcatatcagcagaatgcttagcctcaaggggcctggcagctgtaatgtttgatttatgatgagaactatccgaggccacccttggcctctaaataagctgctctagggagccgcctactttttgatgagaaattagaagagtacctaatgttgaaaacatgacatgcgctcttgggatctgctgttctctccagggctccagaacctgatacctgttaccaaagctaggaaagagctttatcacaagccttcactgtcctggcatgagaactggctgccaggctcagtgtaccccattaactgtgaatgaatctgagcttggtttcctttattgcttcctctgcaatatgattgctgaaacacattttaaaaattcagaagcttgtcactcctgttaatgggaggatcagtcacacatgtgtagtacaaggcggactttgtgtttgtttttggtgttaatttttagcattgtgtgtgttgcttccccaccctgaggagaggacaccatggcttactactcaggacaagtatgccccgctcagggtgtgatttcaggtggcttccaaacttgtacgcagtttaaagatggtggggacagactttgcctctacctagtgaaccccacttaaagaataaggagcatttgaatctcttggaaaaggccatgaagaataaagcagtcaaaaagaagtcctccatgttggtgccaaggacttgcgaggggaaataaaaatgttatccagcctgaccaacatggagaaaccccgtctccattaaaaatacaaaattagcctggcatggtggcgcatgcctgtaatcccagctactctggaggctgaggcaggagaatcgcttgaacccaggaggcggaggtcgcagtgagccgagatcatgccagtgcactccagcctgggtaacaagagtgaaactccgtgtcaaaaaaaaaaaaaaaatgttactcatcctctctgaaagcaaaaaggaaaccctaacagctctgaactctggttttatttttcttgctgtatttgggtgaacattgtatgattaggcataatgttaaaaaaaaaaatttttttttggtagaaatgcaatcaccagtaaagaggtacgaaaaagctagcctctctcagagaccggggaggcagagtactactagaggaagtgaagttctgatggaatcatgcctgtcaaatgaggtcttgaagcggatgcccaaataaaagagtatattttatctaaatcttaagtgggtaacattttatgcagtttaaatgaatggaatattttcctcttgtttagttgtatctgtttgtatttttctttgatgaatgattggtcatgaggcctcttgccacactccagaaatacgtgtgcggctgcttttaagaactatgtgtctggtcacttatttctctaaaattatctcattgcctggcaatcagtcttctcttgtatacttgtcctagcacattatgtacatgggaaatgtaaacaaatgtgaaggaggaccagaaaaattagttaatatttaaaaaaatgtattgtgcattttggcttcacatgtttaactttttttaagaaaaaagttgcatgaatggaaaaaaaaatctgtatacagtatctgtaaaaactatcttatctgtttcaattccttgctcatatcccatataatctagaactaaatatggtgtgtggccatatttaaacacctgagagtcaagcagttgagactttgatttgaagcacctcatccttctttcaatgcgaacactatcatatggcattcttactgaggattttgtctaaccatatgttgccatgaattaactctgccgcctttcttaaggatcaaaaccagtttgatttgggaatcttcccctttccaaatgaaatagagatgcagtacttaactttccttggtgtttgtagatattgccttgtgtattccacttaaaaccgtaatctagtttgtaaaagagatggtgacgcatgtaaataaagcatcagtgacactct

SEQ ID NO: 1752 - DNA, 1619 bp, Homo sapiens
  source 1..1619: mol_type = genomic DNA
gatgtctctgaagaaaccaatgccttcttcagatccttatgggaaatttaggggacttttggattacacagtgttgccttttgctgattctaagatagagccttccaattaactccatccggcacaacctgtcactgcatagtcgattcatgcgggtccagaatgagggaactggcaagagctcttggtggatcatcaaccctgatggggggaagagcggaaaagccccccggcggcgggctgtctccatggacaatagcaacaagtataccaagagccgtggccgcgcagccaagaagaaggcagccctgcagacagcccccgaatcagctgacgacagtccctcccagctctccaagtggcctggcagccccacgtcacgcagcagtgatgagctggatgcgtggacggacttccgttcacgcaccaattctaacgccagcacagtcagtggccgcctgtcgcccatcatggcaagcacagagttggatgaagtccaggacgatgatgcgcctctctcgcccatgctctacagcagctcagccagcctgtcaccttcagtaagcaagccgtgcacggtggaactgccacggctgactgatatggcaggcaccatgaatctgaatgatgggctgactgaaaacctcatggacgacctgctggataacatcacgctcccgccatcccagccatcgcccactgggggactcatgcagcggagctctagcttcccgtataccaccaagggctcgggcctgggctccccaaccagctcctttaacagcacggtgttcggaccttcatctctgaactccctacgccagtctcccatgcagaccatccaagagaacaagccagctaccttctcttccatgtcacactatggtaaccagacactccaggacctgctcacttcggactcacttagccacagcgatgtcatgatgacacagtcggaccccttgatgtctcaggccagcaccgctgtgtctgcccagaattcccgccggaacgtgatgcttcgcaatgatccgatgatgtcctttgctgcccagcctaaccagggaagtttggtcaatcagaacttgctccaccaccagcaccaaacccagggcgctcttggtggcagccgtgccttgtcgaattctgtcagcaacatgggcttgagtgagtccagcagccttgggtcagccaaacaccagcagcagtctcctgtcagccagtctatgcaaaccctctcggactctctctcaggctcctccttgtactcaactagtgcaaacctgcccgtcatgggccatgagaagttccccagcgacttggacctggacatgtcaatgggagcttggaatgtgacatggagtccattatccgtagtgaactcatggatgctgatgggttggattttaactttgattccctcatctccacacagaatgttgttggtttgaacgtggggaacttcactggtgctaagcaggcctcatctcagagctgggtgccaggctgaaggatcactgaggaaggggaagtgggcaaagcagaccctcaaactgacacaagacctacagagaaaaccctttgccaaatctgctctcagcaagtggacagtgataccg

SEQ ID NO: 1753 - DNA, 2553 bp, Homo sapiens
  source 1..2553: mol_type = genomic DNA
gagtggacagtctccacaaggtaaacatggtttggaagggctgaagcggacgtagggtacaaaatttaagaaattaccagttacttctgactggcacggcacctctgaaatacttttttaaagtttgaaatcctttcctggaaggggccgccctggaaccttttggcttaaagtatatgatgctcggaaaacaaactccatccggcacaacctgtcactgcatagtcgattcatgcgggtccagaatgagggaactggcaagagctcttggtggatcatcaaccctgatggggggaagagcggaaaagccccccggcggcgggctgtctccatggacaatagcaacaagtataccaagagccgtggccgcgcagccaagaagaaggcagccctgcagacagcccccgaatcagctgacgacagtccctcccagctctccaagtggcctggcagccccacgtcacgcagcagtgatgagctggatgcgtggacggacttccgttcacgcaccaattctaacgccagcacagtcagtggccgcctgtcgcccatcatggcaagcacagagttggatgaagtccaggacgatgatgcgcctctctcgcccatgctctacagcagctcagccagcctgtcaccttcagtaagcaagccgtgcacggtggaactgccacggctgactgatatggcaggcaccatgaatctgaatgatgggctgactgaaaacctcatggacgacctgctggataacatcacgctcccgccatcccagccatcgcccactgggggactcatgcagcggagctctagcttcccgtataccaccaagggctcgggcctgggctccccaaccagctcctttaacagcacggtgttcggaccttcatctctgaactccctacgccagtctcccatgcagaccatccaagagaacaagccagctaccttctcttccatgtcacactatggtaaccagacactccaggacctgctcacttcggactcacttagccacagcgatgtcatgatgacacagtcggaccccttgatgtctcaggccagcaccgctgtgtctgcccagaattcccgccggaacgtgatgcttcgcaatgatccgatgatgtcctttgctgcccagcctaaccagggaagtttggtcaatcagaacttgctccaccaccagcaccaaacccagggcgctcttggtggcagccgtgccttgtcgaattctgtcagcaacatgggcttgagtgagtccagcagccttgggtcagccaaacaccagcagcagtctcctgtcagccagtctatgcaaaccctctcggactctctctcaggctcctccttgtactcaactagtgcaaacctgcccgtcatgggccatgagaagttccccagcgacttggacctggacatgttcaatgggagcttggaatgtgacatggagtccattatccgtagtgaactcatggatgctgatgggttggattttaactttgattccctcatctccacacagaatgttgttggtttgaacgtggggaacttcactggtgctaagcaggcctcatctcagagctgggtgccaggctgaaggatcactgaggaaggggaagtgggcaaagcagaccctcaaactgacacaagacctacagagaaaaccctttgccaaatctgctctcagcaagtggacagtgataccgtttacagcttaacacctttgtgaatcccacgccattttcctaacccagcagagactgttaatggccccttaccctgggtgaagcacttacccttggaacagaactctaaaaagtatgcaaaatcttccttgtacagggtggtgagccgcctgccagtggaggacagcacccctcagcaccacccaccctcattcagagcacaccgtgagcccccgtcggccattctgtggtgttttaatattgcgatggtttatgggacgttttaagtgttgttcttgtgtttgttttcctttgactttctgagtttttcacatgcattaacttgcggtatttttctgttaaaatgttaaccgtccttcccctagcaaatttaaaaacagaaagaaaatgttgtaccagttaccattccgggttcgagcatcacaagcttttgagcgcatggaactccataaactaacaaattacataaactaaagggggattttctttcttcttttgtttggtagaaaattatccttttctaaaaactgaacaatggcacaattgtttgctatgtgcacccgtccaggacagaaccgtgcataggcaaaaggagtggagcacagcgtccggcccagtgtgtttccggttctgagtcagggtgatctgtggacgggaccccagcaccaagtctacgggtgccagatcagtagggcctgtgatttcctgtcagtgtcctcagctaatgtgaacagtgttggtctgctggttagaaactagaatattgatattttcaggaaagaaatcagctcagctctccactcattgccaaatgtcactaaagggtttagttttaaggagaaagaaaagg

SEQ ID NO: 1754 - DNA, 444 bp, Homo sapiens
  source 1..444: mol_type = genomic DNA
atgtcgttcagatttggccaacatctcatcaagccctctgtagtgtttctcaaaacagaactgtccttcgctcttgtgaataggaaacctgtggtaccaggacatgtccttgtgtgcccgctgcggccagtggagcgcttccatgacctgcgtcctgatgaagtggccgatttgtttcagacgacccagagagtcgggacagtggtggaaaaacatttccatgggacctctctcaccttttccatgcaggatggccccgaagccggacagactgtgaagcacgttcacgtccatgttcttcccaggaaggctggagactttcacaggaatgacagcatctatgaggagctccagaaacatgacaaggaggactttcctgcctcttggagatcagaggaggaaatggcagcagaagccgcagctctgcgggtctactttcagtga

SEQ ID NO: 1755 - DNA, 1634 bp, Homo sapiens
  source 1..1634: mol_type = genomic DNA
gaattgcagtccccgctctgctctgtccggtcacaggactttttgccctctgttcccgggtccctcaggcggccacccagtgggcacactcccaggcggcgctccggccccgcgctccctccctctgcctttcattcccagctgtcaacatcctggaagctttgaagctcaggaaagaagagaaatccactgagaacagtctgtaaaggtccgtagtgctatctacatccagacggtggaagggagagaaagagaaagaaggtatcctaggaatacctgcctgcttagaccctctataaaagctctgtgcatcctgccactgaggactccgaagaggtagcagtcttctgaaagacttcaactgtgaggacatgtcgttcagatttggccaacatctcatcaagccctctgtagtgtttctcaaaacagaactgtccttcgctcttgtgaataggaaacctgtggtaccaggacatgtccttgtgtgcccgctgcggccagtggagcgcttccatgacctgcgtcctgatgaagtggccgatttgtttcagacgacccagagagtcgggacagtggtggaaaaacatttccatgggacctctctcaccttttccatgcaggatggccccgaagccggacagactgtgaagcacgttcacgtccatgttcttcccaggaaggctggagactttcacaggaatgacagcatctatgaggagctccagaaacatgacaaggaggactttcctgcctcttggagatcagaggaggaaatggcagcagaagccgcagctctgcgggtctactttcagtgacacaggtaaagactgcatttcgtcattacccagaccctcccgtgggcctcaggaaagaggctgcactctcagaatggggatgcacaaaaacaccttcaccagcatccttgggtggtggctgcaaaggacaaagagctggaggggagaaaaccctggcccttgagtactgtattcccagcctcccagtctcttccaactctcctgcctcttcactctcttcttccaagccagtgcccccagcccaccaccacctttctccagtctttcctgcggtggtgctcctccagaatccaatgttcacaaagcagaccttctgtcatgcacaacttcttgtttaaaaggtcaaccccaacttaacttaaaggtgtgacatggcccttaggctcaagtctgtctgcaaagccctgtaaaccagctttctctgcctccctaacacgcccccgggcaaactcctctgctttcactgagtggactcttctcttcagttgctatttggtaaattgcccttcatgtttccctttatgttcggctcctaggaagctcaggccacagggaaaagtcaaggcttgatagaattaatctttgtcttaatgatgactaactgttgagagatcataggtttaagactctggtagaaagatagctatagccaatttccttgtcaaaatgcttctactccaaatttttatgcagtgtctaacgagctcatgcctagatctatctggcaatctatattatccctcctagtctcagttcacatagtagactgctggaatgactgagggtgatgtttggcctgtaaacaaaaagtgttaaaga

SEQ ID NO: 1756 - DNA, 1033 bp, Homo sapiens
  source 1..1033: mol_type = genomic DNA
cctctgttcccgggtccctcaggcggccacccagtgggcacactcccaggcggcgctccggccccgcgctccctccctctgcctttcattcccagctgtcaacatcctggaagctttgaagctcaggaaagaagagaaatccactgagaacagtctgtaaaggtccgtagtgctatctacatccagacggtggaagggagagaaagagaaagaaggtatcctaggaatacctgcctgcttagaccctctataaaagctctgtgcatcctgccactgaggactccgaagaggtagcagtcttctgaaagacttcaactgtgaggacatgtcgttcagatttggccaacatctcatcaagccctctgtagtgtttctcaaaacagaactgtccttcgctcttgtgaataggaaacctgtggtaccaggacatgtccttgtgtgcccgctgcggccagtggagcgcttccatgacctgcgtcctgatgaagtggccgatttgtttcagacgacccagagagtcgggacagtggtggaaaaacatttccatgggacctctctcaccttttccatgcaggatggccccgaagccggacagactgtgaagcacgttcacgtccatgttcttcccaggaaggctggagactttcacaggaatgacagcatctatgaggagctccagaaacatgacaaggaggactttcctgcctcttggagatcagaggaggaaatggcagcagaagccgcagctctgcgggtctactttcagtgacacagatcctgaattccagcaaaagagctattgccaaccagtttgaagaccgccccccgcctctccccaagaggaactgaatcagcatgaaaatgcagtttcttcatctcaccatcctgtattcttcaaccagtgatcccccacctcggtcactccaactcccttaaaatacctagacctaaacggctcagacaggcagatttgaggtttccccctgtctccttattcggcagccttatgattaaacttccttctctgctgcaa

SEQ ID NO: 1757 - DNA, 601 bp, Homo sapiens
  source 1..601: mol_type = genomic DNA
cctctgttcccgggtccctcaggcggccacccagtgggcacactcccaggcggcgctccggccccgcgctccctccctctgcctttcattcccagctgtcaacatcctggaagctttgaagctcaggaaagaagagaaatccactgagaacagtctgtaaaggtccgtagtgctatctacatccagacggtggaagggagagaaagagaaagaaggtatcctaggaatacctgcctgcttagaccctctataaaagctctgtgcatcctgccactgaggactccgaagaggtagcagtcttctgaaaggtaccgtgactggatcacatggagccccaggatttttagtacttcaactgtgaggacatgtcgttcagatttggccaacatctcatcaagccctctgtagtgtttctcaaaacagaactgtccttcgctcttgtgaataggaaacctgtggtaccaggacatgtccttgtgtgcccgctgcggccagtggagcgcttccatgacctgcgtcctgatgaagtggccgatttgtttcagacgacccagagagtcgggacagtggtggaaaaacatttccatgggacctctctcac

SEQ ID NO: 1758 - DNA, 1081 bp, Homo sapiens
  source 1..1081: mol_type = genomic DNA
tccccgctctgctctgtccggtcacaggactttttgccctctgttcccgggtccctcaggcggccacccagtgggcacactcccaggcggcgctccggccccgcgctccctccctctgcctttcattcccagctgtcaacatcctggaagctttgaagctcaggaaagaagagaaatccactgagaacagtctgtaaaggtccgtagtgctatctacatccagacggtggaagggagagaaagagaaagaaggtatcctaggaatacctgcctgcttagaccctctataaaagctctgtgcatcctgccactgaggactccgaagaggtagcagtcttctgaaagacttcaactgtgaggacatgtcgttcagatttggccaacatctcatcaagccctctgtagtgtttctcaaaacagaactgtccttcgctcttgtgaataggaaacctgtggtaccaggacatgtccttgtgtgcccgctgcggccagtggagcgcttccatgacctgcgtcctgatgaagtggccgatttgtttcagacgacccagagagtcgggacagtggtggaaaaacatttccatgggacctctctcaccttttccatgcaggatggccccgaagccggacagactgtgaagcacgttcacgtccatgttcttcccaggaaggctggagactttcacaggaatgacagcatctatgaggagctccagaaacatgacaaggaggactttcctgcctcttggagatcagaggaggaaatggcagcagaagccgcagctctgcgggtctactttcagtgacacagatgtttttcagatcctgaattccagcaaaagagctattgccaaccagtttgaagaccgccccccgcctctccccaagaggaactgaatcagcatgaaaatgcagtttcttcatctcaccatcctgtattcttcaaccagtgatcccccacctcggtcactccaactcccttaaaatacctagacctaaacggctcagacaggcagatttgaggtttccccctgtctccttattcggcagccttatgattaaacttccttctctgctgcaa

SEQ ID NO: 1759 - DNA, 3851 bp, Homo sapiens
  source 1..3851: mol_type = genomic DNA
ctctcccaaccgcctcgtcgcactcctcaggctgagagcaccgctgcactcgcggccggcgatgcgggaccccggcgcggccgctccgctttcgtccctgggcctctgtgccctggtgctggcgctgctgggcgcactgtccgcgggcgccggggcgcagccgtaccacggagagaagggcatctccgtgccggaccacggcttctgccagcccatctccatcccgctgtgcacggacatcgcctacaaccagaccatcctgcccaacctgctgggccacacgaaccaagaggacgcgggcctcgaggtgcaccagttctacccgctggtgaaggtgcagtgttctcccgaactccgctttttcttatgctccatgtatgcgcccgtgtgcaccgtgctcgatcaggccatcccgccgtgtcgttctctgtgcgagcgcgcccgccagggctgcgaggcgctcatgaacaagttcggcttccagtggcccgagcggctgcgctgcgagaacttcccggtgcacggtgcgggcgagatctgcgtgggccagaacacgtcggacggctccgggggcccaggcggcggccccactgcctaccctaccgcgccctacctgccggacctgcccttcaccgcgctgcccccgggggcctcagatggcagggggcgtcccgccttccccttctcatgcccccgtcagctcaaggtgcccccgtacctgggctaccgcttcctgggtgagcgcgattgtggcgccccgtgcgaaccgggccgtgccaacggcctgatgtactttaaggaggaggagaggcgcttcgcccgcctctgggtgggcgtgtggtccgtgctgtgctgcgcctcgacgctctttaccgttctcacctacctggtggacatgcggcgcttcagctacccagagcggcccatcatcttcctgtcgggctgctacttcatggtggccgtggcgcacgtggccggcttccttctagaggaccgcgccgtgtgcgtggagcgcttctcggacgatggctaccgcacggtggcgcagggcaccaagaaggagggctgcaccatcctcttcatggtgctctacttcttcggcatggccagctccatctggtgggtcattctgtctctcacttggttcctggcggccggcatgaagtggggccacgaggccatcgaggccaactcgcagtacttccacctggccgcgtgggccgtgcccgccgtcaagaccatcactatcctggccatgggccaggtagacggggacctgctgagcggggtgtgctacgttggcctctccagtgtggacgcgctgcggggcttcgtgctggcgcctctgttcgtctacctcttcataggcacgtccttcttgctggccggcttcgtgtccctcttccgtatccgcaccatcatgaaacacgacggcaccaagaccgagaagctggagaagctcatggtgcgcatcggcgtcttcagcgtgctctacacagtgcccgccaccatcgtcctggcctgctacttctacgagcaggccttccgcgagcactgggagcgcacctggctcctgcagacgtgcaagagctatgccgtgccctgcccgcccggccacttcccgcccatgagccccgacttcaccgtcttcatgatcaagtacctgatgaccatgatcgtcggcatcaccactggcttctggatctggtcgggcaagaccctgcagtcgtggcgccgcttctaccacagacttagccacagcagcaagggggagactgcggtatgagccccggcccctccccacctttcccaccccagccctcttgcaagaggagaggcacggtagggaaaagaactgctgggtgggggcctgtttctgtaactttctccccctctactgagaagtgacctggaagtgagaagttctttgcagatttggggcgaggggtgatttggaaaagaagacctgggtggaaagcggtttggatgaaaagatttcaggcaaagacttgcaggaagatgatgataacggcgatgtgaatcgtcaaaggtacgggccagcttgtgcctaatagaaggttgagaccagcagagactgctgtgagtttctcccggctccgaggctgaacggggactgtgagcgatccccctgctgcagggcgagtggcctgtccagacccctgtgaggccccgggaaaggtacagccctgtctgcggtggctgctttgttggaaagagggagggcctcctgcggtgtgcttgtcaagcagtggtcaaaccataatctcttttcactggggccaaactggagcccagatgggttaatttccagggtcagacattacggtctctcctcccctgccccctcccgcctgtttttcctcccgtactgctttcaggtcttgtaaaataagcatttggaagtcttgggaggcctgcctgctagaatcctaatgtgaggatgcaaaagaaatgatgataacattttgagataaggccaaggagacgtggagtaggtatttttgctactttttcattttctggggaaggcaggaggcagaaagacgggtgttttatttggtctaataccctgaaaagaagtgatgacttgttgcttttcaaaacaggaatgcatttttccccttgtctttgttgtaagagacaaaagaggaaacaaaagtgtctccctgtggaaaggcataactgtgacgaaagcaacttttataggcaaagcagcgcaaatctgaggtttcccgttggttgttaatttggttgagataaacattcctttttaaggaaaagtgaagagcagtgtgctgtcacacaccgttaagccagaggttctgacttcgctaaaggaaatgtaagaggttttgttgtctgttttaaataaatttaattcggaacacatgatccaacagactatgttaaaatattcagggaaatctctcccttcatttactttttcttgctataagcctatatttaggtttcttttctatttttttctcccatttggatcctttgaggtaaaaaaacataatgtcttcagcctcataataaaggaaagttaattaaaaaaaaaaagcaaagagccattttgtcctgttttcttggttccatcaatctgtttattaaacatcatccatatgctgaccctgtctctgtgtggttgggttgggaggcgatcagcagataccatagtgaacgaagaggaaggtttgaaccatgggccccatctttaaagaaagtcattaaaagaaggtaaacttcaaagtgattctggagttctttgaaatgtgctggaagacttaaatttattaatcttaaatcatgtactttttttctgtaatagaactcggattcttttgcatgatggggtaaagcttagcagagaatcatgggagctaacctttatcccacctttgacactaccctccaatcttgcaacactatcctgtttctcagaacagtttttaaatgccaatcatagagggtactgtaaagtgtacaagttactttatatatgtaatgttcacttgagtggaactgctttttacattaaagttaaaatcgatcttgtgtttcttcaaccttcaaaactatctcatctgtcagatttttaaaactccaacacaggttttggcatcttttgtgctgtatcttttaagtgcatgtgaaatttgtaaaatagagataagtacagtatgtatattttgtaaatctcccatttttgtaagaaaatatatattgtatttatacatttttactttggatttttgttttgttggctttaaaggtctaccccactttatcacatgtacagatcacaaataaatttttttaaatac

SEQ ID NO: 1760 - DNA, 1074 bp, Homo sapiens
  source 1..1074: mol_type = genomic DNA
ggccctctgcggccgccgtagctccccggcagaaacccggaagtggaactctgagccattcagcgtttgggtgaagacggaggcgggttctacagagacgtaggctgtcagggagtgtttatttcgcgtccgcttctgtttctccgcgcccctgtgctgccccgactcacatactcgtccagaaccggcctcagcctctccgcgcagaagtttcccggagccatggccgagtactcctacgtgaagtctaccaagctcgtgctcaagggaaccaagacgaagagtaagaagaaaaagagcaaagataagaaaagaaaaagagaagaagatgaagaaacccagcttgatattgttggaatctggtggacagtaacaaactttggtgaaatttcaggaaccatagccattgaaatggataagggaacctatatacatgcactcgacaatggtctttttaccctgggagctccacacaaagaagttgatgagggccctagtcctccagagcagtttacggctgtcaaattatctgattccagaatcgccctgaagtctggctatggaaaatatcttggtataaattcagatggacttgttgttgggcgttcagatgcaattggaccaagagaacaatgggaaccagtctttcaaaatgggaaaatggctttgttggcctcaaatagctgctttattagatgcaatgaagcaggggacatagaagcaaaaagtaaaacagcaggagaagaagaaatgatcaagattagatcctgtgctgaaagagaaaccaagaaaaaagatgacattccagaagaagacaaaggaaatgtaaaacaatgtgaaatcaattatgtaaagaaatttcagagcttccaagaccacaaacttaaaataagtaaagaagacagtaaaattcttaaaaaggctcggaaagatggatttttgcatgagacgcttctggacaggagagccaaattgaaagccgacagatactgcaagtgactgggatttttgtttctgccttatctttctgtgtttttttctgaataaaatattcagaggaaatgcttttacaga

SEQ ID NO: 1761 - DNA, 1797 bp, Homo sapiens
  source 1..1797: mol_type = genomic DNA
acagccgcccagaaattctacccaagctccctcagcaccatgtaccgagcacttcggctcctcgcgcgctcgcgtcccctcgtgcgggctccagccgcagccttagcttcggctcccggcttgggtggcgcggccgtgccctcgttttggcctccgaacgcggctcgaatggcaagccaaaattccttccggatagaatatgatacctttggtgaactaaaggtgccaaatgataagtattatggcgcccagaccgtgagatctacgatgaactttaagattggaggtgtgacagaacgcatgccaaccccagttattaaagcttttggcatcttgaagcgagcggccgctgaagtaaaccaggattatggtcttgatccaaagattgctaatgcaataatgaaggcagcagatgaggtagctgaaggtaaattaaatgatcattttcctctcgtggtatggcagactggatcaggaactcagacaaatatgaatgtaaatgaagtcattagcaatagagcaattgaaatgttaggaggtgaacttggcagcaagatacctgtgcatcccaacgatcatgttaataaaagccagagctcaaatgatacttttcccacagcaatgcacattgctgctgcaatagaagttcatgaagtactgttaccaggactacagaagttacatgatgctcttgatgcaaaatccaaagagtttgcacagatcatcaagattggacgtactcatactcaggatgctgttccacttactcttgggcaggaatttagtggttatgttcaacaagtaaaatatgcaatgacaagaataaaagctgccatgccaagaatctatgagctcgcagctggaggcactgctgttggtacaggtttaaatactagaattggctttgcagaaaaggttgctgcaaaagtggctgcacttacaggcttgccttttgtcactgctccgaataaatttgaagctctggctgctcatgacgctctggttgagctcagtggagccatgaacactactgcctgcagtctgatgaagatagcaaatgatattcgatttttgggttctggtcctcggtcaggtctgggagaattgatcttgcctgaaaatgaaccaggaagcagtatcatgccaggcaaggtgaaccctactcagtgtgaagcaatgaccatggttgcagcccaagtcatggggaaccatgttgctgtcactgtcggaggcagcaatggacattttgagttgaatgttttcaagccaatgatgattaaaaatgtgttacactcagccaggctgctgggggatgcttcagtttcctttacagaaaactgcgtggtgggaatccaggccaatacagaaaggatcaacaagctgatgaatgagtctctaatgttggtgacagctctcaatcctcatatagggtatgacaaggcagcaaagattgctaagacagcacacaaaaatggatcaaccttaaaggaaactgctatcgaacttggctatctcacagcagagcagtttgacgaatgggtaaaacctaaggacatgctgggtccaaagtgatttacataaatttataatgaaaataaacatgtataaaatttaaaaaaacagactcccatttcttaaaaacggataagtttgaaaggaaactgctattgaacttaagcatctctagcagagcaatttgatcagtatataaaaccctaggatgtgctaggtctaagatggattaaacaagtataaaataaaatacatttataaaataaaaaggaaaacagacttaaa

SEQ ID NO: 1762 - DNA, 1580 bp, Homo sapiens
  source 1..1580: mol_type = genomic DNA
tccacgaggctgccggcttaggacccccagctccgacgtaagtccctctcgtgcgccacctccatccgctgcccctctgcccacgggccgggctcaggtgggtaggggtttgaccccttccgctcctctccgccccccatccacgcccacatctctctgcctcctctcctgggctacagtgggccgctctgcctcgctcccgcccgcctgcctcagtctccccagctctctgccacccccctcggaccagtgcctcttaggtctctccagcgcgccatccctgcaaggcggcccctgacaccaactcactttttcctctgagcgcgggaggcgttactcactcttcctccttcccctcctcgccgactcccgggctctgggcccctgggggagggaagaggcctcctatctactcctctgccccagtcccctccttgcgtcagtcccagtgagggataagcgcctggcggaaggcgcagggaggtgtttctctgcttcaggagtgcccgccggcccttgcagctgctggaagacccatttatctcatgcttcttgttttctttggggacctgcaggggaaggaagcagggtgacggtttggtatccccacctaagaccctcccctttcccctgaggccagccgtcagcccctggcagggggtcttggaagccagaggtttttgctcagggcagggaaagggctgcaggatccccgggggctgccggaggtcggtctcactgacatcatggctgaccccagcatcgcctggtcccacagatgtcgccctctggtcgcctgtgtcttctcaccatcgttggcctgattctccccaccagaggacagacgttgaaagataccacgtccagttcttcagcagactcaactatcatggacattcaggtcccgacacgagccccagatgcagtctacacagaactccagcccacctctccaaccccaacctggcctgctgatgaaacaccacaaccccagacccagacccagcaactggaaggaacggatgggcctctagtgacagatccagagacacacaagagcaccaaagcagctcatcccactgatgacaccacgacgctctctgagagaccatccccaagcacagacgtccagacagacccccagaccctcaagccatctggttttcatgaggatgaccccttcttctatgatgaacacaccctccggaaacgggggctgttggtcgcagctgtgctgttcatcacaggcatcatcatcctcaccagtggcaagtgcaggcagctgtcccggttatgccggaatcgttgcaggtgagtccatcagaaacaggagctgacaacctgctgggcacccgaagaccaagccccctgccagctcaccgtgcccagcctcctgcatcccctcgaagagcctggccagagagggaagacacagatgatgaagctggagccagggctgccggtccgagtctcctacctcccccaaccctgcccgcccctgaaggctacctggcgccttgggggctgtccctcaagttatctcctctgctaagacaaaaagtaaagcactgtggtctttg

SEQ ID NO: 1763 - DNA, 632 bp, Homo sapiens
  source 1..632: mol_type = genomic DNA
tgcacaccagctgtgtagatgtgggagaggggtttcttccagatgcagactctcagtaatatcccttgtttctgcctccatggctcactcctgccctccactgatctggccactctctcagctcatcccactgatgacaccacgacgctctctgagagaccatccccaagcacagacgtccagacagacccccagaccctcaagccatctggttttcatgaggatgaccccttcttctatgatgaacacaccctccggaaacgggggctgttggtcgcagctgtgctgttcatcacaggcatcatcatcctcaccagtggcaagtgcaggcagctgtcccggttatgccggaatcgttgcaggtgagtccatcagaaacaggagctgacaacctgctgggcacccgaagaccaagccccctgccagctcaccgtgcccagcctcctgcatcccctcgaagagcctggccagagagggaagacacagatgatgaagctggagccagggctgccggtccgagtctcctacctcccccaaccctgcccgcccctgaaggctacctggcgccttgggggctgtccctcaagttatctcctctgctaagacaaaaagtaaagcactgtggtctttgc

SEQ ID NO: 1764 - DNA, 752 bp, Homo sapiens
  source 1..752: mol_type = genomic DNA
ctggacgcagcagccaccgccgcgtccctctctccacgaggctgccggcttaggacccccagctccgacatgtcgccctctggtcgcctgtgtcttctcaccatcgttggcctgattctccccaccagaggacagacgttgaaagataccacgtccagttcttcagcagactcaactatcatggacattcaggtcccgacacgagccccagatgcagtctacacagaactccagcccacctctccaaccccaacctggcctgctgatggcgcctatatcacagcttatggagtcacacacttcttgatgaacatgttggctgtttccagctttttctgtctacacacagcaccacaatgagcaactttgtcccttcctccttgagcaaacgcacttggaatatgtactgactatgtgctggtcatggttctaaatattttgcgtatgttaactcattcaaccttcacgcaaaccctaagaggcagaaattaccattgtccccattttacagacaaggaaacagaggctgtgagtaactggttcaaggtctcacaacaagtcagggacgcagctggaatcgaagtccaggaatctggcaccagagcctgtgcttttatccaagacaatacagggcaaaggacatgcatgcttaatgttttaaaatttgccctcctgccgcccaggcacagtggctcatgcctgtcatcccagcacttttggaggctgaggcgggtggatcgcttgagcccagg

SEQ ID NO: 1765 - DNA, 872 bp, Homo sapiens
  source 1..872: mol_type = genomic DNA
ggacgcagcagccaccgccgcgtccctctctccacgaggctgccggcttaggacccccagctccgacatgtcgccctctggtcgcctgtgtcttctcaccatcgttggcctgattctccccaccagaggacagacgttgaaagataccacgtccagttcttcagcagactcaactatcatggacattcaggtcccgacacgagccccagatgcagtctacacagaactccagcccacctctccaaccccaacctggcctgctgatgaaacaccacaaccccagacccagacccagcaactggaaggaacggatgggcctctagtgacagatccagagacacacaagagcaccaaagcagctcatcccactgatgacaccacgacgctctctgagagaccatccccaagcacagacgtccagacagacccccagaccctcaagccatctggttttcatgaggatgaccccttcttctatgatgaacacaccctccggaaacgggggctgttggtcgcagctgtgctgttcatcacaggcatcatcatcctcaccagtggcaagtgcaggcagctgtcccggttatgccggaatcgttgcaggtgagtccatcagaaacaggagctgacaacctgctgggcacccgaagaccaagccccctgccagctcaccgtgcccagcctcctgcatcccctcgaagagcctggccagagagggaagacacagatgatgaagctggagccagggctgccggtccgagtctcctacctcccccaaccctgcccgcccctgaaggctacctggcgccttgggggctgtccctcaagttatctcctctgctaagacaaaaagtaaagcactgtggtctttgccc

SEQ ID NO: 1766 - DNA, 897 bp, Homo sapiens
  source 1..897: mol_type = genomic DNA
tgggctacagtgggccgctctgcctcgctcccgcccgcctgcctcagtctccccagctctctgccacccccctcggaccagtgcctcttagatgtcgccctctggtcgcctgtgtcttctcaccatcgttggcctgattctccccaccagaggacagacgttgaaagataccacgtccagttcttcagcagactcaactatcatggacattcaggtcccgacacgagccccagatgcagtctacacagaactccagcccacctctccaaccccaacctggcctgctgatgaaacaccacaaccccagacccagacccagcaactggaaggaacggatgggcctctagtgacagatccagagacacacaagagcaccaaagcagctcatcccactgatgacaccacgacgctctctgagagaccatccccaagcacagacgtccagacagacccccagaccctcaagccatctggttttcatgaggatgaccccttcttctatgatgaacacaccctccggaaacgggggctgttggtcgcagctgtgctgttcatcacaggcatcatcatcctcaccagtggcaagtgcaggcagctgtcccggttatgccggaatcgttgcaggtgagtccatcagaaacaggagctgacaacctgctgggcacccgaagaccaagccccctgccagctcaccgtgcccagcctcctgcatcccctcgaagagcctggccagagagggaagacacagatgatgaagctggagccagggctgccggtccgagtctcctacctcccccaaccctgcccgcccctgaaggctacctggcgccttgggggctgtccctcaagttatctcctctgctaagacaaaaagtaaagcactgtggtctttgcccc

SEQ ID NO: 1767 - DNA, 907 bp, Homo sapiens
  source 1..907: mol_type = genomic DNA
tctctccacgaggctgccggcttaggacccccagctccgacgtaagtccctctcgtgcgccacctccatccgctgcccctctgcccacgggccgggctcagatgtcgccctctggtcgcctgtgtcttctcaccatcgttggcctgattctccccaccagaggacagacgttgaaagataccacgtccagttcttcagcagactcaactatcatggacattcaggtcccgacacgagccccagatgcagtctacacagaactccagcccacctctccaaccccaacctggcctgctgatgaaacaccacaaccccagacccagacccagcaactggaaggaacggatgggcctctagtgacagatccagagacacacaagagcaccaaagcagctcatcccactgatgacaccacgacgctctctgagagaccatccccaagcacagacgtccagacagacccccagaccctcaagccatctggttttcatgaggatgaccccttcttctatgatgaacacaccctccggaaacgggggctgttggtcgcagctgtgctgttcatcacaggcatcatcatcctcaccagtggcaagtgcaggcagctgtcccggttatgccggaatcgttgcaggtgagtccatcagaaacaggagctgacaacctgctgggcacccgaagaccaagccccctgccagctcaccgtgcccagcctcctgcatcccctcgaagagcctggccagagagggaagacacagatgatgaagctggagccagggctgccggtccgagtctcctacctcccccaaccctgcccgcccctgaaggctacctggcgccttgggggctgtccctcaagttatctcctctgctaagacaaaaagtaaagcactgtggtctttgcccc

SEQ ID NO: 1768 - DNA, 1003 bp, Homo sapiens
  source 1..1003: mol_type = genomic DNA
acaccctccgcctggacgcagcagccaccgccgcgtccctctctccacgaggctgccggcttaggacccccagctccgacatgtcgccctctggtcgcctgtgtcttctcaccatcgttggcctgattctccccaccagaggacagacgttgaaagataccacgtccagttcttcagcagactcaactatcatggacattcaggtcccgacacgagccccagatgcagtctacacagaactccagcccacctctccaaccccaacctggcctgctgatgaaacaccacaaccccagacccagacccagcaactggaaggaacggatgggcctctagtgacagatccagagacacacaagagcaccaaagcagctcatcccactgatgacaccacgacgctctctgagagaccatccccaagcacagacgtccagacagacccccagaccctcaagccatctggttttcatgaggatgaccccttcttctatgatgaacacaccctccggaaacgggggctgttggtcgcagctgtgctgttcatcacaggcatcatcatcctcaccagtgagaactggggttgggtgggaaggacaccaagaccaggagggggacttatgacggagggctgggttctcaaaggtccctgggcaattttgttttaaatgaggtatctattagctgcatatacatacaaaccaccacagaattcagtggtttaaaataatgaccatttattgagctctcaataccacagtttggaaacataggctgggctcagctgggtgattcttctggtctcaactggatttactcttgcatctgagttcagttgtgggtcagcaggaaactttgtttctggggtgccttggctctttgccacatcatcttatccttcactaagctagcctgggcttgttcgcatggtggtggcagggatctaagatagagtgaatgcatgcaggctcagaactggccattatcacttctgcctcattccata

SEQ ID NO: 1769 - DNA, 2849 bp, Homo sapiens
  source 1..2849: mol_type = genomic DNA
cctggcgaaagcaagacgtggaggttttaccaggggttagtagcttcctcttgctaactttttattgggacaaaaggcaagatggcaccattctgttctcagatatttgtctaaataaagcccttttaattttattttatttttgttgtgggattcttaagcagataagaagaaaagacaccttcctagtgagcagctgcccagctcctgctcagttttgcctcggggtagcacctccagccacagaaagcaagccggtaagtctctccaggtaggacttgctgcaacccagctgctggactgatctgaaacgggactttgcatactctccgaagtatggtgagttggtgctgacttcaaagttgcctggtgaaggaagataaggtggatcgcagagactaaggggagagggagaagccctgctcctcttctccccaccaaggcacaatgagcaacatctgtcagaggctctgggagtacctagaaccctatctcccctgtttgtccacggaggcagacaagtcaaccgtgattgaaaatccaggggccctttgctctccccagtcacagaggcatggccactactttgtggctttgtttgattaccaggctcggactgctgaggacttgagcttccgagcaggtgacaaacttcaagttctggacactttgcatgagggctggtggtttgccagacacttggagaaaagacgagatggctccagtcagcaactacaaggctatattccttctaactacgtggctgaggacagaagcctacaggcagagccgtggttctttggagcaatcggaagatcagatgcagagaaacaactattatattcagaaaacaagaccggttcctttctaatcagagaaagtgaaagccaaaaaggagaattctctctttcagttttagatggagcagttgtaaaacactacagaattaaaagactggatgaagggggattttttctcacgcgaagaagaatcttttcaacactgaacgaatttgtgagccactacaccaagacaagtgacggcctgtgtgtcaagctggggaaaccatgcttaaagatccaggtcccagctccatttgatttgtcgtataaaaccgtggaccaatgggagatagaccgcaactccatacagcttctgaagcgattgggatctggtcagtttggcgaagtatgggaaggtctgtggaacaataccactccagtagcagtgaaaacattaaaaccaggttcaatggatccaaatgacttcctgagggaggcacagataatgaagaacctaagacatccaaagcttatccagctttatgctgtttgcactttagaagatccaatttatattattacagagttgatgagacatggaagtctgcaagaatatctccaaaatgacactggatcaaaaatccatctgactcaacaggtagacatggcggcacaggttgcctctggaatggcctatctggagtctcggaactacattcacagagatctggctgccagaaatgtcctcgttggtgaacataatatctacaaagtagcagattttggacttgccagagtttttaaggtagataatgaagacatctatgaatctagacacgaaataaagctgccggtgaagtggactgcgcccgaagccattcgtagtaataaattcagcattaagtccgatgtatggtcatttggaatccttctttatgaaatcattacttatggcaaaatgccttacagtggtatgacaggtgcccaggtaatccagatgttggctcaaaactatagacttccgcaaccatccaactgtccacagcaattttacaacatcatgttggagtgctggaatgcagagcctaaggaacgacctacatttgagacactgcgttggaaacttgaagactattttgaaacagactcttcatattcagatgcaaataacttcataagatgaacactggagaagaatatcaaataataaagtagcaaaacaaattcaaataatccattccaaaatacaatgttatcaaccaactgcacaatcagtttatcctgacatattcaagtgataggataaagttggccatgtattatgaaaaagattatttgtgcattttattgactgggcaacactgcaggacagtcaaggtgatatataatttcctcactgcctggtaaaattaagcacactaaaccaagttatttttctttttaagagatacttacatttccatttattgtttgaaatgtcgatcaagagaatcaacagatgatagtccaatttttactcagtgactgttgtagcattttcctgtttactgattagagtggttattcattattcctcagattgctgaatcccatcaggctgttattatgaaggaatttgattgctttgctgcacagcaggacctgtgctttgagatttttttttctcttttaaaatatcctgtaactacaatgatggtaaagccatgttaaatgacttgattgtacttggagtaattgcacatttttttctatgcataaaaaaatgatgcagctgttgagaaaacgaagtctttttcattttgcagaaggaaatgatggaatttttctgtacttcagtatgtgtcaactgagagtcatatacattagttttaatctcttaatattgagaatcaggttgcaaaacggatgagttattatctatggaaatgtgagaaatgtctaatagcccataaagtctgagaaataggtatcaaaatagtttaggaaaatgagaggagaacagtaggattgctgtggcctagacttctgagtaattaataaagaaaaagaagtaccctttggcctaca

SEQ ID NO: 1770 - DNA, 1152 bp, Homo sapiens
  source 1..1152: mol_type = genomic DNA
aggtcctgactatgctgacactgagacaatgtggtactccagaaccacatggattcaacttcactactacctaatccatggataagagttttagatggagcagttgtaaaacactacagaattaaaagactggatgaagggggattttttctcacgcgaagaagaatcttttcaacactgaacgaatttgtgagccactacaccaagacaagtgacggcctgtgtgtcaagctggggaaaccatgcttaaagatccaggtcccagctccatttgatttgtcgtataaaaccgtggaccaatgggagatagaccgcaactccatacagcttctgaagcgattgggatctggtcagtttggcgaagtatgggaaggtctgtggaacaataccactccagtagcagtgaaaacattaaaaccaggttcaatggatccaaatgacttcctgagggaggcacagataatgaagaacctaagacatccaaagcttatccagctttatgctgtttgcactttagaagatccaatttatattattacagagttgatgagacatggaagtctgcaagaatatctccaaaatgacactggatcaaaaatccatctgactcaacaggtagacatggcggcacaggttgcctctggaatggcctatctggagtctcggaactacattcacagagatctggctgccagaaatgtcctcgttggtgaacataatatctacaaagtagcagattttggacttgccagagtttttaaggtagataatgaagacatctatgaatctagacacgaaataaagctgccggtgaagtggactgcgcccgaagccattcgtagtaataaattcagcattaagtccgatgtatggtcatttggaatccttctttatgaaatcattacttatggcaaaatgccttacagtggtatgacaggtgcccaggtaatccagatgttggctcaaaactatagacttccgcaaccatccaactgtccacagcaattttacaacatcatgttggagtgctggaatgcagagcctaaggaacgacctacatttgagacactgcgttggaaacttgaagactattttgaaacagactcttcatattcagatgcaaataacttcataagatgaacactggagaag

SEQ ID NO: 1771 - DNA, 2813 bp, Homo sapiens
  source 1..2813: mol_type = genomic DNA
tgcccgacgtgggtggggggggcgtggaatcggagcacaacttggccctgcgttcccaggaagggacccgaagacctccccaggccaccccgccatctgcgtgcgcgctggcaagaggaggggcgcggggtaatggtggccggcgccacagccccgcgccgcgcagggtcttgcccaccaccagcgatgcccagcccttggtagagcttgaaccaccttctataaacaggatggcggtggagagacaggcccagtccctgagcccatgaggagtgtggccccttcaggcccaaagatggggaacatcactgcagacaactcctcgatgagctgtaccatcgaccataccatccaccagacgctggccccggtggtctatgttaccgtgctggtggtgggcttcccggccaactgcctgtccctctacttcggctacctgcagatcaaggcccggaacgagctgggcgtgtacctgtgcaacctgacggtggccgacctcttctacatctgctcgctgcccttctggctgcagtacgtgctgcagcacgacaactggtctcacggcgacctgtcctgccaggtgtgcggcatcctcctgtacgagaacatctacatcagcgtgggcttcctctgctgcatctccgtggaccgctacctggctgtggcccatcccttccgcttccaccagttccggaccctgaaggcggccgtcggcgtcagcgtggtcatctgggccaaggagctgctgaccagcatctacttcctgatgcacgaggaggtcatcgaggacgagaaccagcaccgcgtgtgctttgagcactaccccatccaggcatggcagcgcgccatcaactactaccgcttcctggtgggcttcctcttccccatctgcctgctgctggcgtcctaccagggcatcctgcgcgccgtgcgccggagccacggcacccagaagagccgcaaggaccagatccagcggctggtgctcagcaccgtggtcatcttcctggcctgcttcctgccctaccacgtgttgctgctggtgcgcagcgtctgggaggccagctgcgacttcgccaagggcgttttcaacgcctaccacttctccctcctgctcaccagcttcaactgcgtcgccgaccccgtgctctactgcttcgtcagcgagaccacccaccgggacctggcccgcctccgcggggcctgcctggccttcctcacctgctccaggaccggccgggccagggaggcctacccgctgggtgcccccgaggcctccgggaaaagcggggcccagggtgaggagcccgagctgttgaccaagctccacccggccttccagacccctaactcgccagggtcgggcgggttccccacgggcaggttggcctagcctgggtcctccgcgggtggctccacgtgaggcctgagccttcagcccacgggcctcagggcctgccgcctcctgcttccctcgctgcggaggcagggaagcccctgtaactccggaagcctgctctcgcttgctgagcccgctgggaccgccgagggtgggaataagccccggttggctcgtgggaataagccgtgtcctctgccgcggctgcgatgtggccaggctggggctgctggtcgggggaagacagtgaactgcgttccctggcctgcttcctgcagagtttgtgcatggggagtgtgaggacatggagggtgggaggctgggcgttcagctgccagggccttccaatgccaccgttgtcacagacaatgcctgtccaaacgtcccggtgggatcagcactgcagcccgcccacaacagggtgggaagggaagactggagggggaaggaaggcaggagggggaaggaagaaagagggggaaggaaagaaagaggggggaaggaaaggaggaaggggagaaggaagggaggaggaaagaaggaaggtagggggtgttgggttgggagaattgagggagttataggcagaggaggatcctagctccagccataagaactgggagagccgcctgctgctccagaagacctgcccacctccacagaaatgctagcccttcagaccttctggtcagtgaactgggaccagctctgactaaggatgccttccatggcctgggactcgagttcttcagaaccaagaggctaactgggcttcctccaagaagggaccaggggctagaagcagaagttggcatcagcaaacatttctggaatctaccaaagggaggcccaggcagaaccccttcctcagtctcccttcccctcttccccccagccttgaagaggttgatcctttgtgctgtgtctcttagccctttcatcggggatgcccagaggcaacagcccaggctggaggtgccccagggaagggtgctcacagtggtcccagggctacacttggctttgactgcacagcccctgctcagatccttgtggagggtgtccgatgacttggggaggttctcttccccttcctagaggaggaagtgaccaagtttgaaggcggcagaaatggccacacagccaagaagagcccatgcaactcagtccaggattttactgggtcagtgacattggtggaagccttcatgcctcctcattccacagcacttcctcctatgttgaccttaaacactggcttcccactgatacagactgggatgagctgagggcagtctcatttactgtcaagagttgtatttttgtattgtcctttttgccaagtctacatgtgttgactctgtaatggatttatgtagcccacttcagtctgcaaataaagcaaagtaactgg

SEQ ID NO: 1772 - DNA, 1355 bp, Homo sapiens
  source 1..1355: mol_type = genomic DNA
gctcctcacctggttgcagagaccacactgccttcctggggccctgaggctctaggagaagctggaaagcacaggtgggggtccatccagctgtttccaaactgcgggttgtgacccattcatgggtcagtaaatcaacttcatagctcatgacctgcatttaaaaaattgaaatagaatagaaatgatcagagtgcgtggcaagaagtaggggtcttgcccaccaccagcgatgcccagcccttggtagagcttgaaccaccttctataaacaggatggcggtggagagacaggcccagtccctgagcccatgaggagtgtggccccttcaggcccaaagatggggaacatcactgcagacaactcctcgatgagctgtaccatcgaccataccatccaccagacgctggccccggtggtctatgttaccgtgctggtggtgggcttcccggccaactgcctgtccctctacttcggctacctgcagatcaaggcccggaacgagctgggcgtgtacctgtgcaacctgacggtggccgacctcttctacatctgctcgctgcccttctggctgcagtacgtgctgcagcacgacaactggtctcacggcgacctgtcctgccaggtgtgcggcatcctcctgtacgagaacatctacatcagcgtgggcttcctctgctgcatctccgtggaccgctacctggctgtggcccatcccttccgcttccaccagttccggaccctgaaggcggccgtcggcgtcagcgtggtcatctgggccaaggagctgctgaccagcatctacttcctgatgcacgaggaggtcatcgaggacgagaaccagcaccgcgtgtgctttgagcactaccccatccaggcatggcagcgcgccatcaactactaccgcttcctggtgggcttcctcttccccatctgcctgctgctggcgtcctaccagggcatcctgcgcgccgtgcgccggagccacggcacccagaagagccgcaaggaccagatccagcggctggtgctcagcaccgtggtcatcttcctggcctgcttcctgccctaccacgtgttgctgctggtgcgcagcgtctgggaggccagctgcgacttcgccaagggcgttttcaacgcctaccacttctccctcctgctcaccagcttcaactgcgtcgccgaccccgtgctctactgcttcgtcagcgagaccacccaccgggacctggcccgcctccgcggggcctgcctggccttcctcacctgctccaggaccggccgggccagggaggcctacccgctgggtgcccccgaggcctccgggaaaagcggggcccagggtgaggagccc

SEQ ID NO: 1773 - DNA, 2859 bp, Homo sapiens
  source 1..2859: mol_type = genomic DNA
gtcagcgtgaaaggcagggcatggaccctcactcagggctgcgtgtgcccgacgtgggtggggggggcgtggaatcggagcacaacttggccctgcgttcccaggaagggacccgaagacctccccaggccaccccgccatctgcgtgcgcgctggcaagaggaggggcgcggggtaatggtggccggcgccacagccccgcgccgcgcagggtcttgcccaccaccagcgatgcccagcccttggtagagcttgaaccaccttctataaacaggatggcggtggagagacaggcccagtccctgagcccatgaggagtgtggccccttcaggcccaaagatggggaacatcactgcagacaactcctcgatgagctgtaccatcgaccataccatccaccagacgctggccccggtggtctatgttaccgtgctggtggtgggcttcccggccaactgcctgtccctctacttcggctacctgcagatcaaggcccggaacgagctgggcgtgtacctgtgcaacctgacggtggccgacctcttctacatctgctcgctgcccttctggctgcagtacgtgctgcagcacgacaactggtctcacggcgacctgtcctgccaggtgtgcggcatcctcctgtacgagaacatctacatcagcgtgggcttcctctgctgcatctccgtggaccgctacctggctgtggcccatcccttccgcttccaccagttccggaccctgaaggcggccgtcggcgtcagcgtggtcatctgggccaaggagctgctgaccagcatctacttcctgatgcacgaggaggtcatcgaggacgagaaccagcaccgcgtgtgctttgagcactaccccatccaggcatggcagcgcgccatcaactactaccgcttcctggtgggcttcctcttccccatctgcctgctgctggcgtcctaccagggcatcctgcgcgccgtgcgccggagccacggcacccagaagagccgcaaggaccagatccagcggctggtgctcagcaccgtggtcatcttcctggcctgcttcctgccctaccacgtgttgctgctggtgcgcagcgtctgggaggccagctgcgacttcgccaagggcgttttcaacgcctaccacttctccctcctgctcaccagcttcaactgcgtcgccgaccccgtgctctactgcttcgtcagcgagaccacccaccgggacctggcccgcctccgcggggcctgcctggccttcctcacctgctccaggaccggccgggccagggaggcctacccgctgggtgcccccgaggcctccgggaaaagcggggcccagggtgaggagcccgagctgttgaccaagctccacccggccttccagacccctaactcgccagggtcgggcgggttccccacgggcaggttggcctagcctgggtcctccgcgggtggctccacgtgaggcctgagccttcagcccacgggcctcagggcctgccgcctcctgcttccctcgctgcggaggcagggaagcccctgtaactccggaagcctgctctcgcttgctgagcccgctgggaccgccgagggtgggaataagccccggttggctcgtgggaataagccgtgtcctctgccgcggctgcgatgtggccaggctggggctgctggtcgggggaagacagtgaactgcgttccctggcctgcttcctgcagagtttgtgcatggggagtgtgaggacatggagggtgggaggctgggcgttcagctgccagggccttccaatgccaccgttgtcacagacaatgcctgtccaaacgtcccggtgggatcagcactgcagcccgcccacaacagggtgggaagggaagactggagggggaaggaaggcaggagggggaaggaagaaagagggggaaggaaagaaagaggggggaaggaaaggaggaaggggagaaggaagggaggaggaaagaaggaaggtagggggtgttgggttgggagaattgagggagttataggcagaggaggatcctagctccagccataagaactgggagagccgcctgctgctccagaagacctgcccacctccacagaaatgctagcccttcagaccttctggtcagtgaactgggaccagctctgactaaggatgccttccatggcctgggactcgagttcttcagaaccaagaggctaactgggcttcctccaagaagggaccaggggctagaagcagaagttggcatcagcaaacatttctggaatctaccaaagggaggcccaggcagaaccccttcctcagtctcccttcccctcttccccccagccttgaagaggttgatcctttgtgctgtgtctcttagccctttcatcggggatgcccagaggcaacagcccaggctggaggtgccccagggaagggtgctcacagtggtcccagggctacacttggctttgactgcacagcccctgctcagatccttgtggagggtgtccgatgacttggggaggttctcttccccttcctagaggaggaagtgaccaagtttgaaggcggcagaaatggccacacagccaagaagagcccatgcaactcagtccaggattttactgggtcagtgacattggtggaagccttcatgcctcctcattccacagcacttcctcctatgttgaccttaaacactggcttcccactgatacagactgggatgagctgagggcagtctcatttactgtcaagagttgtatttttgtattgtcctttttgccaagtctacatgtgttgactctgtaatggatttatgtagcccacttcagtctgcaaataaagcaaagtaactgga

SEQ ID NO: 1774 - DNA, 2859 bp, Homo sapiens
  source 1..2859: mol_type = genomic DNA
gctcctcacctggttgcagagaccacactgccttcctggggccctgaggctctaggagaagctggaaagcacaggtgggggtccatccagctgtttccaaactgcgggttgtgacccattcatgggtcagtaaatcaacttcatagctcatgacctgcatttaaaaaattgaaatagaatagaaatgatcagagtgcgtggcaagaagtaggggtcttgcccaccaccagcgatgcccagcccttggtagagcttgaaccaccttctataaacaggatggcggtggagagacaggcccagtccctgagcccatgaggagtgtggccccttcaggcccaaagatggggaacatcactgcagacaactcctcgatgagctgtaccatcgaccataccatccaccagacgctggccccggtggtctatgttaccgtgctggtggtgggcttcccggccaactgcctgtccctctacttcggctacctgcagatcaaggcccggaacgagctgggcgtgtacctgtgcaacctgacggtggccgacctcttctacatctgctcgctgcccttctggctgcagtacgtgctgcagcacgacaactggtctcacggcgacctgtcctgccaggtgtgcggcatcctcctgtacgagaacatctacatcagcgtgggcttcctctgctgcatctccgtggaccgctacctggctgtggcccatcccttccgcttccaccagttccggaccctgaaggcggccgtcggcgtcagcgtggtcatctgggccaaggagctgctgaccagcatctacttcctgatgcacgaggaggtcatcgaggacgagaaccagcaccgcgtgtgctttgagcactaccccatccaggcatggcagcgcgccatcaactactaccgcttcctggtgggcttcctcttccccatctgcctgctgctggcgtcctaccagggcatcctgcgcgccgtgcgccggagccacggcacccagaagagccgcaaggaccagatccagcggctggtgctcagcaccgtggtcatcttcctggcctgcttcctgccctaccacgtgttgctgctggtgcgcagcgtctgggaggccagctgcgacttcgccaagggcgttttcaacgcctaccacttctccctcctgctcaccagcttcaactgcgtcgccgaccccgtgctctactgcttcgtcagcgagaccacccaccgggacctggcccgcctccgcggggcctgcctggccttcctcacctgctccaggaccggccgggccagggaggcctacccgctgggtgcccccgaggcctccgggaaaagcggggcccagggtgaggagcccgagctgttgaccaagctccacccggccttccagacccctaactcgccagggtcgggcgggttccccacgggcaggttggcctagcctgggtcctccgcgggtggctccacgtgaggcctgagccttcagcccacgggcctcagggcctgccgcctcctgcttccctcgctgcggaggcagggaagcccctgtaactccggaagcctgctctcgcttgctgagcccgctgggaccgccgagggtgggaataagccccggttggctcgtgggaataagccgtgtcctctgccgcggctgcgatgtggccaggctggggctgctggtcgggggaagacagtgaactgcgttccctggcctgcttcctgcagagtttgtgcatggggagtgtgaggacatggagggtgggaggctgggcgttcagctgccagggccttccaatgccaccgttgtcacagacaatgcctgtccaaacgtcccggtgggatcagcactgcagcccgcccacaacagggtgggaagggaagactggagggggaaggaaggcaggagggggaaggaagaaagagggggaaggaaagaaagaggggggaaggaaaggaggaaggggagaaggaagggaggaggaaagaaggaaggtagggggtgttgggttgggagaattgagggagttataggcagaggaggatcctagctccagccataagaactgggagagccgcctgctgctccagaagacctgcccacctccacagaaatgctagcccttcagaccttctggtcagtgaactgggaccagctctgactaaggatgccttccatggcctgggactcgagttcttcagaaccaagaggctaactgggcttcctccaagaagggaccaggggctagaagcagaagttggcatcagcaaacatttctggaatctaccaaagggaggcccaggcagaaccccttcctcagtctcccttcccctcttccccccagccttgaagaggttgatcctttgtgctgtgtctcttagccctttcatcggggatgcccagaggcaacagcccaggctggaggtgccccagggaagggtgctcacagtggtcccagggctacacttggctttgactgcacagcccctgctcagatccttgtggagggtgtccgatgacttggggaggttctcttccccttcctagaggaggaagtgaccaagtttgaaggcggcagaaatggccacacagccaagaagagcccatgcaactcagtccaggattttactgggtcagtgacattggtggaagccttcatgcctcctcattccacagcacttcctcctatgttgaccttaaacactggcttcccactgatacagactgggatgagctgagggcagtctcatttactgtcaagagttgtatttttgtattgtcctttttgccaagtctacatgtgttgactctgtaatggatttatgtagcccacttcagtctgcaaataaagcaaagtaactgg

SEQ ID NO: 1775 - DNA, 2528 bp, Homo sapiens
  source 1..2528: mol_type = genomic DNA
ctgcatcgtctgccgctttggtgacttctgacagctctctccatggaaggaggcggcggccgcgatgagccttcagcctgccgggcaggggacgtgaacatggatgaccctaagaaggaagtgcaatgaagatgatgaagtcttcttcggaccctttggacataaagaaagatgtattgctgccagcttggaattaaataatccggttcccgaacagcctccgttgcccacatctgagagtccctttgcctggagccctctggccggggagaagttcgtggaggtgtacaaagaagctcacttactggctttacacattgagagcagcagccggaaccaggcagcccaagctgccaagcctgaagaccctcggagccagggcgtggaaagattcatacaggagtcaaaattaaaaataaacctctttgagaaagaaaaggaaatgaagaaaagccccacgtctcttaaaagggagacatactacctgtcagacagccccttgctggggccccctgtgggtgagcctcggctcttggcctcctccccggccctgcccagctctggtgcccaggcccgcctcacccgggcgccggggcctccgcactctgctcatgctttgcccagggaatcatgcactgctcatgctgcaagtcaggcagcgactcagaggaagcccgggaccaaattgctgctgcctcgagcggcctctgttagaggaagaagcatccctggggctgcggagaagcccaagaaagagattccagctagtccttccaggacaaaaatcccagctgagaaggaatcccaccgggatgttctccctgacaaacctgccccgggtgctgtcaatgtgccggccgccggaagccacttgggccagggcaagcgggcgatccctgttccaaacaagttggggctgaagaagaccctgttaaaagcacccggctctaccagcaatctcgcaaggaagtcctcctcggggcctgtttggagcggggcatccagtgcgtgcacatccccagcagtgggcaaagctaaatcaagtgaatttgcaagtattcctgcaaatagctcccggcctctgtcaaacatcagcaagtcaggcagaatgggacccgccatgctgcggccagctctgcctgcaggccctgtgggggcatcctcctggcaggccaagcgggtcgatgtttctgagctggcagcggagcagctcacggcacccccctcagcatcccccacccaaccccagactccggaaggtggcggccagtggctgaactccagttgcgcttggtcagaatcttctcaattgaataagactagaagtatcagacggcgagattcctgtctaaattccaagacaaaggttatgcctactcctacaaatcaatttaaaattcctaagttttctattggtgactccccggacagctcaacaccaaagctttcgcgggcacagcggccgcagtcgtgcacgtcagttggcagggtcactgtccacagcaccccggttagacgctcatctgggccagcaccacaaagcctgctgagcgcatggcgtgtgtcagccttgcccacacccgccagccggcgctgctctggccttccaccgatgacccccaaaacgatgcccagggccgtgggctctcccctgtgtgtgccagctcggagacgttcctctgagccccgcaagaactctgcaatgagaactgaaccaacaagggagagcaacagaaagacagattccaggctggtggatgtgtcccctgacaggggttctcctccttcccgtgtgcctcaggcacttaacttttctccagaggaaagcgattctactttctccaaaagtactgccacagaagtagctcgggaggaagccaagccgggtggagatgcagcccctagtgaggctcttcttgtagatatcaaactggaaccactcgcggtcactccagatgctgcaagccagcccctcattgaccttcctctcatcgacttctgcgataccccagaagcacacgtggctgtaggatctgaaagcaggcctctgatcgacctcatgacaaacactccagacatgaataaaaatgtggccaaaccttcaccggtggtgggacagctcatagacctgagctcccctctgatccagctgagccctgaggctgacaaggagaacgtggattccccactcctcaagttctaagccgaaccaaatcctttgccttgaaagaacagccctaaagtggttttcaaccctcagaaacaagctttaggctggtcgcagtggcttacacttgtaaccctagaacttgggaggctgaggtgggcggattacttgagcccaggagttcgggaccagcctgggaaatatagtgaaactcctgtccctacaaaaaatacaaaaattagccgggtgtggtagtgcatgcctgtagtcccagctacttgggaggctgaagtgggaggatggcctgagctcaaggagatgcaggctgcagtgggctgtgattgtgccactgcactccagc

SEQ ID NO: 1776 - DNA, 3112 bp, Homo sapiens
  source 1..3112: mol_type = genomic DNA
attcgctgcgctgaagcagtgcgcatgcgcactggacgcttcttaccagcgtcctgactacaatacccaggacgcacccagcccgccgcctctcggagcccttttcaaaccgaccaatcggcaacccgcgtctcccggcgccgcgtttaaatccgtgccggaggcgcgtcctgcatcgtctgccgctttggtgacttctgacagctctctccatggaaggaggcggcggccgcgatgagccttcagcctgccgggcaggggacgtgaacatggatgaccctaagaaggaagacattcttcttttggccgatgaaaaatttgacttcgatctttcattgtcttcttcgagtgcaaatgaagatgatgaagtcttcttcggaccctttggacataaagaaagatgtattgctgccagcttggaattaaataatccggttcccgaacagcctccgttgcccacatctgagagtccctttgcctggagccctctggccggggagaagttcgtggaggtgtacaaagaagctcacttactggctttacacattgagagcagcagccggaaccaggcagcccaagctgccaagcctgaagaccctcggagccagggcgtggaaagattcatacaggagtcaaaattaaaaataaacctctttgagaaagaaaaggaaatgaagaaaagccccacgtctcttaaaagggagacatactacctgtcagacagccccttgctggggccccctgtgggtgagcctcggctcttggcctcctccccggccctgcccagctctggtgcccaggcccgcctcacccgggcgccggggcctccgcactctgctcatgctttgcccagggaatcatgcactgctcatgctgcaagtcaggcagcgactcagaggaagcccgggaccaaattgctgctgcctcgagcggcctctgttagaggaagaagcatccctggggctgcggagaagcccaagaaagagattccagctagtccttccaggacaaaaatcccagctgagaaggaatcccaccgggatgttctccctgacaaacctgccccgggtgctgtcaatgtgccggccgccggaagccacttgggccagggcaagcgggcgatccctgttccaaacaagttggggctgaagaagaccctgttaaaagcacccggctctaccagcaatctcgcaaggaagtcctcctcggggcctgtttggagcggggcatccagtgcgtgcacatccccagcagtgggcaaagctaaatcaagtgaatttgcaagtattcctgcaaatagctcccggcctctgtcaaacatcagcaagtcaggcagaatgggacccgccatgctgcggccagctctgcctgcaggccctgtgggggcatcctcctggcaggccaagcgggtcgatgtttctgagctggcagcggagcagctcacggcacccccctcagcatcccccacccaaccccagactccggaaggtggcggccagtggctgaactccagttgcgcttggtcagaatcttctcaattgaataagactagaagtatcagacggcgagattcctgtctaaattccaagacaaaggttatgcctactcctacaaatcaatttaaaattcctaagttttctattggtgactccccggacagctcaacaccaaagctttcgcgggcacagcggccgcagtcgtgcacgtcagttggcagggtcactgtccacagcaccccggttagacgctcatctgggccagcaccacaaagcctgctgagcgcatggcgtgtgtcagccttgcccacacccgccagccggcgctgctctggccttccaccgatgacccccaaaacgatgcccagggccgtgggctctcccctgtgtgtgccagctcggagacgttcctctgagccccgcaagaactctgcaatgagaactgaaccaacaagggagagcaacagaaagacagattccaggctggtggatgtgtcccctgacaggggttctcctccttcccgtgtgcctcaggcacttaacttttctccagaggaaagcgattctactttctccaaaagtactgccacagaagtagctcgggaggaagccaagccgggtggagatgcagcccctagtgaggctcttcttgtagatatcaaactggaaccactcgcggtcactccagatgctgcaagccagcccctcattgaccttcctctcatcgacttctgcgataccccagaagcacacgtggctgtaggatctgaaagcaggcctctgatcgacctcatgacaaacactccagacatgaataaaaatgtggccaaaccttcaccggtggtgggacagctcatagacctgagctcccctctgatccagctgagccctgaggctgacaaggagaacgtggattccccactcctcaagttctaagccgaaccaaatcctttgccttgaaagaacagccctaaagtggttttcaaccctcagaaacaagctttaggctggtcgcagtggcttacacttgtaaccctagaacttgggaggctgaggtgggcggattacttgagcccaggagttcgggaccagcctgggaaatatagtgaaactcctgtccctacaaaaaatacaaaaattagccgggtgtggtagtgcatgcctgtagtcccagctacttgggaggctgaagtgggaggatggcctgagctcaaggagatgcaggctgcagtgggctgtgattgtgccactgcactccagcctgggcaccaatgtgagaacctgtcttggaaaaaaaaaaaaagaaacatgttttagtagaagttttatttgaaaaagaaaaataagcataaatatattcccagtgctggagagggtgggctgagggactggggccagcacggaccacccaaggcctctgcttcccgccgccaccctcctcgctgccattctctgggctggaatgtgaagcctcagtcactctaaatgaagaattttcttttgaatgttttgtatgtaaaatagcaagtggctatttttaaagttaagtttgtataaatagttagatattctagatttacattaaattgtaaaataaatggacttattgaagcata

SEQ ID NO: 1777 - DNA, 3037 bp, Homo sapiens
  source 1..3037: mol_type = genomic DNA
gcgtgaggaaagtaccaaacagcagcggagttttaaactttaaatagacaggtctgagtgcctgaacttgccttttcattttacttcatcctccaaggagttcaatcacttggcgtgacttcactacttttaagcaaaagagtggtgcccaggcaacatgggtgactggagcgccttaggcaaactccttgacaaggttcaagcctactcaactgctggagggaaggtgtggctgtcagtacttttcattttccgaatcctgctgctggggacagcggttgagtcagcctggggagatgagcagtctgcctttcgttgtaacactcagcaacctggttgtgaaaatgtctgctatgacaagtctttcccaatctctcatgtgcgcttctgggtcctgcagatcatatttgtgtctgtacccacactcttgtacctggctcatgtgttctatgtgatgcgaaaggaagagaaactgaacaagaaagaggaagaactcaaggttgcccaaactgatggtgtcaatgtggacatgcacttgaagcagattgagataaagaagttcaagtacggtattgaagagcatggtaaggtgaaaatgcgaggggggttgctgcgaacctacatcatcagtatcctcttcaagtctatctttgaggtggccttcttgctgatccagtggtacatctatggattcagcttgagtgctgtttacacttgcaaaagagatccctgcccacatcaggtggactgtttcctctctcgccccacggagaaaaccatcttcatcatcttcatgctggtggtgtccttggtgtccctggccttgaatatcattgaactcttctatgttttcttcaagggcgttaaggatcgggttaagggaaagagcgacccttaccatgcgaccagtggtgcgctgagccctgccaaagactgtgggtctcaaaaatatgcttatttcaatggctgctcctcaccaaccgctcccctctcgcctatgtctcctcctgggtacaagctggttactggcgacagaaacaattcttcttgccgcaattacaacaagcaagcaagtgagcaaaactgggctaattacagtgcagaacaaaatcgaatggggcaggcgggaagcaccatctctaactcccatgcacagccttttgatttccccgatgataaccagaattctaaaaaactagctgctggacatgaattacagccactagccattgtggaccagcgaccttcaagcagagccagcagtcgtgccagcagcagacctcggcctgatgacctggagatctagatacaggcttgaaagcatcaagattccactcaattgtggagaagaaaaaaggtgctgtagaaagtgcaccaggtgttaattttgatccggtggaggtggtactcaacagccttattcatgaggcttagaaaacacaaagacattagaatacctaggttcactgggggtgtatggggtagatgggtggagagggaggggataagagaggtgcatgttggtatttaaagtagtggattcaaagaacttagattataaataagagttccattaggtgatacatagataagggctttttctccccgcaaacacccctaagaatggttctgtgtatgtgaatgagcgggtggtaattgtggctaaatatttttgttttaccaagaaactgaaataattctggccaggaataaatacttcctgaacatcttaggtcttttcaacaagaaaaagacagaggattgtccttaagtccctgctaaaacattccattgttaaaatttgcactttgaaggtaagctttctaggcctgaccctccaggtgtcaatggacttgtgctactatatttttttattcttggtatcagtttaaaattcagacaaggcccacagaataagattttccatgcatttgcaaatacgtatattctttttccatccacttgcacaatatcattaccatcactttttcatcattcctcagctactactcacattcatttaatggtttctgtaaacatttttaagacagttgggatgtcacttaacattttttttttgagctaaagtcagggaatcaagccatgcttaatatttaacaatcacttatatgtgtgtcgaagagtttgttttgtttgtcatgtattggtacaagcagatacagtataaactcacaaacacagatttgaaaataatgcacatatggtgttcaaatttgaacctttctcatggatttttgtggtgtgggccaatatggtgtttacattatataattcctgctgtggcaagtaaagcacactttttttttctcctaaaatgtttttccctgtgtatcctattatggatactggttttgttaattatgattctttattttctctcctttttttaggatatagcagtaatgctattactgaaatgaatttcctttttctgaaatgtaatcattgatgcttgaatgatagaattttagtactgtaaacaggctttagtcattaatgtgagagacttagaaaaaatgcttagagtggactattaaatgtgcctaaatgaattttgcagtaactggtattcttgggttttcctacttaatacacagtaattcagaacttgtattctattatgagtttagcagtcttttggagtgaccagcaactttgatgtttgcactaagattttatttggaatgcaagagaggttgaaagaggattcagtagtacacatacaactaatttatttgaactatatgttgaagacatctaccagtttctccaaatgccttttttaaaactcatcacagaagattggtgaaaatgctgagtatgacacttttcttcttgcatgcatgtcagctacataaacagttttgtacaatgaaaattactaatttgtttgacattccatgttaaactacggtcatgttcagcttcattgcatgtaatgtagacctagtccatcagatcatgtgttctggagagtgttctttattcaataaagttttaatttagtataaacata

SEQ ID NO: 1778 - DNA, 1393 bp, Homo sapiens
  source 1..1393: mol_type = genomic DNA
aaaaagcttttacgaggtatcagcacttttctttcattagggggaaggcgtgaggaaagtaccaaacagcagcggagttttaaactttaaatagacaggtctgagtgcctgaacttgccttttcattttacttcatcctccaaggagttcaatcacttggcgtgacttcactacttttaagcaaaagagtggtgcccaggcaacatgggtgactggagcgccttaggcaaactccttgacaaggttcaagcctactcaactgctggagggaaggtgtggctgtcagcctggggagatgagcagtctgcctttcgttgtaacactcagcaacctggttgtgaaaatgtctgctatgacaagtctttcccaatctctcatgtgcgcttctgggtcctgcagatcatatttgtgtctgtacccacactcttgtacctggctcatgtgttctatgtgatgcgaaaggaagagaaactgaacaagaaagaggaagaactcaaggttgcccaaactgatggtgtcaatgtggacatgcacttgaagcagattgagataaagaagttcaagtacggtattgaagagcatggtaaggtgaaaatgcgaggggggttgctgcgaacctacatcatcagtatcctcttcaagtctatctttgaggtggccttcttgctgatccagtggtacatctatggattcagcttgagtgctgtttacacttgcaaaagagatccctgcccacatcaggtggactgtttcctctctcgccccacggagaaaaccatcttcatcatcttcatgctggtggtgtccttggtgtccctggccttgaatatcattgaactcttctatgttttcttcaagggcgttaaggatcgggttaagggaaagagcgacccttaccatgcgaccagtggtgcgctgagccctgccaaagactgtgggtctcaaaaatatgcttatttcaatggctgctcctcaccaaccgctcccctctcgcctatgtctcctcctgggtacaagctggttactggcgacagaaacaattcttcttgccgcaattacaacaagcaagcaagtgagcaaaactgggctaattacagtgcagaacaaaatcgaatggggcaggcgggaagcaccatctctaactcccatgcacagccttttgatttccccgatgataaccagaattctaaaaaactagctgctggacatgaattacagccactagccattgtggaccagcgaccttcaagcagagccagcagtcgtgccagcagcagacctcggcctgatgacctggagatctagatacaggcttgaaagcatcaagattccactcaattgtggagaagaaaaaaggtgctgtagaaagtgcaccaggtgttaattttgatcc

SEQ ID NO: 1779 - DNA, 1224 bp, Homo sapiens
  source 1..1224: mol_type = genomic DNA
ggcctctctgttgtaaattagtggttaaggttatctattattgccacttttccagcgctaaaggctgttttggaaccagtgttgcttgttccgcgggtgattggcttttttttttggcaaaccagttattcaagtttctggtctttaaaaaactctgtggcggtacggtaaccgaggaggttccagcgcggcggaagtaccccgcgggtgggtgtgtgcgcaaggccagggccagaggggcacgtggcgccgggaggagagagaatgtcttttcgaggcggaggtcgtggaggctttaatcgaggtggtggaggtggcggcttcaaccgaggtggcagcagcaaccacttccgaggtggaggcggcggtggaggcggcggcaatttcagaggcggcggcaggggaggatttggacgagggggtggccgcggaggctttaacaaaggccaagaccaaggacctccagaacgtgtagtcttattaggagagttcctgcatccctgtgaagatgacatagtttgtaaatgtaccacagatgaaaataaggtgccttatttcaatgctcctgtttacttagaaaacaaagaacaaattggaaaagtggatgaaatatttggacaactcagagatttttatttttcagttaagttgtcagaaaacatgaaggcttcatcctttaaaaaactacagaagttttatatagacccatataagctgctgccactgcagaggtttttacctcgacctccaggtgagaaaggacctccaagaggtggtggcaggggaggccgaggaggaggaagaggaggaggtggcagaggtggtggcagaggcggtggttttagaggtggaagaggaggtggaggtgggggcttcagaggaggaagaggtggtggtttcagagggagaggacattaagtgaaacagttgacagacatcaccagttgacttctgcattaacctgcatgatctgtttctactatggattggaaacttgtttcttgaacaagtcttgaagatcttggtcattttatgacaatggatctaaaatgtcagcatcatgcaaagtgcaacggaatagtgaattttgctctaaaagagcatgaacaagtctttctaatgttttgtacagtgcctggcactctgtgggtgctcaataaatggataggagttttcatttgaagcatatttgaatttttaaaataaagtgttttattcccttaa

SEQ ID NO: 1780 - DNA, 1008 bp, Homo sapiens
  source 1..1008: mol_type = genomic DNA
ccgctgttatacgtcacttccacggctcagcgtcagggaggagagagaatgtcttttcgaggcggaggtcgtggaggctttaatcgaggtggtggaggtggcggcttcaaccgaggtggcagcagcaaccacttccgaggtggaggcggcggtggaggcggcggcaatttcagaggcggcggcaggggaggatttggacgagggggtggccgcggaggctttaacaaaggccaagaccaaggacctccagaacgtgtagtcttattaggagagttcctgcatccctgtgaagatgacatagtttgtaaatgtaccacagatgaaaataaggtgccttatttcaatgctcctgtttacttagaaaacaaagaacaaattggaaaagtggatgaaatatttggacaactcagagatttttatttttcagttaagttgtcagaaaacatgaaggcttcatcctttaaaaaactacagaagttttatatagacccatataagctgctgccactgcagaggtttttacctcgacctccaggtgagaaaggacctccaagaggtggtggcaggggaggccgaggaggaggaagaggaggaggtggcagaggtggtggcagaggcggtggttttagaggtggaagaggaggtggaggtgggggcttcagaggaggaagaggtggtggtttcagagggagaggacattaagtgaaacagttgacagacatcaccagttgacttctgcattaacctgcatgatctgtttctactatggattggaaacttgtttcttgaacaagtcttgaagatcttggtcattttatgacaatggatctaaaatgtcagcatcatgcaaagtgcaacggaatagtgaattttgctctaaaagagcatgaacaagtctttctaatgttttgtacagtgcctggcactctgtgggtgctcaataaatggataggagttttcatttgaagcatatttgaatttttaaaataaagtgttttattcccttaa

SEQ ID NO: 1781 - DNA, 2021 bp, Homo sapiens
  source 1..2021: mol_type = genomic DNA
aaagggtgagaggggcaggtggggctagggtggagaccaaagcactgatgtgacggaaccatcagccaggcaactggacctggtggatccaggaagactttctggaagaggtctctgacccctcccaaggatcatgccgcagccccactgacccaggagtaggggcctaagggcagggaacctggaatgggctgtgtgttctgcaagaaattggagccggtggccacggccaaggaggatgctggcctggaaggggacttcagaagctacggggcagcagaccactatgggcctgaccccactaaggcccggcctgcatcctcatttgcccacatccccaactacagcaacttctcctctcaggccatcaaccctggcttccttgatagtggcaccatcaggggtgtgtcagggattggggtgaccctgttcattgccctgtatgactatgaggctcgaactgaggatgacctcaccttcaccaagggcgagaagttccacatcctgaacaatactgaaggtgactggtgggaggctcggtctctcagctccggaaaaactggctgcattcccagcaactacgtggcccctgttgactcaatccaagctgaagagtggtactttggaaagattgggagaaaggatgcagagaggcagctgctttcaccaggcaacccccagggggcctttctcattcgggaaagcgagaccaccaaaggtgcctactccctgtccatccgggactgggatcagaccagaggcgatcatgtgaagcattacaagatccgcaaactggacatgggcggctactacatcaccacacgggttcagttcaactcggtgcaggagctggtgcagcactacatggaggtgaatgacgggctgtgcaacctgctcatcgcgccctgcaccatcatgaagccgcagacgctgggcctggccaaggacgcctgggagatcagccgcagctccatcacgctggagcgccggctgggcaccggctgcttcggggatgtgtggctgggcacgtggaacggcagcactaaggtggcggtgaagacgctgaagccgggcaccatgtccccgaaggccttcctggaggaggcgcaggtcatgaagctgctgcggcacgacaagctggtgcagctgtacgccgtggtgtcggaggagcccatctacatcgtgaccgagttcatgtgtcacggcagcttgctggattttctcaagaacccagagggccaggatttgaggctgccccaattggtggacatggcagcccaggtagctgagggcatggcctacatggaacgcatgaactacattcaccgcgacctgagggcagccaacatcctggttggggagcggctggcgtgcaagatcgcagactttggcttggcgcgtctcatcaaggacgatgagtacaacccctgccaaggttccaagttccccatcaagtggacagccccagaagctgccctctttggcagattcaccatcaagtcagacgtgtggtcctttgggatcctgctcactgagctcatcaccaagggccgaatcccctacccaggcatgaataaacgggaagtgttggaacaggtggagcagggctaccacatgccgtgccctccaggctgcccagcatccctgtacgaggccatggaacagacctggcgtctggacccggaggagaggcctaccttcgagtacctgcagtccttcctggaggactacttcacctccgctgaaccacagtaccagcccggggatcagacatagcctgtccgggcatcaaccctctctggcggtggccaccagtccttgccaatccccagagctgttcttccaaagcccccaggctggcttagaaccccatagagtcctagcatcaccgaggacgtggctgctctgacaccacctagggcaacctacttgttttacagatggggcaaaaggaggcccagagctgatctctcatccgctctggccccaagcactatttcttccttttccacttaggcccc

SEQ ID NO: 1782 - DNA, 2350 bp, Homo sapiens
  source 1..2350: mol_type = genomic DNA
gggaggaccccaatctaggcccaagagggaaagccacgtgcctgtatgagcgtatgagcatgtgcatgcgcgtgtgtgcacagggtggtgcacctggcaggggtccttgagtgaggcatgccccattctgtagcagggaacctggaatgggctgtgtgttctgcaagaaattggagccggtggccacggccaaggaggatgctggcctggaaggggacttcagaagctacggggcagcagaccactatgggcctgaccccactaaggcccggcctgcatcctcatttgcccacatccccaactacagcaacttctcctctcaggccatcaaccctggcttccttgatagtggcaccatcaggggtgtgtcagggattggggtgaccctgttcattgccctgtatgactatgaggctcgaactgaggatgacctcaccttcaccaagggcgagaagttccacatcctgaacaatactgaaggtgactggtgggaggctcggtctctcagctccggaaaaactggctgcattcccagcaactacgtggcccctgttgactcaatccaagctgaagagtggtactttggaaagattgggagaaaggatgcagagaggcagctgctttcaccaggcaacccccagggggcctttctcattcgggaaagcgagaccaccaaaggtgcctactccctgtccatccgggactgggatcagaccagaggcgatcatgtgaagcattacaagatccgcaaactggacatgggcggctactacatcaccacacgggttcagttcaactcggtgcaggagctggtgcagcactacatggaggtgaatgacgggctgtgcaacctgctcatcgcgccctgcaccatcatgaagccgcagacgctgggcctggccaaggacgcctgggagatcagccgcagctccatcacgctggagcgccggctgggcaccggctgcttcggggatgtgtggctgggcacgtggaacggcagcactaaggtggcggtgaagacgctgaagccgggcaccatgtccccgaaggccttcctggaggaggcgcaggtcatgaagctgctgcggcacgacaagctggtgcagctgtacgccgtggtgtcggaggagcccatctacatcgtgaccgagttcatgtgtcacggcagcttgctggattttctcaagaacccagagggccaggatttgaggctgccccaattggtggacatggcagcccaggtagctgagggcatggcctacatggaacgcatgaactacattcaccgcgacctgagggcagccaacatcctggttggggagcggctggcgtgcaagatcgcagactttggcttggcgcgtctcatcaaggacgatgagtacaacccctgccaaggttccaagttccccatcaagtggacagccccagaagctgccctctttggcagattcaccatcaagtcagacgtgtggtcctttgggatcctgctcactgagctcatcaccaagggccgaatcccctacccaggcatgaataaacgggaagtgttggaacaggtggagcagggctaccacatgccgtgccctccaggctgcccagcatccctgtacgaggccatggaacagacctggcgtctggacccggaggagaggcctaccttcgagtacctgcagtccttcctggaggactacttcacctccgctgaaccacagtaccagcccggggatcagacatagcctgtccgggcatcaaccctctctggcggtggccaccagtccttgccaatccccagagctgttcttccaaagcccccaggctggcttagaaccccatagagtcctagcatcaccgaggacgtggctgctctgacaccacctagggcaacctacttgttttacagatggggcaaaaggaggcccagagctgatctctcatccgctctggccccaagcactatttcttccttttccacttaggcccctacatgcctgtagcctttctcactccatccccacccaaagtgctcagaccttgtctagttatttataaaactgtatgtacctccctcacttctctcctatcactgctttcctactctccttttatctcactctagtccaggtgccaagaatttcccttctaccctctattctcttgtgtctgtaagttacaaagtcaggaaaagtcttggctggacccctttcctgctgggtggatgcagtggtccaggactggggtctgggcccaggtttgagggagaaggttgcagagcacttcccacctctctgaatagtgtgtatgtgttggtttattgattctgtaaataagtaaaatgacaatatgaatcctc

SEQ ID NO: 1783 - DNA, 2729 bp, Homo sapiens
  source 1..2729: mol_type = genomic DNA
ggcttggggctagggcgtgactgtctccctgccaccatcaccgcccgccggccgtgactgcaataagagaagtccgaggcggcttcctcctccctgcccagcaggggcggcggtcagaggcgggcagcaccccagttctccccgcacgccggcactcgcggctgctggagccccggctggctcaccccggggccgggcagaattgggctccaggtctctgacccctcccaaggatcatgccgcagccccactgacccaggagtaggggcctaagggcagggaacctggaatgggctgtgtgttctgcaagaaattggagccggtggccacggccaaggaggatgctggcctggaaggggacttcagaagctacggggcagcagaccactatgggcctgaccccactaaggcccggcctgcatcctcatttgcccacatccccaactacagcaacttctcctctcaggccatcaaccctggcttccttgatagtggcaccatcaggggtgtgtcagggattggggtgaccctgttcattgccctgtatgactatgaggctcgaactgaggatgacctcaccttcaccaagggcgagaagttccacatcctgaacaatactgaaggtgactggtgggaggctcggtctctcagctccggaaaaactggctgcattcccagcaactacgtggcccctgttgactcaatccaagctgaagagtggtactttggaaagattgggagaaaggatgcagagaggcagctgctttcaccaggcaacccccagggggcctttctcattcgggaaagcgagaccaccaaaggtgcctactccctgtccatccgggactgggatcagaccagaggcgatcatgtgaagcattacaagatccgcaaactggacatgggcggctactacatcaccacacgggttcagttcaactcggtgcaggagctggtgcagcactacatggaggtgaatgacgggctgtgcaacctgctcatcgcgccctgcaccatcatgaagccgcagacgctgggcctggccaaggacgcctgggagatcagccgcagctccatcacgctggagcgccggctgggcaccggctgcttcggggatgtgtggctgggcacgtggaacggcagcactaaggtggcggtgaagacgctgaagccgggcaccatgtccccgaaggccttcctggaggaggcgcaggtcatgaagctgctgcggcacgacaagctggtgcagctgtacgccgtggtgtcggaggagcccatctacatcgtgaccgagttcatgtgtcacggcagcttgctggattttctcaagaacccagagggccaggatttgaggctgccccaattggtggacatggcagcccaggtagctgagggcatggcctacatggaacgcatgaactacattcaccgcgacctgagggcagccaacatcctggttggggagcggctggcgtgcaagatcgcagactttggcttggcgcgtctcatcaaggacgatgagtacaacccctgccaaggttccaagttccccatcaagtggacagccccagaagctgccctctttggcagattcaccatcaagtcagacgtgtggtcctttgggatcctgctcactgagctcatcaccaagggccgaatcccctacccaggcatgaataaacgggaagtgttggaacaggtggagcagggctaccacatgccgtgccctccaggctgcccagcatccctgtacgaggccatggaacagacctggcgtctggacccggaggagaggcctaccttcgagtacctgcagtccttcctggaggactacttcacctccgctgaaccacagtaccagcccggggatcagacatagcctgtccgggcatcaaccctctctggcggtggccaccagtccttgccaatccccagagctgttcttccaaagcccccaggctggcttagaaccccatagagtcctagcatcaccgaggacgtggctgctctgacaccacctagggcaacctacttgttttacagatggggcaaaaggaggcccagagctgatctctcatccgctctggccccaagcactatttcttccttttccacttaggcccctacatgcctgtagcctttctcactccatccccacccaaagtgctcagaccttgtctagttatttataaaactgtatgtacctccctcacttctctcctatcactgctttcctactctccttttatctcactctagtccaggtgccaagaatttcccttctaccctctattctcttgtgtctgtaagttacaaagtcaggaaaagtcttggctggacccctttcctgctgggtggatgcagtggtccaggactggggtctgggcccaggtttgagggagaaggttgcagagcacttcccacctctctgaatagtgtgtatgtgttggtttattgattctgtaaataagtaaaatgacaatatgaatcctcaaaccatgaaatacccttgaaccttcctttgggagcgggggtggtcaatagggggtgaacggacagatatggctacaggcagcagcaggggaagctggagagggccctaatgcctaccaagcacggggcatccaaggtgtggagttttagaacacccagagtcccactgctcatctgcacgtgagtttagaagacaagcagctgaagatacattaaaatgtccccttcgttgctga

SEQ ID NO: 1784 - DNA, 2483 bp, Homo sapiens
  source 1..2483: mol_type = genomic DNA
ctctgagtgttgcaatggcaatgtttctggcagggtgtgggggacccttgctcaatgacctcctgccctgttgctcagaggataccgctgccagaaaagggttggctcattgtggggcttcccaaggtactctggtagccccagcttctgacctggtcctttctctggtatggggataggaggagagctccggaggtctctgacccctcccaaggatcatgccgcagccccactgacccaggagtaggggcctaagggcagggaacctggaatgggctgtgtgttctgcaagaaattggagccggtggccacggccaaggaggatgctggcctggaaggggacttcagaagctacggggcagcagaccactatgggcctgaccccactaaggcccggcctgcatcctcatttgcccacatccccaactacagcaacttctcctctcaggccatcaaccctggcttccttgatagtggcaccatcaggggtgtgtcagggattggggtgaccctgttcattgccctgtatgactatgaggctcgaactgaggatgacctcaccttcaccaagggcgagaagttccacatcctgaacaatactgaaggtgactggtgggaggctcggtctctcagctccggaaaaactggctgcattcccagcaactacgtggcccctgttgactcaatccaagctgaagagtggtactttggaaagattgggagaaaggatgcagagaggcagctgctttcaccaggcaacccccagggggcctttctcattcgggaaagcgagaccaccaaaggtgcctactccctgtccatccgggactgggatcagaccagaggcgatcatgtgaagcattacaagatccgcaaactggacatgggcggctactacatcaccacacgggttcagttcaactcggtgcaggagctggtgcagcactacatggaggtgaatgacgggctgtgcaacctgctcatcgcgccctgcaccatcatgaagccgcagacgctgggcctggccaaggacgcctgggagatcagccgcagctccatcacgctggagcgccggctgggcaccggctgcttcggggatgtgtggctgggcacgtggaacggcagcactaaggtggcggtgaagacgctgaagccgggcaccatgtccccgaaggccttcctggaggaggcgcaggtcatgaagctgctgcggcacgacaagctggtgcagctgtacgccgtggtgtcggaggagcccatctacatcgtgaccgagttcatgtgtcacggcagcttgctggattttctcaagaacccagagggccaggatttgaggctgccccaattggtggacatggcagcccaggtagctgagggcatggcctacatggaacgcatgaactacattcaccgcgacctgagggcagccaacatcctggttggggagcggctggcgtgcaagatcgcagactttggcttggcgcgtctcatcaaggacgatgagtacaacccctgccaaggttccaagttccccatcaagtggacagccccagaagctgccctctttggcagattcaccatcaagtcagacgtgtggtcctttgggatcctgctcactgagctcatcaccaagggccgaatcccctacccaggcatgaataaacgggaagtgttggaacaggtggagcagggctaccacatgccgtgccctccaggctgcccagcatccctgtacgaggccatggaacagacctggcgtctggacccggaggagaggcctaccttcgagtacctgcagtccttcctggaggactacttcacctccgctgaaccacagtaccagcccggggatcagacatagcctgtccgggcatcaaccctctctggcggtggccaccagtccttgccaatccccagagctgttcttccaaagcccccaggctggcttagaaccccatagagtcctagcatcaccgaggacgtggctgctctgacaccacctagggcaacctacttgttttacagatggggcaaaaggaggcccagagctgatctctcatccgctctggccccaagcactatttcttccttttccacttaggcccctacatgcctgtagcctttctcactccatccccacccaaagtgctcagaccttgtctagttatttataaaactgtatgtacctccctcacttctctcctatcactgctttcctactctccttttatctcactctagtccaggtgccaagaatttcccttctaccctctattctcttgtgtctgtaagttacaaagtcaggaaaagtcttggctggacccctttcctgctgggtggatgcagtggtccaggactggggtctgggcccaggtttgagggagaaggttgcagagcacttcccacctctctgaatagtgtgtatgtgttggtttattgattctgtaaataagtaaaatgacaatatgaatcctcaaaccatg

SEQ ID NO: 1785 - DNA, 1104 bp, Homo sapiens
  source 1..1104: mol_type = genomic DNA
ctcattgtggggcttcccaaggtactctggtagccccagcttctgacctggtcctttctctggtatggggataggaggagagctccggaggtctctgacccctcccaaggatcatgccgcagccccactgacccaggagtaggggcctaagggcagggaacctggaatgggctgtgtgttctgcaagaaattggagccggtggccacggccaaggaggatgctggcctggaaggggacttcagaagctacggggcagcagaccactatgggcctgaccccactaaggcccggcctgcatcctcatttgcccacatccccaactacagcaacttctcctctcaggccatcaaccctggcttccttgatagtggcaccatcaggggtgtgtcagggattggggtgaccctgttcattgccctgtatgactatgaggctcgaactgaggatgacctcaccttcaccaagggcgagaagttccacatcctgaacaatactgaaggtgactggtgggaggctcggtctctcagctccggaaaaactggctgcattcccagcaactacgtggcccctgttgactcaatccaagctgaagagtggtactttggaaagattgggagaaaggatgcagagaggcagctgctttcaccaggcaacccccagggggcctttctcattcgggaaagcgagaccaccaaaggtgcctactccctgtccatccgggactgggatcagaccagaggcgatcatgtgaagcattacaagatccgcaaactggacatgggcggctactacatcaccacacgggttcagttcaactcggtgcaggagctggtgcagcactacatggaggtgaatgacgggctgtgcaacctgctcatcgcgccctgcaccatcatgaagccgcagacgctgggcctggccaaggacgcctgggagatcagccgcagctccatcacgctggagcgccggctgggcaccggctgcttcggggatgtgtggctgggcacgtggaacggcagcactaaggtggcggtgaagacgctgaagccgggcaccatgtccccgaaggccttcctggaggaggcgcaggtcatgaagctgct

SEQ ID NO: 1786 - DNA, 2242 bp, Homo sapiens
  source 1..2242: mol_type = genomic DNA
aataagagaagtccgaggcggcttcctcctccctgcccagcaggggcggcggtcagaggcgggcagcaccccagttctccccgcacgccggcactcgcggctgctggagccccggctggctcaccccggggccgggcagaattgggctccaggtctctgacccctcccaaggatcatgccgcagccccactgacccaggagtaggggcctaagggcagggaacctggaatgggctgtgtgttctgcaagaaattggagccggtggccacggccaaggaggatgctggcctggaaggggacttcagaagctacggggcagcagaccactatgggcctgaccccactaaggcccggcctgcatcctcatttgcccacatccccaactacagcaacttctcctctcaggccatcaaccctggcttccttgatagtggcaccatcaggggtgtgtcagggattggggtgaccctgttcattgccctgtatgactatgaggctcgaactgaggatgacctcaccttcaccaagggcgagaagttccacatcctgaacaatactgaaggtgcctactccctgtccatccgggactgggatcagaccagaggcgatcatgtgaagcattacaagatccgcaaactggacatgggcggctactacatcaccacacgggttcagttcaactcggtgcaggagctggtgcagcactacatggaggtgaatgacgggctgtgcaacctgctcatcgcgccctgcaccatcatgaagccgcagacgctgggcctggccaaggacgcctgggagatcagccgcagctccatcacgctggagcgccggctgggcaccggctgcttcggggatgtgtggctgggcacgtggaacggcagcactaaggtggcggtgaagacgctgaagccgggcaccatgtccccgaaggccttcctggaggaggcgcaggtcatgaagctgctgcggcacgacaagctggtgcagctgtacgccgtggtgtcggaggagcccatctacatcgtgaccgagttcatgtgtcacggcagcttgctggattttctcaagaacccagagggccaggatttgaggctgccccaattggtggacatggcagcccaggtagctgagggcatggcctacatggaacgcatgaactacattcaccgcgacctgagggcagccaacatcctggttggggagcggctggcgtgcaagatcgcagactttggcttggcgcgtctcatcaaggacgatgagtacaacccctgccaaggttccaagttccccatcaagtggacagccccagaagctgccctctttggcagattcaccatcaagtcagacgtgtggtcctttgggatcctgctcactgagctcatcaccaagggccgaatcccctacccaggcatgaataaacgggaagtgttggaacaggtggagcagggctaccacatgccgtgccctccaggctgcccagcatccctgtacgaggccatggaacagacctggcgtctggacccggaggagaggcctaccttcgagtacctgcagtccttcctggaggactacttcacctccgctgaaccacagtaccagcccggggatcagacatagcctgtccgggcatcaaccctctctggcggtggccaccagtccttgccaatccccagagctgttcttccaaagcccccaggctggcttagaaccccatagagtcctagcatcaccgaggacgtggctgctctgacaccacctagggcaacctacttgttttacagatggggcaaaaggaggcccagagctgatctctcatccgctctggccccaagcactatttcttccttttccacttaggcccctacatgcctgtagcctttctcactccatccccacccaaagtgctcagaccttgtctagttatttataaaactgtatgtacctccctcacttctctcctatcactgctttcctactctccttttatctcactctagtccaggtgccaagaatttcccttctaccctctattctcttgtgtctgtaagttacaaagtcaggaaaagtcttggctggacccctttcctgctgggtggatgcagtggtccaggactggggtctgggcccaggtttgagggagaaggttgcagagcacttcccacctctctgaatagtgtgtatgtgttggtttattgattctgtaaataagtaaaatgacaatatgaatcctcaaaccatg

SEQ ID NO: 1787 - DNA, 1138 bp, Homo sapiens
  source 1..1138: mol_type = genomic DNA
ggacaccccctgggatcacactgagcttgccacatccccaaggcggccgaaccctccgcaaccaccagcccaggttaatccccagaggctccatggagttccctggcctggggtccctggggacctcagagcccctcccccagtttgtggatcctgctctggtgtcctccacaccagaatcaggggttttcttcccctctgggcctgagggcttggatgcagcagcttcctccactgccccgagcacagccaccgctgcagctgcggcactggcctactacagggacgctgaggcctacagacactccccagtctttcaggtgtacccattgctcaactgtatggaggggatcccagggggctcaccatatgccggctgggcctacggcaagacggggctctaccctgcctcaactgtgtgtcccacccgcgaggactctcctccccaggccgtggaagatctggatggaaaaggcagcaccagcttcctggagactttgaagacagagcggctgagcccagacctcctgaccctgggacctgcactgccttcatcactccctgtccccaatagtgcttatgggggccctgacttttccagtaccttcttttctcccaccgggagccccctcaattcagcagcctattcctctcccaagcttcgtggaactctccccctgcctccctgtgaggccagggagtgtgtgaactgcggagcaacagccactccactgtggcggagggacaggacaggccactacctatgcaacgcctgcggcctctatcacaagatgaatgggcagaacaggcccctcatccggcccaagaagcgcctgattgtcagtaaacgggcaggtactcagtgcaccaactgccagacgaccaccacgacactgtggcggagaaatgccagtggggatcccgtgtgcaatgcctgcggcctctactacaagctacaccagcactactgtggtggctccgctcagctcatgagggcacagagcatggcctccagaggaggggtggtgtccttctcctcttgtagccagaattctggacaacccaagtctctgggccccaggcaccccctggcttgaaccttcaaagcttttgtaaaataaaaccaccaaagtcctga

SEQ ID NO: 1788 - DNA, 1497 bp, Homo sapiens
  source 1..1497: mol_type = genomic DNA
caaaggccaaggccagccaggacaccccctgggatcacactgagcttgccacatccccaaggcggccgaaccctccgcaaccaccagcccaggttaatccccagaggctccatggagttccctggcctggggtccctggggacctcagagcccctcccccagtttgtggatcctgctctggtgtcctccacaccagaatcaggggttttcttcccctctgggcctgagggcttggatgcagcagcttcctccactgccccgagcacagccaccgctgcagctgcggcactggcctactacagggacgctgaggcctacagacactccccagtctttcaggtgtacccattgctcaactgtatggaggggatcccagggggctcaccatatgccggctgggcctacggcaagacggggctctaccctgcctcaactgtgtgtcccacccgcgaggactctcctccccaggccgtggaagatctggatggaaaaggcagcaccagcttcctggagactttgaagacagagcggctgagcccagacctcctgaccctgggacctgcactgccttcatcactccctgtccccaatagtgcttatgggggccctgacttttccagtaccttcttttctcccaccgggagccccctcaattcagcagcctattcctctcccaagcttcgtggaactctccccctgcctccctgtgaggccagggagtgtgtgaactgcggagcaacagccactccactgtggcggagggacaggacaggccactacctatgcaacgcctgcggcctctatcacaagatgaatgggcagaacaggcccctcatccggcccaagaagcgcctgattgtcagtaaacgggcaggtactcagtgcaccaactgccagacgaccaccacgacactgtggcggagaaatgccagtggggatcccgtgtgcaatgcctgcggcctctactacaagctacaccaggtgaaccggccactgaccatgcggaaggatggtattcagactcgaaaccgcaaggcatctggaaaagggaaaaagaaacggggctccagtctgggaggcacaggagcagccgaaggaccagctggtggctttatggtggtggctgggggcagcggtagcgggaattgtggggaggtggcttcaggcctgacactgggccccccaggtactgcccatctctaccaaggcctgggccctgtggtgctgtcagggcctgttagccacctcatgcctttccctggacccctactgggctcacccacgggctccttccccacaggccccatgccccccaccaccagcactactgtggtggctccgctcagctcatgagggcacagagcatggcctccagaggaggggtggtgtccttctcctcttgtagccagaattctggacaacccaagtctctgggccccaggcaccccctggcttgaaccttcaaagcttttgtaaaataaaaccaccaaagtcctg

SEQ ID NO: 1789 - DNA, 463 bp, Homo sapiens
  source 1..463: mol_type = genomic DNA
ggcagaacaggcccctcatccggcccaagaagcgcctgattgtcagtaaacgggcaggtactcagtgcaccaactgccagacgaccaccacgacactgtggcggagaaatgccagtggggatcccgtgtgcaatgcctgcggcctctactacaagctacaccaggtgaaccggccactgaccatgcggaaggatggtattcagactcgaaaccgcaaggcatctggaaaagggaaaaagaaacggggctccagtctgggaggcacaggagcagccgaaggaccagcactactgtggtggctccgctcagctcatgagggcacagagcatggcctccagaggaggggtggtgtccttctcctcttgtagccagaattctggacaacccaagtctctgggccccaggcaccccctggcttgaaccttcaaagcttttgtaaaataaaaccaccaaagtcctgaaa

SEQ ID NO: 1790 - DNA, 2654 bp, Homo sapiens
  source 1..2654: mol_type = genomic DNA
gagagcgagacagagcgagcaacgcaatctgaccgagcaggtcgtacgccgccgcctcctcctcctctctgctcttcgctacccaggtgacccgaggagggactccgcctccgagcggctgaggaccccggtgcagaggagcctggctcgcagaattgcagagtcgtcgcccctttttacaacctggtcccgttttattctgccgtacccagtttttggatttttgtcttccccttcttctctttgctaaacgacccctccaagataatttttaaaaaaccttctcctttgctcacctttgcttcccagccttcccatccccccaccgaaagcaaatcattcaacgacccccgaccctccgacggcaggagccccccgacctcccaggcggaccgccctccctccccgcgcgcgggttccgggcccggcgagagggcgcgagcacagccgaggccatggaggtgacggcggaccagccgcgctgggtgagccaccaccaccccgccgtgctcaacgggcagcacccggacacgcaccacccgggcctcagccactcctacatggacgcggcgcagtacccgctgccggaggaggtggatgtgctttttaacatcgacggtcaaggcaaccacgtcccgccctactacggaaactcggtcagggccacggtgcagaggtaccctccgacccaccacgggagccaggtgtgccgcccgcctctgcttcatggatccctaccctggctggacggcggcaaagccctgggcagccaccacaccgcctccccctggaatctcagccccttctccaagacgtccatccaccacggctccccggggcccctctccgtctaccccccggcctcgtcctcctccttgtcggggggccacgccagcccgcacctcttcaccttcccgcccaccccgccgaaggacgtctccccggacccatcgctgtccaccccaggctcggccggctcggcccggcaggacgagaaagagtgcctcaagtaccaggtgcccctgcccgacagcatgaagctggagtcgtcccactcccgtggcagcatgaccgccctgggtggagcctcctcgtcgacccaccaccccatcaccacctacccgccctacgtgcccgagtacagctccggactcttcccccccagcagcctgctgggcggctcccccaccggcttcggatgcaagtccaggcccaaggcccggtccagcacaggcagggagtgtgtgaactgtggggcaacctcgaccccactgtggcggcgagatggcacgggacactacctgtgcaacgcctgcgggctctatcacaaaatgaacggacagaaccggcccctcattaagcccaagcgaaggctgtctgcagccaggagagcagggacgtcctgtgcgaactgtcagaccaccacaaccacactctggaggaggaatgccaatggggaccctgtctgcaatgcctgtgggctctactacaagcttcacaatattaacagacccctgactatgaagaaggaaggcatccagaccagaaaccgaaaaatgtctagcaaatccaaaaagtgcaaaaaagtgcatgactcactggaggacttccccaagaacagctcgtttaacccggccgccctctccagacacatgtcctccctgagccacatctcgcccttcagccactccagccacatgctgaccacgcccacgccgatgcacccgccatccagcctgtcctttggaccacaccacccctccagcatggtcaccgccatgggttagagccctgctcgatgctcacagggcccccagcgagagtccctgcagtccctttcgacttgcatttttgcaggagcagtatcatgaagcctaaacgcgatggatatatgtttttgaaggcagaaagcaaaattatgtttgccactttgcaaaggagctcactgtggtgtctgtgttccaaccactgaatctggaccccatctgtgaataagccattctgactcatatcccctatttaacagggtctctagtgctgtgaaaaaaaaaatgctgaacattgcatataacttatattgtaagaaatactgtacaatgactttattgcatctgggtagctgtaaggcatgaaggatgccaagaagtttaaggaatatgggagaaatagtgtggaaattaagaagaaactaggtctgatattcaaatggacaaactgccagttttgtttcctttcactggccacagttgtttgatgcattaaaagaaaataaaaaaaagaaaaaagagaaaagaaaaaaaaagaaaaaagttgtaggcgaatcatttgttcaaagctgttggcctctgcaaaggaaataccagttctgggcaatcagtgttaccgttcaccagttgccgttgagggtttcagagagcctttttctaggcctacatgctttgtgaacaagtccctgtaattgttgtttgtatgtataattcaaagcaccaaaataagaaaagatgtagatttatttcatcatattatacagaccgaactgttgtataaatttatttactgctagtcttaagaactgctttctttcgtttgtttgtttcaatattttccttctctctcaatttttggttgaataaactagattacattcagttggc

SEQ ID NO: 1791 - DNA, 3078 bp, Homo sapiens
  source 1..3078: mol_type = genomic DNA
ctgagctgcctggcgccgtcttgatactttcagaaagaatgcattccctgtaaaaaaaaaaaaaaaatactgagagagggagagagagagagaagaagagagagagacggagggagagcgagacagagcgagcaacgcaatctgaccgagcaggtcgtacgccgccgcctcctcctcctctctgctcttcgctacccaggtgacccgaggagggactccgcctccgagcggctgaggaccccggtgcagaggagcctggctcgcagaattgcagagtcgtcgcccctttttacaacctggtcccgttttattctgccgtacccagtttttggatttttgtcttccccttcttctctttgctaaacgacccctccaagataatttttaaaaaaccttctcctttgctcacctttgcttcccagccttcccatccccccaccgaaagcaaatcattcaacgacccccgaccctccgacggcaggagccccccgacctcccaggcggaccgccctccctccccgcgcgcgggttccgggcccggcgagagggcgcgagcacagccgaggccatggaggtgacggcggaccagccgcgctgggtgagccaccaccaccccgccgtgctcaacgggcagcacccggacacgcaccacccgggcctcagccactcctacatggacgcggcgcagtacccgctgccggaggaggtggatgtgctttttaacatcgacggtcaaggcaaccacgtcccgccctactacggaaactcggtcagggccacggtgcagaggtaccctccgacccaccacgggagccaggtgtgccgcccgcctctgcttcatggatccctaccctggctggacggcggcaaagccctgggcagccaccacaccgcctccccctggaatctcagccccttctccaagacgtccatccaccacggctccccggggcccctctccgtctaccccccggcctcgtcctcctccttgtcggggggccacgccagcccgcacctcttcaccttcccgcccaccccgccgaaggacgtctccccggacccatcgctgtccaccccaggctcggccggctcggcccggcaggacgagaaagagtgcctcaagtaccaggtgcccctgcccgacagcatgaagctggagtcgtcccactcccgtggcagcatgaccgccctgggtggagcctcctcgtcgacccaccaccccatcaccacctacccgccctacgtgcccgagtacagctccggactcttcccccccagcagcctgctgggcggctcccccaccggcttcggatgcaagtccaggcccaaggcccggtccagcacagaaggcagggagtgtgtgaactgtggggcaacctcgaccccactgtggcggcgagatggcacgggacactacctgtgcaacgcctgcgggctctatcacaaaatgaacggacagaaccggcccctcattaagcccaagcgaaggctgtctgcagccaggagagcagggacgtcctgtgcgaactgtcagaccaccacaaccacactctggaggaggaatgccaatggggaccctgtctgcaatgcctgtgggctctactacaagcttcacaatattaacagacccctgactatgaagaaggaaggcatccagaccagaaaccgaaaaatgtctagcaaatccaaaaagtgcaaaaaagtgcatgactcactggaggacttccccaagaacagctcgtttaacccggccgccctctccagacacatgtcctccctgagccacatctcgcccttcagccactccagccacatgctgaccacgcccacgccgatgcacccgccatccagcctgtcctttggaccacaccacccctccagcatggtcaccgccatgggttagagccctgctcgatgctcacagggcccccagcgagagtccctgcagtccctttcgacttgcatttttgcaggagcagtatcatgaagcctaaacgcgatggatatatgtttttgaaggcagaaagcaaaattatgtttgccactttgcaaaggagctcactgtggtgtctgtgttccaaccactgaatctggaccccatctgtgaataagccattctgactcatatcccctatttaacagggtctctagtgctgtgaaaaaaaaaatgctgaacattgcatataacttatattgtaagaaatactgtacaatgactttattgcatctgggtagctgtaaggcatgaaggatgccaagaagtttaaggaatatgggagaaatagtgtggaaattaagaagaaactaggtctgatattcaaatggacaaactgccagttttgtttcctttcactggccacagttgtttgatgcattaaaagaaaataaaaaaaagaaaaaagagaaaagaaaaaaaaagaaaaaagttgtaggcgaatcatttgttcaaagctgttggcctctgcaaaggaaataccagttctgggcaatcagtgttaccgttcaccagttgccgttgagggtttcagagagcctttttctaggcctacatgctttgtgaacaagtccctgtaattgttgtttgtatgtataattcaaagcaccaaaataagaaaagatgtagatttatttcatcatattatacagaccgaactgttgtataaatttatttactgctagtcttaagaactgctttctttcgtttgtttgtttcaatattttccttctctctcaatttttggttgaataaactagattacattcagttggcctaaggtggttgtgctcggagggtttcttgtttcttttccattttgtttttggatgatatttattaaatagcttctaagagtccggcggcatctgtcttgtccctattcctgcagcctgtgctgagggtagcagtgtatgagctaccagcgtgcatgtcagcgaccctggcccgacaggccacgtcctgcaatcggcccggctgcctcttcgccctgtcgtgttctgtgttagtgatcactgcctttaatacagtctgttggaataatattataagcataataataaagtgaaaatattttaaaacta

SEQ ID NO: 1792 - DNA, 947 bp, Homo sapiens
  source 1..947: mol_type = genomic DNA
ggcgccgtcttgatactttcagaaagaatgcattccctgtaaaaaaaaaaaaaaaatactgagagagggagagagagagagaagaagagagagagacggagggagagcgagacagagcgagcaacgcaatctgaccgagcaggtcgtacgccgccgcctcctcctcctctctgctcttcgctacccaggtgacccgaggagggactccgcctccgagcggctgaggaccccggtgcagaggagcctggctcgcagaattgcagagtcgtcgcccctttttacaacctggtcccgttttattctgccgtacccagtttttggatttttgtcttccccttcttctctttgctaaacgacccctccaagataatttttaaaaaaccttctcctttgctcacctttgcttcccagccttcccatccccccaccgaaagcaaatcattcaacgacccccgaccctccgacggcaggagccccccgacctcccaggcggaccgccctccctccccgcgcgcgggttccgggcccggcgagagggcgcgagcacagccgaggccatggaggtgacggcggaccagccgcgctgggtgagccaccaccaccccgccgtgctcaacgggcagcacccggacacgcaccacccgggcctcagccactcctacatggacgcggcgcagtacccgctgccggaggaggtggatgtgctttttaacatcgacggtcaaggcaaccacgtcccgccctactacggaaactcggtcagggccacggtgcagaggtaccctccgacccaccacgggagccaggtgtgccgcccgcctctgcttcatggatccctaccctggctggacggcggcaaagccctgggcagccaccacaccgcctccccctggaatctcagaccctgtctgcaatgcctgtgggctctactacaagcttcacaatgt

SEQ ID NO: 1793 - DNA, 1094 bp, Homo sapiens
  source 1..1094: mol_type = genomic DNA
atgcgccgagcggaactggctggtttgaaaaccatggcgtgggtaccagcggagtccgcagtggaagagttgatgcctcggctattgccggtagagccttgcgacttgacggaaggtttcgatccctcggtacccccgaggacgcctcaggaatacctgaggcgggtccagatcgaagcagctcaatgtccagatgttgtggtagctcaaattgacccaaagaagttgaaaaggaagcaaagtgtgaatatttctctttcaggatgccaacccgcccctgaaggttattccccaacacttcaatggcaacagcaacaagtggcacagttttcaactgttcgacagaatgtgaacaaacatagaagtcactggaaatcacaacagttggatagtaatgtgacaatgccaaaatctgaagatgaagaaggctggaagaaattttgtctgggtgaaaagttatgtgctgacggggctgttggaccagccacaaatgaaagtcctggaatagattatgtacaagcaacagtaactagtgtcttggaatatctgagtaattggtttggagaaagagactttactccagaattgggaagatggctttatgctttattggcttgtcttgaaaagcctttgttacctgaggctcattcactgattcggcagcttgcaagaaggtgctctgaagtgaggctcttagtggatagcaaagatgatgagagggttcctgctttgaatttattaatctgcttggttagcaggtattttgaccaacgtgatttagctgatgagccatcttgatgtagctgatctctcagggatagaagatatttctcatgaaggcagcctaactctgaggaaaacaatgccaattcaagtacagatttcaacacatcttcaacactatgtgaagggttcacatcttaacctgtgcaattcagattgatactcagaatatgggttgatttgaatatctgaaatatcaatggaaaatcccactcagtttttgatgaacagtttgaacagttttctgtaatcaagcagcttgcatagaaattgtatgatgaaattttacataggttcttggtgctgttttg

SEQ ID NO: 1794 - DNA, 1420 bp, Homo sapiens
  source 1..1420: mol_type = genomic DNA
taacgctccctaaactgccacttgctcagctccgcgcctaaggtgtctattagtacgcctgcgctgtgacctagaatgggcgcatgcgccgagcggaactggctggtttgaaaaccatggcgtgggtaccagcggagtccgcagtggaagagttgatgcctcggctattgccggtagagccttgcgacttgacggaaggtttcgatccctcggtacccccgaggacgcctcaggaatacctgaggcgggtccagatcgaagcagctcaatgtccagatgttgtggtagctcaaattgacccaaagaagttgaaaaggaagcaaagtgtgaatatttctctttcaggatgccaacccgcccctgaaggttattccccaacacttcaatggcaacagcaacaagtggcacagttttcaactgttcgacagaatgtgaacaaacatagaagtcactggaaatcacaacagttggatagtaatgtgacaatgccaaaatctgaagatgaagaaggctggaagaaattttgtctgggtgaaaagttatgtgctgacggggctgttggaccagccacaaatgaaagtcctggaatagattatgtacaaattggttttcctcccttgcttagtattgttagcagaatgaatcaggcaacagtaactagtgtcttggaatatctgagtaattggtttggagaaagagactttactccagaattgggaagatggctttatgctttattggcttgtcttgaaaagcctttgttacctgaggctcattcactgattcggcagcttgcaagaaggtgctctgaagtgaggctcttagtggatagcaaagatgatgagagggttcctgctttgaatttattaatctgcttggttagcaggtattttgaccaacgtgatttagctgatgagccatcttgatgtagctgatctctcagggatagaagatatttctcatgaaggcagcctaactctgaggaaaacaatgccaattcaagtacagatttcaacacatcttcaacactatgtgaagggttcacatcttaacctgtgcaattcagattgatactcagaatatgggttgatttgaatatctgaaatatcaatggaaaatcccactcagtttttgatgaacagtttgaacagttttctgtaatcaagcagcttgcatagaaattgtatgatgaaattttacataggttcttggtgctgttttgttctttttttgttttttgttgttttgttatttacttatatacatataaaattttattgaaaatatgttttggttactaaaattttgtttgactcctaacaaaagacaatggatggccttagcatcagaattaaaataatctggattaaatggcaatgtgttcatagtcagcaataaaattaaacatttttccctttaa

SEQ ID NO: 1795 - DNA, 801 bp, Homo sapiens
  source 1..801: mol_type = genomic DNA
atgcgccgagcggaactggctggtttgaaaaccatggcgtgggtaccagcggagtccgcagtggaagagttgatgcctcggctattgccggtagagccttgcgacttgacggaaggtttcgatccctcggtacccccgaggacgcctcaggaatacctgaggcgggtccagatcgaagcagctcaatgtccagatgttgtggtagctcaaattgacccaaagaagttgaaaaggaagcaaagtgtgaatatttctctttcaggatgccaacccgcccctgaaggttattccccaacacttcaatggcaacagcaacaagtggcacagttttcaactgttcgacagaatgtgaacaaacatagaagtcactggaaatcacaacagttggatagtaatgtgacaatgccaaaatctgaagatgaagaaggctggaagaaattttgtctgggtgaaaagttatgtgctgacggggctgttggaccagccacaaatgaaagtcctggaatagattatgtacaaattggttttcctcccttgcttagtattgttagcagaatgaatcaggcaacagtaactagtgtcttggaatatctgagtaattggtttggagaaagagactttactccagaattgggaagatggctttatgctttattggcttgtcttgaaaagcctttgttacctgaggctcattcactgattcggcagcttgcaagaaggtgctctgaagtgaggctcttagtggtattttgaccaacgtgatttagctgatgagccatcttgatgtagctgatctctcag

SEQ ID NO: 1796 - DNA, 3613 bp, Homo sapiens
  source 1..3613: mol_type = genomic DNA
gcacaccccccagcccagactccagccctggaccgcgcatcccgagcccagcgcccagacagagtgtccccacaccctcctctgagacgccatgttcaactcgatgaccccaccaccaatcagtagctatggcgagccctgctgtctccggcccctccccagtcagggggcccccagtgtggggacagaaggactgtctggcccgcccttctgccaccaagctaacctcatgtccggcccccacagttatgggccagccagagagaccaacagctgcaccgagggcccactcttttcttctccccggagtgcagtcaagttgaccaagaagcgggcactgtccatctcacctctgtcggatgccagcctggacctgcagacggttatccgcacctcacccagctccctcgtagctttcatcaactcgcgatgcacatctccaggaggctcctacggtcatctctccattggcaccatgagcccatctctgggattcccagcccagatgaatcaccaaaaagggccctcgccttcctttggggtccagccttgtggtccccatgactctgcccggggtgggatgatcccacatcctcagtcccggggacccttcccaacttgccagctgaagtctgagctggacatgctggttggcaagtgccgggaggaacccttggaaggtgatatgtccagccccaactccacaggcatacaggatcccctgttggggatgctggatgggcgggaggacctcgagagagaggagaagcgtgagcctgaatctgtgtatgaaactgactgccgttgggatggctgcagccaggaatttgactcccaagagcagctggtgcaccacatcaacagcgagcacatccacggggagcggaaggagttcgtgtgccactgggggggctgctccagggagctgaggcccttcaaagcccagtacatgctggtggttcacatgcgcagacacactggcgagaagccacacaagtgcacgtttgaagggtgccggaagtcatactcacgcctcgaaaacctgaagacgcacctgcggtcacacacgggtgagaagccatacatgtgtgagcacgagggctgcagtaaagccttcagcaatgccagtgaccgagccaagcaccagaatcggacccattccaatgagaagccgtatgtatgtaagctccctggctgcaccaaacgctatacagatcctagctcgctgcgaaaacatgtcaagacagtgcatggtcctgacgcccatgtgaccaaacggcaccgtggggatggccccctgcctcgggcaccatccatttctacagtggagcccaagagggagcgggaaggaggtcccatcagggaggaaagcagactgactgtgccagagggtgccatgaagccacagccaagccctggggcccagtcatcctgcagcagtgaccactccccggcagggagtgcagccaatacagacagtggtgtggaaatgactggcaatgcagggggcagcactgaagacctctccagcttggacgagggaccttgcattgctggcactggtctgtccactcttcgccgccttgagaacctcaggctggaccagctacatcaactccggccaatagggacccggggtctcaaactgcccagcttgtcccacaccggtaccactgtgtcccgccgcgtgggccccccagtctctcttgaacgccgcagcagcagctccagcagcatcagctctgcctatactgtcagccgccgctcctccctggcctctcctttcccccctggctccccaccagagaatggagcatcctccctgcctggccttatgcctgcccagcactacctgcttcgggcaagatatgcttcagccagagggggtggtacttcgcccactgcagcatccagcctggatcggataggtggtcttcccatgcctccttggagaagccgagccgagtatccaggatacaaccccaatgcaggggtcacccggagggccagtgacccagcccaggctgctgaccgtcctgctccagctagagtccagaggttcaagagcctgggctgtgtccataccccacccactgtggcagggggaggacagaactttgatccttacctcccaacctctgtctactcaccacagccccccagcatcactgagaatgctgccatggatgctagagggctacaggaagagccagaagttgggacctccatggtgggcagtggtctgaacccctatatggacttcccacctactgatactctgggatatgggggacctgaaggggcagcagctgagccttatggagcgaggggtccaggctctctgcctcttgggcctggtccacccaccaactatggccccaacccctgtccccagcaggcctcatatcctgaccccacccaagaaacatggggtgagttcccttcccactctgggctgtacccaggccccaaggctctaggtggaacctacagccagtgtcctcgacttgaacattatggacaagtgcaagtcaagccagaacaggggtgcccagtggggtctgactccacaggactggcaccctgcctcaatgcccaccccagtgaggggcccccacatccacagcctctcttttcccattacccccagccctctcctccccaatatctccagtcaggcccctatacccagccaccccctgattatcttccttcagaacccaggccttgcctggactttgattcccccacccattccacagggcagctcaaggctcagcttgtgtgtaattatgttcaatctcaacaggagctactgtgggagggtgggggcagggaagatgcccccgcccaggaaccttcctaccagagtcccaagtttctggggggttcccaggttagcccaagccgtgctaaagctccagtgaacacatatggacctggctttggacccaacttgcccaatcacaagtcaggttcctatcccaccccttcaccatgccatgaaaattttgtagtgggggcaaatagggcttcacatagggcagcagcaccacctcgacttctgcccccattgcccacttgctatgggcctctcaaagtgggaggcacaaaccccagctgtggtcatcctgaggtgggcaggctaggagggggtcctgccttgtaccctcctcccgaaggacaggtatgtaaccccctggactctcttgatcttgacaacactcagctggactttgtggctattctggatgagccccaggggctgagtcctcctccttcccatgatcagcggggcagctctggacataccccacctccctctgggccccccaacatggctgtgggcaacatgagtgtcttactgagatccctacctggggaaacagaattcctcaactctagtgcctaaagagtagggaatctcatccatcacagatcgcatttcctaaggggtttctatccttccagaaaaattgggggagctgcagtcccatgcacaagatgccccagggatgggaggtatgggctgggggctatgtatagtctgtatacgttttgaggagaaatttgataatgacactgtttcctgataataaaggaactgcatcag

SEQ ID NO: 1797 - DNA, 1725 bp, Homo sapiens
  source 1..1725: mol_type = genomic DNA
ctcagcccatctctgggattcccagcccagatgaatcaccaaaaagggccctcgccttcctttggggtccagccttgtggtccccatgactctgcccggggtgggatgatcccacatcctcagtcccggggacccttcccaacttgccagctgaagtctgagctggacatgctggttggcaagtgccgggaggaacccttggaaggtgatatgtccagccccaactccacaggcatacaggatcccctgttggggatgctggatgggcgggaggacctcgagagagaggagaagcgtgagcctgaatctgtgtatgaaactgactgccgttgggatggctgcagccaggaatttgactcccaagagcagctggtgcaccacatcaacagcgagcacatccacggggagcggaaggagttcgtgtgccactgggggggctgctccagggagctgaggcccttcaaagcccagtacatgctggtggttcacatgcgcagacacactggcgagaagccacacaagtgcacgtttgaagggtgccggaagtcatactcacgcctcgaaaacctgaagacgcacctgcggtcacacacgggtgagaagccatacatgtgtgagcacgagggctgcagtaaagccttcagcaatgccagtgaccgagccaagcaccagaatcggacccattccaatgagaagccgtatgtatgtaagctccctggctgcaccaaacgctatacagatcctagctcgctgcgaaaacatgtcaagacagtgcatggtcctgacgcccatgtgaccaaacggcaccgtggggatggccccctgcctcgggcaccatccatttctacagtggagcccaagagggagcgggaaggaggtcccatcagggaggaaagcagactgactgtgccagagggtgccatgcccccacatccacagcctctcttttcccattacccccagccctctcctccccaatatctccagtcaggcccctatacccagccaccccctgattatcttccttcagaacccaggccttgcctggactttgattcccccacccattccacagggcagctcaaggctcagcttgtgtgtaattatgttcaatctcaacaggagctactgtgggagggtgggggcagggaagatgcccccgcccaggaaccttcctaccagagtcccaagtttctggggggttcccaggttagcccaagccgtgctaaagctccagtgaacacatatggacctggctttggacccaacttgcccaatcacaagtcaggttcctatcccaccccttcaccatgccatgaaaattttgtagtgggggcaaatagggcttcacatagggcagcagcaccacctcgacttctgcccccattgcccacttgctatgggcctctcaaagtgggaggcacaaaccccagctgtggtcatcctgaggtgggcaggctaggagggggtcctgccttgtaccctcctcccgaaggacaggtatgtaaccccctggactctcttgatcttgacaacactcagctggactttgtggctattctggatgagccccaggggctgagtcctcctccttcccatgatcagcggggcagctctggacataccccacctccctctgggccccccaacatggctgtgggcaacatgagtgtcttactgagatccctacctggggaaacagaattcctcaactctagtgcctaa

SEQ ID NO: 1798 - DNA, 480 bp, Homo sapiens
  source 1..480: mol_type = genomic DNA
ggttaagtttaagaggctggagggatggctagctggaggtctgcgttgtagagaggtaaccccagtgtccccacaccctcctctgagacgccatgttcaactcgatgaccccaccaccaatcagtagctatggcgagccctgctgtctccggcccctccccagtcagggggcccccagtgtggggacagaaggactgtctggcccgcccttctgccaccaagctaacctcatgtccggcccccacagttatgggccagccagagagaccaacagctgcaccgagggcccactcttttcttctccccggagtgcagtcaagttgaccaagaagcgggcactgtccatctcacctctgtcggatgccagcctggacctgcagacggttatccgcacctcacccagctccctcgtagctttcatcaactcgcgatgcacatctccaggaggctcctacggtcatctctccattggcaccatga

SEQ ID NO: 1799 - DNA, 3196 bp, Homo sapiens
  source 1..3196: mol_type = genomic DNA
atgttcaactcgatgaccccaccaccaatcagtagctatggcgagccctgctgtctccggcccctccccagtcagggggcccccagtgtggggacagaagtcaagttgaccaagaagcgggcactgtccatctcacctctgtcggatgccagcctggacctgcagacggttatccgcacctcacccagctccctcgtagctttcatcaactcgcgatgcacatctccaggaggctcctacggtcatctctccattggcaccatgagcccatctctgggattcccagcccagatgaatcaccaaaaagggccctcgccttcctttggggtccagccttgtggtccccatgactctgcccggggtgggatgatcccacatcctcagtcccggggacccttcccaacttgccagctgaagtctgagctggacatgctggttggcaagtgccgggaggaacccttggaaggtgatatgtccagccccaactccacaggcatacaggatcccctgttggggatgctggatgggcgggaggacctcgagagagaggagaagcgtgagcctgaatctgtgtatgaaactgactgccgttgggatggctgcagccaggaatttgactcccaagagcagctggtgcaccacatcaacagcgagcacatccacggggagcggaaggagttcgtgtgccactgggggggctgctccagggagctgaggcccttcaaagcccagtacatgctggtggttcacatgcgcagacacactggcgagaagccacacaagtgcacgtttgaagggtgccggaagtcatactcacgcctcgaaaacctgaagacgcacctgcggtcacacacgggtgagaagccatacatgtgtgagcacgagggctgcagtaaagccttcagcaatgccagtgaccgagccaagcaccagaatcggacccattccaatgagaagccgtatgtatgtaagctccctggctgcaccaaacgctatacagatcctagctcgctgcgaaaacatgtcaagacagtgcatggtcctgacgcccatgtgaccaaacggcaccgtggggatggccccctgcctcgggcaccatccatttctacagtggagcccaagagggagcgggaaggaggtcccatcagggaggaaagcagactgactgtgccagagggtgccatgaagccacagccaagccctggggcccagtcatcctgcagcagtgaccactccccggcagggagtgcagccaatacagacagtggtgtggaaatgactggcaatgcagggggcagcactgaagacctctccagcttggacgagggaccttgcattgctggcactggtctgtccactcttcgccgccttgagaacctcaggctggaccagctacatcaactccggccaatagggacccggggtctcaaactgcccagcttgtcccacaccggtaccactgtgtcccgccgcgtgggccccccagtctctcttgaacgccgcagcagcagctccagcagcatcagctctgcctatactgtcagccgccgctcctccctggcctctcctttcccccctggctccccaccagagaatggagcatcctccctgcctggccttatgcctgcccagcactacctgcttcgggcaagatatgcttcagccagagggggtggtacttcgcccactgcagcatccagcctggatcggataggtggtcttcccatgcctccttggagaagccgagccgagtatccaggatacaaccccaatgcaggggtcacccggagggccagtgacccagcccaggctgctgaccgtcctgctccagctagagtccagaggttcaagagcctgggctgtgtccataccccacccactgtggcagggggaggacagaactttgatccttacctcccaacctctgtctactcaccacagccccccagcatcactgagaatgctgccatggatgctagagggctacaggaagagccagaagttgggacctccatggtgggcagtggtctgaacccctatatggacttcccacctactgatactctgggatatgggggacctgaaggggcagcagctgagccttatggagcgaggggtccaggctctctgcctcttgggcctggtccacccaccaactatggccccaacccctgtccccagcaggcctcatatcctgaccccacccaagaaacatggggtgagttcccttcccactctgggctgtacccaggccccaaggctctaggtggaacctacagccagtgtcctcgacttgaacattatggacaagtgcaagtcaagccagaacaggggtgcccagtggggtctgactccacaggactggcaccctgcctcaatgcccaccccagtgaggggcccccacatccacagcctctcttttcccattacccccagccctctcctccccaatatctccagtcaggcccctatacccagccaccccctgattatcttccttcagaacccaggccttgcctggactttgattcccccacccattccacagggcagctcaaggctcagcttgtgtgtaattatgttcaatctcaacaggagctactgtgggagggtgggggcagggaagatgcccccgcccaggaaccttcctaccagagtcccaagtttctggggggttcccaggttagcccaagccgtgctaaagctccagtgaacacatatggacctggctttggacccaacttgcccaatcacaagtcaggttcctatcccaccccttcaccatgccatgaaaattttgtagtgggggcaaatagggcttcacatagggcagcagcaccacctcgacttctgcccccattgcccacttgctatgggcctctcaaagtgggaggcacaaaccccagctgtggtcatcctgaggtgggcaggctaggagggggtcctgccttgtaccctcctcccgaaggacaggtatgtaaccccctggactctcttgatcttgacaacactcagctggactttgtggctattctggatgagccccaggggctgagtcctcctccttcccatgatcagcggggcagctctggacataccccacctccctctgggccccccaacatggctgtgggcaacatgagtgtcttactgagatccctacctggggaaacagaattcctcaactctagtgcct

SEQ ID NO: 1800 - DNA, 784 bp, Homo sapiens
  source 1..784: mol_type = genomic DNA
accgcacaccccccagcccagactccagccctggaccgcgcatcccgagcccagcgcccagacagaggcccactcttttcttctccccggagtgcagtcaagttgaccaagaagcgggcactgtccatctcacctctgtcggatgccagcctggacctgcagacggttatccgcacctcacccagctccctcgtagctttcatcaactcgcgatgcacatctccaggaggctcctacggtcatctctccattggcaccatgagcccatctctgggattcccagcccagatgaatcaccaaaaagggccctcgccttcctttggggtccagccttgtggtccccatgactctgcccggggtgggatgatcccacatcctcagtcccggggacccttcccaacttgccagctgaagtctgagctggacatgctggttggcaagtgccgggaggaacccttggaaggtgatatgtccagccccaactccacaggcatacaggatcccctgttggggatgctggatgggcgggaggacctcgagagagaggagaagcgtgagcctgaatctgtgtatgaaactgactgccgttgggatggctgcagccaggaatttgactcccaagagcagctggtgcaccacatcaacagcgagcacatccacggggagcggaaggagttcgtgtgccactgggggggctgctccagggagctgaggcccttcaaagcccagtacatgctggtggttcacatgcgcagacacactggcgagaagccacacaagtgca

SEQ ID NO: 1801 - DNA, 3394 bp, Homo sapiens
  source 1..3394: mol_type = genomic DNA
accgcacaccccccagcccagactccagccctggaccgcgcatcccgagcccagcgcccagacagaggcccactcttttcttctccccggagtgcagtcaagttgaccaagaagcgggcactgtccatctcacctctgtcggatgccagcctggacctgcagacggttatccgcacctcacccagctccctcgtagctttcatcaactcgcgatgcacatctccaggaggctcctacggtcatctctccattggcaccatgagcccatctctgggattcccagcccagatgaatcaccaaaaagggccctcgccttcctttggggtccagccttgtggtccccatgactctgcccggggtgggatgatcccacatcctcagtcccggggacccttcccaacttgccagctgaagtctgagctggacatgctggttggcaagtgccgggaggaacccttggaaggtgatatgtccagccccaactccacaggcatacaggatcccctgttggggatgctggatgggcgggaggacctcgagagagaggagaagcgtgagcctgaatctgtgtatgaaactgactgccgttgggatggctgcagccaggaatttgactcccaagagcagctggtgcaccacatcaacagcgagcacatccacggggagcggaaggagttcgtgtgccactgggggggctgctccagggagctgaggcccttcaaagcccagtacatgctggtggttcacatgcgcagacacactggcgagaagccacacaagtgcacgtttgaagggtgccggaagtcatactcacgcctcgaaaacctgaagacgcacctgcggtcacacacgggtgagaagccatacatgtgtgagcacgagggctgcagtaaagccttcagcaatgccagtgaccgagccaagcaccagaatcggacccattccaatgagaagccgtatgtatgtaagctccctggctgcaccaaacgctatacagatcctagctcgctgcgaaaacatgtcaagacagtgcatggtcctgacgcccatgtgaccaaacggcaccgtggggatggccccctgcctcgggcaccatccatttctacagtggagcccaagagggagcgggaaggaggtcccatcagggaggaaagcagactgactgtgccagagggtgccatgaagccacagccaagccctggggcccagtcatcctgcagcagtgaccactccccggcagggagtgcagccaatacagacagtggtgtggaaatgactggcaatgcagggggcagcactgaagacctctccagcttggacgagggaccttgcattgctggcactggtctgtccactcttcgccgccttgagaacctcaggctggaccagctacatcaactccggccaatagggacccggggtctcaaactgcccagcttgtcccacaccggtaccactgtgtcccgccgcgtgggccccccagtctctcttgaacgccgcagcagcagctccagcagcatcagctctgcctatactgtcagccgccgctcctccctggcctctcctttcccccctggctccccaccagagaatggagcatcctccctgcctggccttatgcctgcccagcactacctgcttcgggcaagatatgcttcagccagagggggtggtacttcgcccactgcagcatccagcctggatcggataggtggtcttcccatgcctccttggagaagccgagccgagtatccaggatacaaccccaatgcaggggtcacccggagggccagtgacccagcccaggctgctgaccgtcctgctccagctagagtccagaggttcaagagcctgggctgtgtccataccccacccactgtggcagggggaggacagaactttgatccttacctcccaacctctgtctactcaccacagccccccagcatcactgagaatgctgccatggatgctagagggctacaggaagagccagaagttgggacctccatggtgggcagtggtctgaacccctatatggacttcccacctactgatactctgggatatgggggacctgaaggggcagcagctgagccttatggagcgaggggtccaggctctctgcctcttgggcctggtccacccaccaactatggccccaacccctgtccccagcaggcctcatatcctgaccccacccaagaaacatggggtgagttcccttcccactctgggctgtacccaggccccaaggctctaggtggaacctacagccagtgtcctcgacttgaacattatggacaagtgcaagtcaagccagaacaggggtgcccagtggggtctgactccacaggactggcaccctgcctcaatgcccaccccagtgaggggcccccacatccacagcctctcttttcccattacccccagccctctcctccccaatatctccagtcaggcccctatacccagccaccccctgattatcttccttcagaacccaggccttgcctggactttgattcccccacccattccacagggcagctcaaggctcagcttgtgtgtaattatgttcaatctcaacaggagctactgtgggagggtgggggcagggaagatgcccccgcccaggaaccttcctaccagagtcccaagtttctggggggttcccaggttagcccaagccgtgctaaagctccagtgaacacatatggacctggctttggacccaacttgcccaatcacaagtcaggttcctatcccaccccttcaccatgccatgaaaattttgtagtgggggcaaatagggcttcacatagggcagcagcaccacctcgacttctgcccccattgcccacttgctatgggcctctcaaagtgggaggcacaaaccccagctgtggtcatcctgaggtgggcaggctaggagggggtcctgccttgtaccctcctcccgaaggacaggtatgtaaccccctggactctcttgatcttgacaacactcagctggactttgtggctattctggatgagccccaggggctgagtcctcctccttcccatgatcagcggggcagctctggacataccccacctccctctgggccccccaacatggctgtgggcaacatgagtgtcttactgagatccctacctggggaaacagaattcctcaactctagtgcctaaagagtagggaatctcatccatcacagatcgcatttcctaaggggtttctatccttccagaaaaattgggggagctgcagtcccatgcacaagatgccccagggatgggaggtatgggctgggggctatgtatagtctgtatacgttttgaggagaaatttgataatgacactgtttcctgataataaaggaactgcatc

SEQ ID NO: 1802 - DNA, 187 bp, Homo sapiens
  source 1..187: mol_type = genomic DNA
ccagcgcccagacagaggactgtctggcccgcccttctgccaccaagctaacctcatgtccggcccccacagttatgggccagccagagagaccaacagctgcaccgagggcccactcttttcttctccccggagtgcagtcaagttgaccaagaagcgggcactgtccatctcacctctgtcggat

SEQ ID NO: 1803 - DNA, 3475 bp, Homo sapiens
  source 1..3475: mol_type = genomic DNA
cccagactccagccctggaccgcgcatcccgagcccagcgcccagacagagtgtccccacaccctcctctgagacgccatgttcaactcgatgaccccaccaccaatcagtagctatggcgagccctgctgtctccggcccctccccagtcagggggcccccagtgtggggacagaagtcaagttgaccaagaagcgggcactgtccatctcacctctgtcggatgccagcctggacctgcagacggttatccgcacctcacccagctccctcgtagctttcatcaactcgcgatgcacatctccaggaggctcctacggtcatctctccattggcaccatgagcccatctctgggattcccagcccagatgaatcaccaaaaagggccctcgccttcctttggggtccagccttgtggtccccatgactctgcccggggtgggatgatcccacatcctcagtcccggggacccttcccaacttgccagctgaagtctgagctggacatgctggttggcaagtgccgggaggaacccttggaaggtgatatgtccagccccaactccacaggcatacaggatcccctgttggggatgctggatgggcgggaggacctcgagagagaggagaagcgtgagcctgaatctgtgtatgaaactgactgccgttgggatggctgcagccaggaatttgactcccaagagcagctggtgcaccacatcaacagcgagcacatccacggggagcggaaggagttcgtgtgccactgggggggctgctccagggagctgaggcccttcaaagcccagtacatgctggtggttcacatgcgcagacacactggcgagaagccacacaagtgcacgtttgaagggtgccggaagtcatactcacgcctcgaaaacctgaagacgcacctgcggtcacacacgggtgagaagccatacatgtgtgagcacgagggctgcagtaaagccttcagcaatgccagtgaccgagccaagcaccagaatcggacccattccaatgagaagccgtatgtatgtaagctccctggctgcaccaaacgctatacagatcctagctcgctgcgaaaacatgtcaagacagtgcatggtcctgacgcccatgtgaccaaacggcaccgtggggatggccccctgcctcgggcaccatccatttctacagtggagcccaagagggagcgggaaggaggtcccatcagggaggaaagcagactgactgtgccagagggtgccatgaagccacagccaagccctggggcccagtcatcctgcagcagtgaccactccccggcagggagtgcagccaatacagacagtggtgtggaaatgactggcaatgcagggggcagcactgaagacctctccagcttggacgagggaccttgcattgctggcactggtctgtccactcttcgccgccttgagaacctcaggctggaccagctacatcaactccggccaatagggacccggggtctcaaactgcccagcttgtcccacaccggtaccactgtgtcccgccgcgtgggccccccagtctctcttgaacgccgcagcagcagctccagcagcatcagctctgcctatactgtcagccgccgctcctccctggcctctcctttcccccctggctccccaccagagaatggagcatcctccctgcctggccttatgcctgcccagcactacctgcttcgggcaagatatgcttcagccagagggggtggtacttcgcccactgcagcatccagcctggatcggataggtggtcttcccatgcctccttggagaagccgagccgagtatccaggatacaaccccaatgcaggggtcacccggagggccagtgacccagcccaggctgctgaccgtcctgctccagctagagtccagaggttcaagagcctgggctgtgtccataccccacccactgtggcagggggaggacagaactttgatccttacctcccaacctctgtctactcaccacagccccccagcatcactgagaatgctgccatggatgctagagggctacaggaagagccagaagttgggacctccatggtgggcagtggtctgaacccctatatggacttcccacctactgatactctgggatatgggggacctgaaggggcagcagctgagccttatggagcgaggggtccaggctctctgcctcttgggcctggtccacccaccaactatggccccaacccctgtccccagcaggcctcatatcctgaccccacccaagaaacatggggtgagttcccttcccactctgggctgtacccaggccccaaggctctaggtggaacctacagccagtgtcctcgacttgaacattatggacaagtgcaagtcaagccagaacaggggtgcccagtggggtctgactccacaggactggcaccctgcctcaatgcccaccccagtgaggggcccccacatccacagcctctcttttcccattacccccagccctctcctccccaatatctccagtcaggcccctatacccagccaccccctgattatcttccttcagaacccaggccttgcctggactttgattcccccacccattccacagggcagctcaaggctcagcttgtgtgtaattatgttcaatctcaacaggagctactgtgggagggtgggggcagggaagatgcccccgcccaggaaccttcctaccagagtcccaagtttctggggggttcccaggttagcccaagccgtgctaaagctccagtgaacacatatggacctggctttggacccaacttgcccaatcacaagtcaggttcctatcccaccccttcaccatgccatgaaaattttgtagtgggggcaaatagggcttcacatagggcagcagcaccacctcgacttctgcccccattgcccacttgctatgggcctctcaaagtgggaggcacaaaccccagctgtggtcatcctgaggtgggcaggctaggagggggtcctgccttgtaccctcctcccgaaggacaggtatgtaaccccctggactctcttgatcttgacaacactcagctggactttgtggctattctggatgagccccaggggctgagtcctcctccttcccatgatcagcggggcagctctggacataccccacctccctctgggccccccaacatggctgtgggcaacatgagtgtcttactgagatccctacctggggaaacagaattcctcaactctagtgcctaaagagtagggaatctcatccatcacagatcgcatttcctaaggggtttctatccttccagaaaaattgggggagctgcagtcccatgcacaagatgccccagggatgggaggtatgggctgggggctatgtatagtctgtatacgttttgaggagaaatttgataatgacactgtttcctgataataaaggaactgcatc

SEQ ID NO: 1804 - DNA, 1966 bp, Homo sapiens
  source 1..1966: mol_type = genomic DNA
aaacggtcgtacacttcggggctgcgagcgcggagggcgacgacgacgaagcgcagacagcgtcatggcagagcaggtggccctgagccggacccaggtgtgcgggatcctgcgggaagagcttttccagggcgatgccttccatcagtcggatacacacatattcatcatcatgggtgcatcgggtgacctggccaagaagaagatctaccccaccatctggtggctgttccgggatggccttctgcccgaaaacaccttcatcgtgggctatgcccgttcccgcctcacagtggctgacatccgcaaacagagtgagcccttcttcaaggccaccccagaggagaagctcaagctggaggacttctttgcccgcaactcctatgtggctggccagtacgatgatgcagcctcctaccagcgcctcaacagccacatgaatgccctccacctggggtcacaggccaaccgcctcttctacctggccttgcccccgaccgtctacgaggccgtcaccaagaacattcacgagtcctgcatgagccagataggctggaaccgcatcatcgtggagaagcccttcgggagggacctgcagagctctgaccggctgtccaaccacatctcctccctgttccgtgaggaccagatctaccgcatcgaccactacctgggcaaggagatggtgcagaacctcatggtgctgagatttgccaacaggatcttcggccccatctggaaccgggacaacatcgcctgcgttatcctcaccttcaaggagccctttggcactgagggtcgcgggggctatttcgatgaatttgggatcatccgggacgtgatgcagaaccacctactgcagatgctgtgtctggtggccatggagaagcccgcctccaccaactcagatgacgtccgtgatgagaaggtcaaggtgttgaaatgcatctcagaggtgcaggccaacaatgtggtcctgggccagtacgtggggaaccccgatggagagggcgaggccaccaaagggtacctggacgaccccacggtgccccgcgggtccaccaccgccacttttgcagccgtcgtcctctatgtggagaatgagaggtgggatggggtgcccttcatcctgcgctgcggcaaggccctgaacgagcgcaaggccgaggtgaggctgcagttccatgatgtggccggcgacatcttccaccagcagtgcaagcgcaacgagctggtgatccgcgtgcagcccaacgaggccgtgtacaccaagatgatgaccaagaagccgggcatgttcttcaaccccgaggagtcggagctggacctgacctacggcaacagatacaagaacgtgaagctccctgacgcctacgagcgcctcatcctggacgtcttctgcgggagccagatgcacttcgtgcgcagcgacgagctccgtgaggcctggcgtattttcaccccactgctgcaccagattgagctggagaagcccaagcccatcccctatatttatggcagccgaggccccacggaggcagacgagctgatgaagagagtgggtttccagtatgagggcacctacaagtgggtgaacccccacaagctctgagccctgggcacccacctccacccccgccacggccaccctccttcccgccgcccgaccccgagtcgggaggactccgggaccattgacctcagctgctactacccgagcccagctacattcctcagctgccaagcactcgagaccatcctggcccctccagaccctgcctgagcccaggagctgagtcacctcctccactcactccagcccaacagaaggaaggaggagggcgcccattcgtctgtcccagagcttattggccactgggtctcactcctgagtggggccagggtgggagggagggacaagggggaggaaaggggcgagcacccacgtgagagaatctgcctgtgg

SEQ ID NO: 1805 - DNA, 1799 bp, Homo sapiens
  source 1..1799: mol_type = genomic DNA
cgagaactcgggaagccggcgagaagtgtgaggccgcggtagggccgcatcccgctccggagagaagtctgagtccgccaggctctgcaggcccgcggaagctcgacagcgtcatggcagagcaggtggccctgagccggacccaggtgtgcgggatcctgcgggaagagcttttccagggcgatgccttccatcagtcggatacacacatattcatcatcatgggtgcatcgggtgacctggccaagaagaagatctaccccaccatctggtggctgttccgggatggccttctgcccgaaaacaccttcatcgtgggctatgcccgttcccgcctcacagtggctgacatccgcaaacagagtgagcccttcttcaaggccaccccagaggagaagctcaagctggaggacttctttgcccgcaactcctatgtggctggccagtacgatgatgcagcctcctaccagcgcctcaacagccacatgaatgccctccacctggggtcacaggccaaccgcctcttctacctggccttgcccccgaccgtctacgaggccgtcaccaagaacattcacgagtcctgcatgagccagataggctggaaccgcatcatcgtggagaagcccttcgggagggacctgcagagctctgaccggctgtccaaccacatctcctccctgttccgtgaggaccagatctaccgcatcgaccactacctgggcaaggagatggtgcagaacctcatggtgctgagatttgccaacaggatcttcggccccatctggaaccgggacaacatcgcctgcgttatcctcaccttcaaggagccctttggcactgagggtcgcgggggctatttcgatgaatttgggatcatccggggacctggaagacaagggggatcaggaagtgagtcttgcagcttgtcactaggaagccttgtttggggtccccatgcccttgaaccaggtgaacagggcggggagctaaggcgagctctggcctcttccgtccccagggacgtgatgcagaaccacctactgcagatgctgtgtctggtggccatggagaagcccgcctccaccaactcagatgacgtccgtgatgagaaggtcaaggtgttgaaatgcatctcagaggtgcaggccaacaatgtggtcctgggccagtacgtggggaaccccgatggagagggcgaggccaccaaagggtacctggacgaccccacggtgccccgcgggtccaccaccgccacttttgcagccgtcgtcctctatgtggagaatgagaggtgggatggggtgcccttcatcctgcgctgcggcaaggccctgaacgagcgcaaggccgaggtgaggctgcagttccatgatgtggccggcgacatcttccaccagcagtgcaagcgcaacgagctggtgatccgcgtgcagcccaacgaggccgtgtacaccaagatgatgaccaagaagccgggcatgttcttcaaccccgaggagtcggagctggacctgacctacggcaacagatacaagaacgtgaagctccctgacgcctacgagcgcctcatcctggacgtcttctgcgggagccagatgcacttcgtgcgcagcgacgagctccgtgaggcctggcgtattttcaccccactgctgcaccagattgagctggagaagcccaagcccatcccctatatttatggcagccgaggccccacggaggcagacgagctgatgaagagagtgggtttccagtatgagggcacctacaagtgggtgaacccccacaagctctga

SEQ ID NO: 1806 - DNA, 2631 bp, Homo sapiens
  source 1..2631: mol_type = genomic DNA
agggacagcccagaggaggcgtggccacgctgccggcggaagtggagccctccgcgagcgcgcgaggccgccggggcaggcggggaaaccggacagtaggggcggggcctggccggcgatggggattcgggagcactacgcggagctgcacccgtgcccgccggaattggggatgcagagcagcggcagcgggtatggcaggcagccggcgggccggcctccagcgcaggtgcccgagaggcaggggctggcctgggatgcgcgcgcacctgccctcgccccgccccgcccgcacgaggggtggtggccgaggccccgccccgcacgcctcgcctgaggcgggtccgctcagcccaggcgcccgcccccgcccccgccgattaaatgggccggcggggctcagcccccggaaacggtcgtacacttcggggctgcgagcgcggagggcgacgacgacgaagcgcagacagcgtcatggcagagcaggtggccctgagccggacccaggtgtgcgggatcctgcgggaagagcttttccagggcgatgccttccatcagtcggatacacacatattcatcatcatgggtgcatcgggtgacctggccaagaagaagatctaccccaccatctggtggctgttccgggatggccttctgcccgaaaacaccttcatcgtgggctatgcccgttcccgcctcacagtggctgacatccgcaaacagagtgagcccttcttcaaggccaccccagaggagaagctcaagctggaggacttctttgcccgcaactcctatgtggctggccagtacgatgatgcagcctcctaccagcgcctcaacagccacatgaatgccctccacctggggtcacaggccaaccgcctcttctacctggccttgcccccgaccgtctacgaggccgtcaccaagaacattcacgagtcctgcatgagccagataggctggaaccgcatcatcgtggagaagcccttcgggagggacctgcagagctctgaccggctgtccaaccacatctcctccctgttccgtgaggaccagatctaccgcatcgaccactacctgggcaaggagatggtgcagaacctcatggtgctgagatttgccaacaggatcttcggccccatctggaaccgggacaacatcgcctgcgttatcctcaccttcaaggagccctttggcactgagggtcgcgggggctatttcgatgaatttgggatcatccgggacgtgatgcagaaccacctactgcagatgctgtgtctggtggccatggagaagcccgcctccaccaactcagatgacgtccgtgatgagaaggtcaaggtgttgaaatgcatctcagaggtgcaggccaacaatgtggtcctgggccagtacgtggggaaccccgatggagagggcgaggccaccaaagggtacctggacgaccccacggtgccccgcgggtccaccaccgccacttttgcagccgtcgtcctctatgtggagaatgagaggtgggatggggtgcccttcatcctgcgctgcggcaaggccctgaacgagcgcaaggccgaggtgaggctgcagttccatgatgtggccggcgacatcttccaccagcagtgcaagcgcaacgagctggtgatccgcgtgcagcccaacgaggccgtgtacaccaagatgatgaccaagaagccgggcatgttcttcaaccccgaggagtcggagctggacctgacctacggcaacagatacaagaacgtgaagctccctgacgcctacgagcgcctcatcctggacgtcttctgcgggagccagatgcacttcgtgcgcagcgacgagctccgtgaggcctggcgtattttcaccccactgctgcaccagattgagctggagaagcccaagcccatcccctatatttatggcagccgaggccccacggaggcagacgagctgatgaagagagtgggtttccagtatgagggcacctacaagtgggtgaacccccacaagctctgagccctgggcacccacctccacccccgccacggccaccctccttcccgccgcccgaccccgagtcgggaggactccgggaccattgacctcagctgcacattcctggccccgggctctggccaccctggcccgcccctcgctgctgctactacccgagcccagctacattcctcagctgccaagcactcgagaccatcctggcccctccagaccctgcctgagcccaggagctgagtcacctcctccactcactccagcccaacagaaggaaggaggagggcgcccattcgtctgtcccagagcttattggccactgggtctcactcctgagtggggccagggtgggagggagggacaagggggaggaaaggggcgagcacccacgtgagagaatctgcctgtggccttgcccgccagcctcagtgccacttgacattccttgtcaccagcaacatctcgagccccctggatgtcccctgtcccaccaactctgcactccatggccaccccgtgccacccgtaggcagcctctctgctataagaaaagcagacgcagcagctgggacccctcccaacctcaatgccctgccattaaatccgcaaacagcc

SEQ ID NO: 1807 - DNA, 1661 bp, Homo sapiens
  source 1..1661: mol_type = genomic DNA
cgagaactcgggaagccggcgagaagtgtgaggccgcggtagggccgcatcccgctccggagagaagtctgagtccgccaggctctgcaggcccgcggaagctcgacagcgtcatggcagagcaggtggccctgagccggacccaggtgtgcgggatcctgcgggaagagcttttccagggcgatgccttccatcagtcggatacacacatattcatcatcatgggtgcatcgggtgacctggccaagaagaagatctaccccaccatctggtggctgttccgggatggccttctgcccgaaaacaccttcatcgtgggctatgcccgttcccgcctcacagtggctgacatccgcaaacagagtgagcccttcttcaaggccaccccagaggagaagctcaagctggaggacttctttgcccgcaactcctatgtggctggccagtacgatgatgcagcctcctaccagcgcctcaacagccacatgaatgccctccacctggggtcacaggccaaccgcctcttctacctggccttgcccccgaccgtctacgaggccgtcaccaagaacattcacgagtcctgcatgagccagataggctggaaccgcatcatcgtggagaagcccttcgggagggacctgcagagctctgaccggctgtccaaccacatctcctccctgttccgtgaggaccagatctaccgcatcgaccactacctgggcaaggagatggtgcagaacctcatggtgctgagatttgccaacaggatcttcggccccatctggaaccgggacaacatcgcctgcgttatcctcaccttcaaggagccctttggcactgagggtcgcgggggctatttcgatgaatttgggatcatccgggacgtgatgcagaaccacctactgcagatgctgtgtctggtggccatggagaagcccgcctccaccaactcagatgacgtccgtgatgagaaggtcaaggtgttgaaatgcatctcagaggtgcaggccaacaatgtggtcctgggccagtacgtggggaaccccgatggagagggcgaggccaccaaagggtacctggacgaccccacggtgccccgcgggtccaccaccgccacttttgcagccgtcgtcctctatgtggagaatgagaggtgggatggggtgcccttcatcctgcgctgcggcaaggccctgaacgagcgcaaggccgaggtgaggctgcagttccatgatgtggccggcgacatcttccaccagcagtgcaagcgcaacgagctggtgatccgcgtgcagcccaacgaggccgtgtacaccaagatgatgaccaagaagccgggcatgttcttcaaccccgaggagtcggagctggacctgacctacggcaacagatacaagaacgtgaagctccctgacgcctacgagcgcctcatcctggacgtcttctgcgggagccagatgcacttcgtgcgcagcgacgagctccgtgaggcctggcgtattttcaccccactgctgcaccagattgagctggagaagcccaagcccatcccctatatttatggcagccgaggccccacggaggcagacgagctgatgaagagagtgggtttccagtatgagggcacctacaagtgggtgaacccccacaagctctga

SEQ ID NO: 1808 - DNA, 817 bp, Homo sapiens
  source 1..817: mol_type = genomic DNA
acttcggggctgcgagcgcggagggcgacgacgacgaagcgcagcgtcatggcagagcaggtggccctgagccggacccaggtgtgcgggatcctgcgggaagagcttttccagggcgatgccttccatcagtcggatacacacatattcatcatcatgggtgcatcgggtgacctggccaagaagaagatctaccccaccatctggtggctgttccgggatggccttctgcccgaaaacaccttcatcgtgggctatgcccgttcccgcctcacagtggctgacatccgcaaacagagtgagcccttcttcaaggccaccccagaggagaagctcaagctggaggacttctttgcccgcaactcctatgtggctggccagtacgatgatgcagcctcctaccagcgcctcaacagccacatgaatgccctccacctggggtcacaggccaaccgcctcttctacctggccttgcccccgaccgtctacgaggccgtcaccaagaacattcacgagtcctgcatgagccagataggctggaaccgcatcatcgtggagaagcccttcgggagggacctgcagagctctgaccggctgtccaaccacatctcctccctgttccgtgaggaccagatctaccgcatcgaccactacctgggcaaggagatggtgcagaacctcatggtgctgagatttgccaacaggatcttcggccccatctggaaccgggacaacatcgcctgcgttatcctcaccttcaaggagccctttggcactgagggtcgcgggggctatttcgatgaatttgggatcatcc

SEQ ID NO: 1809 - DNA, 1636 bp, Homo sapiens
  source 1..1636: mol_type = genomic DNA
aaaggtggctgggagcgccggacacctcagacggacggtggccagggatcaggcagcggctcaggcgaccctgagtgtgcccccaccccgccatggcccggctgctgcaggcgtcctgcctgctttccctgctcctggccggcttcgtctcgcagagccggggacaagagaagtcgaagatggactgccatggtggcataagtggcaccatttacgagtacggagccctcaccattgatggggaggagtacatccccttcaagcagtatgctggcaaatacgtcctctttgtcaacgtggccagctactgaggcctgacgggccagtacattgaactgaatgcactacaggaagagcttgcaccattcggtctggtcattctgggctttccctgcaaccaatttggaaaacaggaaccaggagagaactcagagatccttcctaccctcaagtatgtccgaccaggtggaggctttgtccctaatttccagctctttgagaaaggggatgtcaatggagagaaagagcagaaattctacactttcctaaagaactcctgtcctcccacctcggagctcctgggtacatctgaccgcctcttctgggaacccatgaaggttcacgacatccgctggaactttgagaagttcctggtggggccagatggtatacccatcatgcgctggcaccaccggaccacggtcagcaacgtcaagatggacatcctgtcctacatgaggcggcaggcagccctgggggtcaagaggaagtaactgaaggccgtctcatcccatgtccaccatgtaggggagggactttgttcaggaagaaatccgtgtctccaaccacactatctacccatcacagacccctttcctatcactcaaggccccagcctggcacaaatggatgcatacagttctgtgtactgccaggcatgtgggtgtgggtgcatgtgggtgtttacacacatgcctacaggtatgcgtgattgtgtgtgtgtgcatgggtgtacagccacgtgtctacctatgtgtctttctgggaatgtgtaccatctgtgtgcctgcagctgtgtagtgctggacagtgacaaccctttctctccagttctccactccaatgataatagttcacttacacctaaacccaaaggaaaaaccagctctaggtccaattgttctgctctaactgatacctcaaccttggggccagcatctcccactgcctccaaatattagtaactatgactgacgtccccagaagtttctgggtctaccacactccccaaccccccactcctacttcctgaagggccctcccaaggctacatccccaccccacagttctccctgagagagatcaacctccctgagatcaaccaaggcagatgtgacagcaagggccacggaccccatggcaggggtggcgtcttcatgagggaggggcccaaagcccttgtgggcggacctcccctgagcctgtctgaggggccagcccttagtgcattcaggctaaggcccctgggcagggatgccacccctgctccttcggaggacgtgccctcacccctcactggtccactggcttgagactcaccccgtctgcccagtaaaagcctttctgcagcagctga

SEQ ID NO: 1810 - DNA, 1478 bp, Homo sapiens
  source 1..1478: mol_type = genomic DNA
tcagacggacggtggccagggatcaggcagcggctcaggcgaccctgagtgtgcccccaccccgccatggcccggctgctgcaggcgtcctgcctgctttccctgctcctggccggcttcgtctcgcagagccggggacaagagaagtcgaagatggactgccatggtggcataagtggcaccatttacgagtacggagccctcaccattgatggggaggagtacatccccttcaagcagtatgctggcaaatacgtcctctttgtcaacgtggccagctactgaggcctgacgggccagtacattgaactgaatgcactacaggaagagcttgcaccattcggtctggtcattctgggctttccctgcaaccaatttggaaaacaggaaccaggagagaactcagagatccttcctaccctcaagtatgtccgaccaggtggaggctttgtccctaatttccagctctttgagaaaggggatgtcaatggagagaaagagcagaaattctacactttcctaaagaactcctgtcctcccacctcggagctcctgggtacatctgaccgcctcttctgggaacccatgaaggttcacgacatccgctggaactttgagaagttcctggtggggccagatggtatacccatcatgcgctggcaccaccggaccacggtcagcaacgtcaagatggacatcctgtcctacatgaggcggcaggcagccctgggggtcaagaggaagtaactgaaggccgtctcatcccatgtccaccatgtaggggagggactttgttcaggaagaaatccgtgtctccaaccacactatctacccatcacagacccctttcctatcactcaaggccccagcctggcacaaatggatgcatacagttctgtgtactgccaggcatgtgggtgtgggtgcatgtgggtgtttacacacatgcctacaggtatgcgtgattgtgtgtgtgtgcatgggtgtacagccacgtgtctacctatgtgtctttctgggaatgtgtaccatctgtgtgcctgcagctgtgtagtgctggacagtgacaaccctttctctccagttctccactccaatgataatagttcacttacacctaaacccaaaggaaaaaccagctctaggtccaattgttctgctctaactgatacctcaaccttggggccagcatctcccactgcctccaaatattagtaactatgactgacgtccccagaagtttctgggtctaccacactccccaaccccccactcctacttcctgaagggccctcccaaggctacatccccaccccacagttctccctgagagagatcaacctccctgagatcaaccaaggcagatgtgacagcaagggccacggaccccatgctccttcggaggacgtgccctcacccctcactggtccactggcttgagactcaccccgtctgcccagtaaaagcctttctgcagc

SEQ ID NO: 1811 - DNA, 965 bp, Homo sapiens
  source 1..965: mol_type = genomic DNA
tgggaaagagggaaaggcttccccggccagctgcgcggcgactccggggactccagggcgcccctctgcggccgacgcccggggtgcagcggccgccggggctggggccggcgggagtccgcgggaccctccagaagagcggccggcgccgtgactcagcactggggcggagcggggcgggaccacccttataaggctcggaggccgcgaggccttcgctggagtttcgccgccgcagtcttcgccaccatgccgccctacaccgtggtctatttcccagttcgaggccgctgcgcggccctgcgcatgctgctggcagatcagggccagagctggaaggaggaggtggtgaccgtggagacgtggcaggagggctcactcaaagcctcctgcctatacgggcagctccccaagttccaggacggagacctcaccctgtaccagtccaataccatcctgcgtcacctgggccgcacccttgggctctatgggaaggaccagcaggaggcagccctggtggacatggtgaatgacggcgtggaggacctccgctgcaaatacatctccctcatctacaccaactatgaggcgggcaaggatgactatgtgaaggcactgcccgggcaactgaagccttttgagaccctgctgtcccagaaccagggaggcaagaccttcattgtgggagaccagatctccttcgctgactacaacctgctggacttgctgctgatccatgaggtcctagcccctggctgcctggatgcgttccccctgctctcagcatatgtggggcgcctcagtgcccggcccaagctcaaggccttcctggcctcccctgagtacgtgaacctccccatcaatggcaacgggaaacagtgagggttggggggactctgagcgggaggcagagtttgccttcctttctccaggaccaataaaatttctaagagagctactatgag

SEQ ID NO: 1812 - DNA, 5801 bp, Homo sapiens
  source 1..5801: mol_type = genomic DNA
ttttttttttttgggtggcggggggttgcaagtgggaagcctgctgttcagctgccggggctctccgcctccccccacctgtatgaggctgggtctggggaacctgtgctcagcattccaccccctggagcttgggcttggtcttccctgcgggtccctgcgctgacattcaggcggggagccaggaggcctggcgcgcctccagagcccgccgggggagccgggcgagggttctgggctctgacggcggggtcgcagggtcgcccgcctcctggacacgtctgtaggcctagggaagcctgccggccgggaggtacagagtaggagaagccagatcccagggcggacaacgagaagtcgtcaggctaagaaatggcatttcaaaaggcagtgaaagggacgattcttgttggaggaggtgctcttgcaactgttttaggactttctcagtttgctcattacagaaggaaacaaatgaacctggcctatgttaaagcagcagactgcatttcagaaccagttaacagggagcctccttccagagaagctcagctactgactttgcaaaacacatctgaatttgatatccttgttattggaggaggagcaacaggaagtggctgtgcgctagatgctgtcaccagaggactaaaaacagcccttgtagaaagagatgatttctcatcagggaccagcagcagaagcactaaattgatccatggtggtgtgagatatctgcagaaggccatcatgaagttggatattgagcagtataggatggtaaaagaagcccttcatgagcgtgccaacctgctagaaattgctccccatttatcagctccattgcctataatgcttccagtttacaagtggtggcagttaccttactactgggtaggaatcaagctgtatgatttggttgcaggaagcaattgcctaaaaagcagttatgtcctcagcaaatcaagagcccttgaacatttcccaatgctccagaaggacaaactggtaggagcaattgtctactatgacggacaacataacgatgcacggatgaaccttgccattgctctgactgctgccaggtatggggctgccacagccaattacatggaggtagtgagcttgctcaagaagacagacccccagacagggaaagtgcgtgtgagcggcgcacggtgcaaggatgtcctcacagggcaggaatttgacgtgagagccaaatgtgttatcaatgccacgggacctttcacggactctgtgcgcaaaatggatgataaagacgcagcagctatctgccagccaagtgctggtgtccatattgtgatgcctggttattacagcccagagagcatgggacttcttgacccagcgaccagtgatgggcgagttattttcttcttaccctggcaaaagatgacgatcgctggcactactgatactccaactgatgttacacaccatccaattccttcagaagaagatatcaacttcattttgaatgaagtgcgtaattacctgagttgtgatgttgaagtgagaagaggggatgtcctggcagcatggagtggaatccgtcctcttgttacagaccccaaatctgcagatactcagtctatctcccgaaatcatgttgttgatatcagtgagagtggccttattactatagcaggtggaaagtggacaacttatcggtctatggcagaagataccataaatgctgctgtcaaaactcataatttaaaagcaggaccaagtagaacagttgggcttttccttcaagggggtaaagattggagccccacactctacattaggcttgtgcaggattatggacttgaaagcgaggtggcacagcatcttgccgccacctatggtgataaggcctttgaggtggccaaaatggcaagtgtgactggcaaaaggtggcctattgttggagtacgtcttgtgtcagaatttccatatattgaagcagaggtgaaatatgggattaaggagtatgcctgcactgctgtggatatgatttcacgtcgtactcgcctggcctttctaaatgtccaggcagcagaggaagccctacccaggattgttgaactgatgggcagggaactgaattgggatgattataagaagcaggaacaacttgaaacagccaggaagtttctatattatgaaatgggctataaatctcgatcagaacagttaacagatcgctctgaaattagcctactgccttcagacattgacaggtataagaagagatttcataagtttgatgcagaccagaaaggctttattaccattgttgatgttcagcgtgtattagagagtatcaatgtccaaatggatgaaaatacactccatgaaattctaaatgaagttgatttgaataaaaatggacaggttgaactcaatgaatttttgcagctgatgagtgctattcaaaaaggaagggtatctggaagccggcttgctatactaatgaaaactgcagaagagaacctcgacagaagagttccaattccagtggaccgtagttgtggaggattgtgagtctgggcagtaaatccacagccaacaaacatagaaacgacaaatcaccatgtaacaaccagagatgactgaaaccactctgaaataatgaatgtggatagctgccttttttaacactagaaaacattccaaaactttaaggtgttggtgtatttgccagctttatttgctgtactttatttgtatttgccattcagtctagcttttaagtatatttttttctttttctcattttcaatgcacattagttttgcatctgttttgtgacctgttagatgtgacacattctctttttgtttattcccttattctaaatgagttctaaaaacataatattttggcaaaaattgaaaaaagctggagacattttgtgacatgcatacagatagcatgtgttattaaaaagagttgcctattgaaatgatcatgtttctggagaaattaagcttatagacagcatgtgttattaaaaagagttacctattgaaatgatagtgtttctggagatttctcagccccatcttcctccagcttgtctaccttcctcatgcaaacaatattccacatttttatatctagagcatgactggctaactggagagggaaggaaaagtttagatctggttactggagcaagtctcaaagagaaactctgaaagcttccagaatcacaggtataagataaggatagcattgacatttgctgggagttacagtgatagtttcatctcagcagttcatttttttcttcagtcactgctggttttctttgactattatagttgccaggaagatccttgctcttcttactttaaaaccagcatttaagtggcaatttggatgtaataggatgagaccaaatttatctaattattacagtagtaatacatttaagagttaaaaatgtgtttttatatatccacatatgataacaaaagattcaattcccaagcctaaattttgaagcatgtggtattgtcaaatctagcttaccatcttttttgggggtacttgcaaccatagtaaaggaagatggaatagactttagttaactttaattataattatatgttaaataaggcacataaccagtttccaaggtcatcatggttgcttaaagtctttccccttctgtactccatggaaatattctcagtaaaccaaaaacaaaaatggaaaaataatcaccaacccccatcccgacacacacacagagtccaaagcaaaagtcagtgtgtattgaatttaacaagtaatgcagtttgggatgcttttgctacattttggtggcattttaactagttatctgaatatttattaatcgtacttcctcttgtaaagttaactacttacttttttgttgttgtttttttaacatcaggttctgtatctaataggagatgtaacactttatttcatggcaggtttttattgcagagacttgaagtcttagttttttaaactggcacataaaacactttttgctgttatttttatttatgtcaatactgcagagtatctttatgccttattcaagtggattctgagcctgtatgtcacaatgtaaacactggaggttcactcacctacgcactcacccaccacctctgaaagaaacagaaactgcagagaaagacagcatcttagctcattttgtttttaaatgaggttttagacgcttgccacttcctaagggaaatcctaaaacagagcaagtgatgctcccaggtatcactgtgaacttttttctttcaaagtgtgaatttttacactggctttttcatttttttaaagtaattgaagcttgtggctttacaacttagtgttttttgctatccagataacaagtttcattgtttagaacccagtgacacttaataggtagataaattgtcctttaaaatatcccagatgatatacacaatatggtacatttgtgctctctctctctgtttttctctctttctctttctagttagatcaagataacgatgacttgtaccctccctgattctgttacagtagggcccgggcagatctgtgtttgttaaacaggccttgtttgtgcatgctttgctatgaatgaagttcctttaaggacaaagaaaagcacacttttcttcttttgagcatatctgcttttactttaaatctgctaatttctaaaatgtagagtccttcaccaatcccagagactcaatttggaaatgaactgatttcaagccgttactgtgaataaagcaccccagcattttgtataagctcttaattaaacctgtacagcttctttacctgatttaagaaagggagacaagcaataggggggaataagcttcttcaaaattcattccaagcacaaaagaaattttttccctttgcatataaacttgacatcagttgattctgttggggtcggggtgggtatgcagggattgccttttattatcaagtgatttatttcaagagcctttgaggggattcaggtgaaggaacccccatctgtgctggagagttggatactcctttaaatagcccccaccacagtcataacaataatgataatgctggattatttgttaagccaaggttgtctgcctcatatccatcatgctgtttgcaatattcttgctttcaatcaatttatactgagtgtaactttaggatttctgctattaaatgcatgctctctatcctgcttcagtttctggctttgctttgtctgtttcaaaatatgtagcttcctcttttgtacaacaaaaaactcattctcacttttactaaatatactgtaggagtcatcattgatgttatttttctcttatgtatctgtaaagatttttggcatatgaatgtaatattaaagtcaatgatgctataacttgcgatgtttgcatcatgtcaacctttttgaaggagtgaaaaagccctactatgtttttaaatagcaagtgtaagctcagtgctagagtggatatacacaccgcatgttttcatatgtggcacttttatgtatcatgttgggttattgttctagactggactgttaaatactatgtttgaggctgggttgtcatttttataactgtcttggtgttttatggccattatttattacttttgatacacagaatgagctgcatgcatttatagagcaataagaggatgtatttaatgtgccttgtttttaactgaataagaactggaagcatgaatcaataaaactgattaaaatggtctatttgcta

SEQ ID NO: 1813 - DNA, 1939 bp, Homo sapiens
  source 1..1939: mol_type = genomic DNA
cagggcggacaacgagaagtcgtcaggctaagaaatggcatttcaaaaggcagtgaaagggacgattcttgttggaggaggtgctcttgcaactgttttaggactttctcagtttgctcattacagaaggaaacaagacaacataacgatgcacggatgaaccttgccattgctctgactgctgccaggtatggggctgccacagccaattacatggaggtagtgagcttgctcaagaagacagacccccagacagggaaagtgcgtgtgagcggcgcacggtgcaaggatgtcctcacagggcaggaatttgacgtgagagccaaatgtgttatcaatgccacgggacctttcacggactctgtgcgcaaaatggatgataaagacgcagcagctatctgccagccaagtgctggtgtccatattgtgatgcctggttattacagcccagagagcatgggacttcttgacccagcgaccagtgatgggcgagttattttcttcttaccctggcaaaagatgacgatcgctggcactactgatactccaactgatgttacacaccatccaattccttcagaagaagatatcaacttcattttgaatgaagtgcgtaattacctgagttgtgatgttgaagtgagaagaggggatgtcctggcagcatggagtggaatccgtcctcttgttacagaccccaaatctgcagatactcagtctatctcccgaaatcatgttgttgatatcagtgagagtggccttattactatagcaggtggaaagtggacaacttatcggtctatggcagaagataccataaatgctgctgtcaaaactcataatttaaaagcaggaccaagtagaacagttgggcttttccttcaagggggtaaagattggagccccacactctacattaggcttgtgcaggattatggacttgaaagcgaggtggcacagcatcttgccgccacctatggtgataaggcctttgaggtggccaaaatggcaagtgtgactggcaaaaggtggcctattgttggagtacgtcttgtgtcagaatttccatatattgaagcagaggtgaaatatgggattaaggagtatgcctgcactgctgtggatatgatttcacgtcgtactcgcctggcctttctaaatgtccaggcagcagaggaagccctacccaggattgttgaactgatgggcagggaactgaattgggatgattataagaagcaggaacaacttgaaacagccaggaagtttctatattatgaaatgggctataaatctcgatcagaacagttaacagatcgctctgaaattagcctactgccttcagacattgacaggtataagaagagatttcataagtttgatgcagaccagaaaggctttattaccattgttgatgttcagcgtgtattagagagtatcaatgtccaaatggatgaaaatacactccatgaaattctaaatgaagttgatttgaataaaaatggacaggttgaactcaatgaatttttgcagctgatgagtgctattcaaaaaggaagggtatctggaagccggcttgctatactaatgaaaactgcagaagagaacctcgacagaagagttccaattccagtggaccgtagttgtggaggattgtgagtctgggcagtaaatccacagccaacaaacatagaaacgacaaatcaccatgtaacaaccagagatgactgaaaccactctgaaataatgaatgtggatagctgccttttttaacactagaaaacattccaaaactttaaggtgttggtgtatttgccagctttatttgctgtactttatttgtatttgccattcagtctagcttttaagtatatttttttctttttctcattttcaatgcacattagttttgcatctgttttgtgacctgttagatgtg

SEQ ID NO: 1814 - DNA, 2397 bp, Homo sapiens
  source 1..2397: mol_type = genomic DNA
agtcacaacactcatatcctagggaccaccacactgctatgagtcaggcatgtgcgttgtttaaggctaagaaatggcatttcaaaaggcagtgaaagggacgattcttgttggaggaggtgctcttgcaactgttttaggactttctcagtttgctcattacagaaggaaacaaatgaacctggcctatgttaaagcagcagactgcatttcagaaccagttaacagggagcctccttccagagaagctcagctactgactttgcaaaacacatctgaatttgatatccttgttattggaggaggagcaacaggaagtggctgtgcgctagatgctgtcaccagaggactaaaaacagcccttgtagaaagagatgatttctcatcagggaccagcagcagaagcactaaattgatccatggtggtgtgagatatctgcagaaggccatcatgaagttggatattgagcagtataggatggtaaaagaagcccttcatgagcgtgccaacctgctagaaattgctccccatttatcagctccattgcctataatgcttccagtttacaagtggtggcagttaccttactactgggtaggaatcaagctgtatgatttggttgcaggaagcaattgcctaaaaagcagttatgtcctcagcaaatcaagagcccttgaacatttcccaatgctccagaaggacaaactggtaggagcaattgtctactatgacggacaacataacgatgcacggatgaaccttgccattgctctgactgctgccaggtatggggctgccacagccaattacatggaggtagtgagcttgctcaagaagacagacccccagacagggaaagtgcgtgtgagcggcgcacggtgcaaggatgtcctcacagggcaggaatttgacgtgagagccaaatgtgttatcaatgccacgggacctttcacggactctgtgcgcaaaatggatgataaagacgcagcagctatctgccagccaagtgctggtgtccatattgtgatgcctggttattacagcccagagagcatgggacttcttgacccagcgaccagtgatgggcgagttattttcttcttaccctggcaaaagatgacgatcgctggcactactgatactccaactgatgttacacaccatccaattccttcagaagaagatatcaacttcattttgaatgaagtgcgtaattacctgagttgtgatgttgaagtgagaagaggggatgtcctggcagcatggagtggaatccgtcctcttgttacagaccccaaatctgcagatactcagtctatctcccgaaatcatgttgttgatatcagtgagagtggccttattactatagcaggtggaaagtggacaacttatcggtctatggcagaagataccataaatgctgctgtcaaaactcataatttaaaagcaggaccaagtagaacagttgggcttttccttcaagggggtaaagattggagccccacactctacattaggcttgtgcaggattatggacttgaaagcgaggtggcacagcatcttgccgccacctatggtgataaggcctttgaggtggccaaaatggcaagtgtgactggcaaaaggtggcctattgttggagtacgtcttgtgtcagaatttccatatattgaagcagaggtgaaatatgggattaaggagtatgcctgcactgctgtggatatgatttcacgtcgtactcgcctggcctttctaaatgtccaggcagcagaggaagccctacccaggattgttgaactgatgggcagggaactgaattgggatgattataagaagcaggaacaacttgaaacagccaggaagtttctatattatgaaatgggctataaatctcgatcagaacagttaacagatcgctctgaaattagcctactgccttcagacattgacaggtataagaagagatttcataagtttgatgcagaccagaaaggctttattaccattgttgatgttcagcgtgtattagagagtatcaatgtccaaatggatgaaaatacactccatgaaattctaaatgaagttgatttgaataaaaatggacaggttgaactcaatgaatttttgcagctgatgagtgctattcaaaaaggaagggtatctggaagccggcttgctatactaatgaaaactgcagaagagaacctcgacagaagagttccaattccagtggaccgtagttgtggaggattgtgagtctgggcagtaaatccacagccaacaaacatagaaacgacaaatcaccatgtaacaaccagagatgactgaaaccactctgaaataatgaatgtggatagctgccttttttaacactagaaaacattccaaaactttaa

SEQ ID NO: 1815 - DNA, 2640 bp, Homo sapiens
  source 1..2640: mol_type = genomic DNA
agtcacaacactcatatcctagggaccaccacactgctatgagtcaggcatgtgcgttgtttaaggctaagaaatggcatttcaaaaggcagtgaaagggacgattcttgttggaggaggtgctcttgcaactgttttaggactttctcagtttgctcattacagaaggaaacaaatgaacctggcctatgttaaagcagcagactgcatttcagaaccagttaacagggagcctccttccagagaagctcagctactgactttgcaaaacacatctgaatttgatatccttgttattggaggaggagcaacaggaagtggctgtgcgctagatgctgtcaccagaggactaaaaacagcccttgtagaaagagatgatttctcatcagggaccagcagcagaagcactaaattgatccatggtggtgtgagatatctgcagaaggccatcatgaagttggatattgagcagtataggatggtaaaagaagcccttcatgagcgtgccaacctgctagaaattgctccccatttatcagctccattgcctataatgcttccagtttacaagtggtggcagttaccttactactgggtaggaatcaagctgtatgatttggttgcaggaagcaattgcctaaaaagcagttatgtcctcagcaaatcaagagcccttgaacatttcccaatgctccagaaggacaaactggtaggagcaattgtctactatgacggacaacataacgatgcacggatgaaccttgccattgctctgactgctgccaggtatggggctgccacagccaattacatggaggtagtgagcttgctcaagaagacagacccccagacagggaaagtgcgtgtgagcggcgcacggtgcaaggatgtcctcacagggcaggaatttgacgtgagagccaaatgtgttatcaatgccacgggacctttcacggactctgtgcgcaaaatggatgataaagacgcagcagctatctgccagccaagtgctggtgtccatattgtgatgcctggttattacagcccagagagcatgggacttcttgacccagcgaccagtgatgggcgagttattttcttcttaccctggcaaaagatgacgatcgctggcactactgatactccaactgatgttacacaccatccaattccttcagaagaagatatcaacttcattttgaatgaagtgcgtaattacctgagttgtgatgttgaagtgagaagaggggatgtcctggcagcatggagtggaatccgtcctcttgttacagaccccaaatctgcagatactcagtctatctcccgaaatcatgttgttgatatcagtgagagtggccttattactatagcaggtggaaagtggacaacttatcggtctatggcagaagataccataaatgctgctgtcaaaactcataatttaaaagcaggaccaagtagaacagttgggcttttccttcaagggggtaaagattggagccccacactctacattaggcttgtgcaggattatggacttgaaagcgaggtggcacagcatcttgccgccacctatggtgataaggcctttgaggtggccaaaatggcaagtgtgactggcaaaaggtggcctattgttggagtacgtcttgtgtcagaatttccatatattgaagcagaggtgaaatatgggattaaggagtatgcctgcactgctgtggatatgatttcacgtcgtactcgcctggcctttctaaatgtccaggcagcagaggaagccctacccaggattgttgaactgatgggcagggaactgaattgggatgattataagaagcaggaacaacttgaaacagccaggaagtttctatattatgaaatgggctataaatctcgatcagaacagttaacagatcgctctgaaattagcctactgccttcagacattgacaggtataagaagagatttcataagtttgatgcagaccagaaaggctttattaccattgttgatgttcagcgtgtattagagagtatcaatgtccaaatggatgaaaatacactccatgaaattctaaatgaagttgatttgaataaaaatggacaggttgaactcaatgaatttttgcagctgatgagtgctattcaaaaaggaagggtatctggaagccggcttgctatactaatgaaaactgcagaagagaacctcgacagaagagttccaattccagtggaccgtagttgtggaggattatgagatttaaaatcattttgatgatttctctaagattatgttgagtttctaaaacttggtttgtgttaaatctgttcattgatttggagactgacagatataaaagatgtaaaacttttttacatgttcatagccttctatgaagagtgtggaagaatcacaacaatgaagagaagatatgtttcttggggagcatgttcaatctaattcaagtagatacatggagtcgtgaagataaattctgatcacaccgcattctggtcatcattacctagttgaagaggtttattggagaagaactatcagtgttttaaagcagtggtcttcaaacgggggcacacaaagactttccaaggggggtacataaatataaatagttttaaggt

SEQ ID NO: 1816 - DNA, 456 bp, Homo sapiens
  source 1..456: mol_type = genomic DNA
attagtacagcacccagaggtcttcggagcaaagctgttaaagaagtggggtccatttgagccccaactttgccttccttaggtccccttgggcttgtctagccctaggagttccaacaagctaagaaatggcatttcaaaaggcagtgaaagggacgattcttgttggaggaggtgctcttgcaactgttttaggactttctcagtttgctcattacagaaggaaacaaatgaacctggcctatgttaaagcagcagactgcatttcagaaccagttaacagggagcctccttccagagaagctcagctactgactttgcaaaacacatctgaatttgatatccttgttattggaggaggagcaacaggaagtggctgtgcgctagatgctgtcaccagaggactaaaaacagcccttgtagaaagagatgatttctcatcagggaccagcagca

SEQ ID NO: 1817 - DNA, 2457 bp, Homo sapiens
  source 1..2457: mol_type = genomic DNA
cccgcgcgcctcgctgggagcacccgggccgaggctctgattctggggggaggccgactccaccctggctggaggaactgggtgctcctgcccgctggcccctcgcgcgtgaggatctatctcaggctaagaaatggcatttcaaaaggcagtgaaagggacgattcttgttggaggaggtgctcttgcaactgttttaggactttctcagtttgctcattacagaaggaaacaaatgaacctggcctatgttaaagcagcagactgcatttcagaaccagttaacagggagcctccttccagagaagctcagctactgactttgcaaaacacatctgaatttgatatccttgttattggaggaggagcaacaggaagtggctgtgcgctagatgctgtcaccagaggactaaaaacagcccttgtagaaagagatgatttctcatcagggaccagcagcagaagcactaaattgatccatggtggtgtgagatatctgcagaaggccatcatgaagttggatattgagcagtataggatggtaaaagaagcccttcatgagcgtgccaacctgctagaaattgctccccatttatcagctccattgcctataatgcttccagtttacaagtggtggcagttaccttactactgggtaggaatcaagctgtatgatttggttgcaggaagcaattgcctaaaaagcagttatgtcctcagcaaatcaagagcccttgaacatttcccaatgctccagaaggacaaactggtaggagcaattgtctactatgacggacaacataacgatgcacggatgaaccttgccattgctctgactgctgccaggtatggggctgccacagccaattacatggaggtagtgagcttgctcaagaagacagacccccagacagggaaagtgcgtgtgagcggcgcacggtgcaaggatgtcctcacagggcaggaatttgacgtgagagccaaatgtgttatcaatgccacgggacctttcacggactctgtgcgcaaaatggatgataaagacgcagcagctatctgccagccaagtgctggtgtccatattgtgatgcctggttattacagcccagagagcatgggacttcttgacccagcgaccagtgatgggcgagttattttcttcttaccctggcaaaagatgacgatcgctggcactactgatactccaactgatgttacacaccatccaattccttcagaagaagatatcaacttcattttgaatgaagtgcgtaattacctgagttgtgatgttgaagtgagaagaggggatgtcctggcagcatggagtggaatccgtcctcttgttacagaccccaaatctgcagatactcagtctatctcccgaaatcatgttgttgatatcagtgagagtggccttattactatagcaggtggaaagtggacaacttatcggtctatggcagaagataccataaatgctgctgtcaaaactcataatttaaaagcaggaccaagtagaacagttgggcttttccttcaagggggtaaagattggagccccacactctacattaggcttgtgcaggattatggacttgaaagcgaggtggcacagcatcttgccgccacctatggtgataaggcctttgaggtggccaaaatggcaagtgtgactggcaaaaggtggcctattgttggagtacgtcttgtgtcagaatttccatatattgaagcagaggtgaaatatgggattaaggagtatgcctgcactgctgtggatatgatttcacgtcgtactcgcctggcctttctaaatgtccaggcagcagaggaagccctacccaggattgttgaactgatgggcagggaactgaattgggatgattataagaagcaggaacaacttgaaacagccaggaagtttctatattatgaaatgggctataaatctcgatcagaacagttaacagatcgctctgaaattagcctactgccttcagacattgacaggtataagaagagatttcataagtttgatgcagaccagaaaggctttattaccattgttgatgttcagcgtgtattagagagtatcaatgtccaaatggatgaaaatacactccatgaaattctaaatgaagttgatttgaataaaaatggacaggttgaactcaatgaatttttgcagctgatgagtgctattcaaaaaggaagggtatctggaagccggcttgctatactaatgaaaactgcagaagagaacctcgacagaagagttccaattccagtggaccgtagttgtggaggattgtgagtctgggcagtaaatccacagccaacaaacatagaaacgacaaatcaccatgtaacaaccagagatgactgaaaccactctgaaataatgaatgtggatagctgccttttttaacactagaaaacattccaaaactttaa

SEQ ID NO: 1818 - DNA, 1961 bp, Homo sapiens
  source 1..1961: mol_type = genomic DNA
ggcccctcgcgcgtgaggatctatctcaggctaagaaatggcatttcaaaaggcagtgaaagggacgattcttgttggaggaggtgctcttgcaactgttttaggactttctcagtttgctcattacagaaggaaacaaatgaacctggcctatgttaaagcagcagactgcatttcagaaccagttaacagggagcctccttccagagaagctcagctactgactttgcaaaacacatctgaatttgatatccttgttattggaggaggagcaacaggaagtggctgtgcgctagatgctgtcaccagaggactaaaaacagcccttgtagaaagagatgatttctcatcagggaccagcagcagaagcactaaattgatccatggtggtgtgagatatctgcagaaggccatcatgaagttggatattgagcagtataggatggtaaaagaagcccttcatgagcgtgccaacctgctagaaattgctccccatttatcagctccattgcctataatgcttccagtttacaagtggtggcagttaccttactactgggtaggaatcaagctgtatgatttggttgcaggaagcaattgcctaaaaagcagttatgtcctcagcaaatcaagagcccttgaacatttcccaatgctccagaaggacaaactggtaggagcaattgtctactatgacggacaacataacgatgcacggatgaaccttgccattgctctgactgctgccaggtatggggctgccacagccaattacatggaggtagtgagcttgctcaagaagacagacccccagacagggaaagtgcgtgtgagcggcgcacggtgcaaggatgtcctcacagggcaggaatttgacgtgagagccaaatgtgttatcaatgccacgggacctttcacggactctgtgcgcaaaatggatgataaagacgcagcagctatctgccagccaagtgctggtgtccatattgtgatgcctggttattacagcccagagagcatgggacttcttgacccagcgaccagtgatgggcgagttattttcttcttaccctggcaaaagatgacgatcgctggcactactgatactccaactgatgttacacaccatccaattccttcagaagaagatatcaacttcattttgaatgaagtataagaagagatttcataagtttgatgcagaccagaaaggctttattaccattgttgatgttcagcgtgtattagagagtatcaatgtccaaatggatgaaaatacactccatgaaattctaaatgaagttgatttgaataaaaatggacaggttgaactcaatgaatttttgcagctgatgagtgctattcaaaaaggaagggtatctggaagccggcttgctatactaatgaaaactgcagaagagaacctcgacagaagagttccaattccagtggaccgtagttgtggaggattgtgagtctgggcagtaaatccacagccaacaaacatagaaacgacaaatcaccatgtaacaaccagagatgactgaaaccactctgaaataatgaatgtggatagctgccttttttaacactagaaaacattccaaaactttaaggtgttggtgtatttgccagctttatttgctgtactttatttgtatttgccattcagtctagcttttaagtatatttttttctttttctcattttcaatgcacattagttttgcatctgttttgtgacctgttagatgtgacacattctctttttgtttattcccttattctaaatgagttctaaaaacataatattttggcaaaaattgaaaaaagctggagacattttgtgacatgcatacagatagcatgtgttattaaaaagagttgcctattgaaatgatcatgtttctggagaaattaagcttatagacagcatgtgttattaaaaagagttacctattg

SEQ ID NO: 1819 - DNA, 7711 bp, Homo sapiens
  source 1..7711: mol_type = genomic DNA
cgggcttgtgccgccgccgccgccgccgccgcccgggccaagtgacaaaggaaggaaggaagcgaggaggagccggccccgcagccgctgacagggctctgggctggggcaaagcgcggacacttcctgagcgggcaccgagcagagccgaggggcgggagggcggccgagctgttgccgcggacgggggagggggccccgagggacggaagcggttgccgggttcccatgtccccggcgaatggggaacagtcgaggagccgctgcctggggtctgaagggagctgcctccgccaccgccatggccgctggatccagccgccgcctgcagctgctcctggcgcaatgaggagaggagccgccgccaccgccaccgcccgcctctgactgactcgcgactccgccgccctctagttcgccgggcccctgccgtcagcccgccggatcccgcggcttgccggagctgcagcgtttcccgtcgcatctccgagccaccccctccctccctctccctccctcctacccatccccctttctcttcaagcgtgagactcgtgatccttccgccgcttcccttcttcattgactcggaaaaaaaatccccgaggaaaatataatattcgaagtactcattttcaatcaagtatttgcccccgtttcacgtgatacatatttttttaggatttgccctctcttttctctcctcccaggaaagggaggggaaagaattgtattttttcccaagtcctaaatcatctatatgttaaatatccgtgccgatctgtcttgaaggagaaatatatcgcttgttttgttttttatagtatacaaaaggagtgaaaagccaagaggacgaagtctttttctttttcttctgtgggagaacttaatgctgcatttatcgttaacctaacaccccaacataaagacaaaaggaagaaaaggaggaaggaaggaaaaggtgattcgcgaagagagtgatcatgtcagggcggcccagaaccacctcctttgcggagagctgcaagccggtgcagcagccttcagcttttggcagcatgaaagttagcagagacaaggacggcagcaaggtgacaacagtggtggcaactcctgggcagggtccagacaggccacaagaagtcagctatacagacactaaagtgattggaaatggatcatttggtgtggtatatcaagccaaactttgtgattcaggagaactggtcgccatcaagaaagtattgcaggacaagagatttaagaatcgagagctccagatcatgagaaagctagatcactgtaacatagtccgattgcgttatttcttctactccagtggtgagaagaaagatgaggtctatcttaatctggtgctggactatgttccggaaacagtatacagagttgccagacactatagtcgagccaaacagacgctccctgtgatttatgtcaagttgtatatgtatcagctgttccgaagtttagcctatatccattcctttggaatctgccatcgggatattaaaccgcagaacctcttgttggatcctgatactgctgtattaaaactctgtgactttggaagtgcaaagcagctggtccgaggagaacccaatgtttcgtatatctgttctcggtactatagggcaccagagttgatctttggagccactgattatacctctagtatagatgtatggtctgctggctgtgtgttggctgagctgttactaggacaaccaatatttccaggggatagtggtgtggatcagttggtagaaataatcaaggtcctgggaactccaacaagggagcaaatcagagaaatgaacccaaactacacagaatttaaattccctcaaattaaggcacatccttggactaaggtcttccgaccccgaactccaccggaggcaattgcactgtgtagccgtctgctggagtatacaccaactgcccgactaacaccactggaagcttgtgcacattcattttttgatgaattacgggacccaaatgtcaaactaccaaatgggcgagacacacctgcactcttcaacttcaccactcaagaactgtcaagtaatccacctctggctaccatccttattcctcctcatgctcggattcaagcagctgcttcaacccccacaaatgccacagcagcgtcagatgctaatactggagaccgtggacagaccaataatgctgcttctgcatcagcttccaactccacctgaacagtcccgagcagccagctgcacaggaaaaaccaccagttacttgagtgtcactcagcaacactggtcacgtttggaaagaatattaaaaagagaaaaaaatcctgttcattttagtgttcaatttttttattattattgttgttcttatttaaccttgtaaaatatctataaatacaaaccaatttcattgtattctcactttgagggagatccagggggtgggaggggttgtggggagggggaaagcggagcactagaacatacaatctctctcccacgacaatctttttttattaaaagtctgctgttgtatactttaaaaacaggactcctgcctcatgccccttccacaaaagaagaaaacctttttctgtgctgatgggtttttttgaactttgttttcttttaaagtctagtgtgagactttggtatagtgcacagcttgaaattggttgggagcttagcaggtataactcaacggggacttaaatgtcacttgtaaaattaatccatatcttcgggtatttatagacttgcctttggcatgttggtggcaggtgtggcagacaaagaaatgtgtatcattcgtaacccagggaggtcaataaagtttggaactctacagggaagattcttagtagatttgttaaggttttgttttgctctcagttagtgctagtgatgtagaggcttgtacaggaggctgccagaggggaagcagcaagcaagactcaggcacacatgctctacaggtggctctttgtttgcctgaccaaagttctttgcaaatcttagcacagtttcaaactagtgacctgggaggagatggaaggggtgttgagcaggctgagctagctgctgaggtcaaaggctgatgagcccagaggaaggggacaggtcagggatacatctcaccactgtgaataagtttgtccagatttttttctaaagttacttcccttggaaagatacacttgagaggacattgtagttaaataatgtgaactgtaacagtcatctactggtttatttttcatattttttaattgaaaattgagcttgcagaaatagccacattctacacatagttctaattttaaatccaaatctagaatctgtatttaatttgttttttaacctcatgctttttacatttatttattgatgcatgtcagatggtagaaatattaaaaactacacatcagaatgatacagtcacttatacctgctgactttataggaaagctgatgatataaatgtgtgtatatatgttatatatacatatattcaatactgcctttttttttgtctacagtatcaaaattgactggttgaagcatgagaagaatgtttcccccacacccagttaagagtttttgtgtctgttttctttgtgtatcagtgaacgatgttaagaatcagtctctctttttgaagaaaaagcaatattccttggaaagcaaggagaattgaaggactatgtttgccgtgaggaaatagattttcatgactagtttgttttatacttttaaggttggcatctatgtgggccttatatactctaaaatgaactttagtcaccttggtgcttatgggccattacttgacctatgaatctttaaggcacaatcagttgtactttacatttaaagatcacttgagtgatggccgcctttccctcctacccgctccttccccacatgccttccaaggttagctggtaactgtagggctgcagagctgagcccatggttgtgtgtaacttgccctcaccctcctcattgccaccttaggtcactttatgggtctcgtcctccagagggttcggaagtggagtctgttggcagccctcctgcaggccctagcaccctgtcctgctccttaactgtgtgtgtgactctccaagagagttgtcctgcctgctgaagtgaaccagtacccagaaagacaactgtgagccatcttggttttcactcgctgtttagctgaggtcttgggccacaaaaggggtttcacaaacctctggatatatcagagtttatgagaaaggaaacatgctcagtcaaaccaaatcaaacaaattgaattttatgttttataaagtgcttctgaaagctaagatttgaaagaagtctgaaatcaaagtatttggcagcataactccttaaaggtagtggcgttgatagaccattttcagacagaatttataaagaatctgaaaaggcaggtctgtgatagagaaatggacctgcattcagatccaactgcccagcaagcgtttggatgcagacactgctctggacgtggtatactccccagagtccataaaaatcagtgcttattttaggaaacaggttgccccccacaactggggtaaaagaagagagaaaagtcacgcttttctctcatttcattgtgtgtgcatgtgtgcgtgtgtgtgtgtgtgtgtgtgtgctgagatgtgtgatttttctttctcaaggatcatggtgggatcacagaactcttttatacaagtgagatccaggtctctgaatatctttttgtatataataataataaaaagctcctcaccaaattcaagcttgtacattatattttctttctgtgtttttaaatttaagttttattgttttgtatgtaaatatgtggacccaggaactgttattaatgagcaaaaagttactgttcagggcagtgattctgtttaataatcagacaaaatgtagacgagctttttaaagccatatagttttaactctgtacagtaggtaccggcctgtattattgtaacaataactctagcaatgtatagtgtatctatatagtttggagtgccttcgcttccatgtgtttttttttttaatttgttcttttttaaattttaattggtttcctttatccatgtctccctgtccaccccctttccctttgaaataataactcactcataacagtatctttgccccttccacagttaagtttcagtgataccatactcaggagtgggaagaggaaatcatattcgtaatttcatttcgttgaagccctgcctttgttttggttctgaatgtctttcctcctcggtagcagtgagaccggtttcatttcatacttagtccattcagggacttagtgtagcaccagggagccctagagctggaggatatcgaatagattaaattttgctcgtctcttccacaagccctaaccatgggtcttaaaaacagcagattctgggagccttccatgctctctctctctcctcttttatctacttccctcccaaatgagagagtgacagagaattgtttttttataaatcgaagtttcttaatagtatcaggttttgatacgtcagtggtctaaaatgctatagtgcaattactagcagttactgcacggagtgccaccgtgccaatagaggactgttgttttaacaagggaactcttagcccatttcctccctcccgccatctctacccttgctcaatgaaatatcattttaatttcttttaaaaaaaatcagtttaattcttactgtgtgcccaacacgaaggccttttttgaaagaaaaatagaatgttttgcctcaaagtagtccatataaaatgtcttgaatagaagaaaaaactaccaaaccaaaggttactatttttgaaacatcgtgtgttcattccagcaaggcagaagactgcaccttctttccagtgacatgctgtgtcattttttttaagtcctcttaatttttagacacatttttggtttatgttttaacaatgtatgcctaaccagtcatcttgtctgcaccaatgcaaaggtttctgagaggagtattctctatccctgtggatatgaagacactggcatttcatctatttttccctttcctttttaaaggatttaactttggaatcttccaaaggaagtttggccaatgccagatccccaggaatttggggggttttctttcttttcaactgaaattgtatctgattcctactgttcatgttagtgatcatctaatcacagagccaaacacttttctcccctgtgtggaaaagtaggtatgctttacaataaaatctgtcttttctggtagaaacctgagccactgaaaataaaagagacaactagaagcacagtagagtcccagactgagatctacctttgagaggctttgaaagtaatccctggggtttggattattttcacaagggttatgccgttttattcaagtttgttgctccgttttgcacctctgcaataaaagcaaaatgacaaccagtacataaggggttagcttgacaaagtagacttccttgtgttaatttttaagtttttttttccttaactatatctgtctacaggcagatacagatagttgtatgaaaatctgcttgcctgtaaaatttgcatttataaatgtgttgccgatggatcacttgggcctgtacacataccaattagcgtgaccacttccatcttaaaaacaaacctaaaaaacaaaatttattatatatatatatatatatatataaaggactgtgggttgtatacaaactattgcaaacacttgtgcaaatctgtcttgatataaaggaaaagcaaaatctgtataacattattactacttgaatgcctctgtgactgatttttttttcattttaaatataaacttttttgtgaaaagtatgctcaatgttttttttccctttccccattcccttgtaaatacattttgttctatgtgacttggtttggaaatagttaactggtactgtaatttgcattaaataaaaagtaggttagcctggaaatgaaattaaaattcacaagtgtgtggtctttatttcagtacccaaccctcttccttcaccctactattttgccgctgcaatatgtagtcacatcaccatttccattcctctaattagggaaacattaatctttgttatacagaacaagatatcaataccacttcttgttctttccaatgattttattccattgtgtagccccaagaggtgcagcttccaccttggaaacctttggatttgatgtagaggaagctttgcagacactgcttagaaaagaaagaaaacaactctgaaagggacagtttttaaatgtgtataagctgctgtctttgattactgtgttcatgatttggtgtggctgtattttcttttaactttcatcctattagtaatggtctttgggggtctctgtaaaatatatggacaccacgaacagtggggctgtacctcccaggtaaccaacacatgttgtgtttgagtctgctcatttccaatactggatgatgtatgtaaacatgttatgtctcttagtgcaaaaagaaacatcatttttttagggctggctcactctgtcaggcctaatctaaaggctagatataaggtcatgtgactgctgcttcaataaaaacaaatttatattc

SEQ ID NO: 1820 - DNA, 1636 bp, Homo sapiens
  source 1..1636: mol_type = genomic DNA
atcatctatatgttaaatatccgtgccgatctgtcttgaaggagaaatatatcgcttgttttgttttttatagtatacaaaaggagtgaaaagccaagaggacgaagtctttttctttttcttctgtgggagaacttaatgctgcatttatcgttaacctaacaccccaacataaagacaaaaggaagaaaaggaggaaggaaggaaaaggtgattcgcgaagagagtgatcatgtcagggcggcccagaaccacctcctttgcggagagctgcaagccggtgcagcagccttcagcttttggcagcatgaaagttagcagagacaaggacggcagcaaggtgacaacagtggtggcaactcctgggcagggtccagacaggccacaagaagtcagctatacagacactaaagtgattggaaatggatcatttggtgtggtatatcaagccaaactttgtgattcaggagaactggtcgccatcaagaaagtattgcaggacaagagatttaagaatcgagagctccagatcatgagaaagctagatcactgtaacatagtccgattgcgttatttcttctactccagtggtgagaagaaagatgaggtctatcttaatctggtgctggactatgttccggaaacagtatacagagttgccagacactatagtcgagccaaacagacgctccctgtgatttatgtcaagttgtatatgtatcagctgttccgaagtttagcctatatccattcctttggaatctgccatcgggatattaaaccgcagaacctcttgttggatcctgatactgctgtattaaaactctgtgactttggaagtgcaaagcagctggtccgaggagaacccaatgtttcgtatatctgttctcggtactatagggcaccagagttgatctttggagccactgattatacctctagtatagatgtatggtctgctggctgtgtgttggctgagctgttactaggacaaccaatatttccaggggatagtggtgtggatcagttggtagaaataatcaaggtcctgggaactccaacaagggagcaaatcagagaaatgaacccaaactacacagaatttaaattccctcaaattaaggcacatccttggactaaggattcgtcaggaacaggacatttcacctcaggagtgcgggtcttccgaccccgaactccaccggaggcaattgcactgtgtagccgtctgctggagtatacaccaactgcccgactaacaccactggaagcttgtgcacattcattttttgatgaattacgggacccaaatgtcaaactaccaaatgggcgagacacacctgcactcttcaacttcaccactcaagaactgtcaagtaatccacctctggctaccatccttattcctcctcatgctcggattcaagcagctgcttcaacccccacaaatgccacagcagcgtcagatgctaatactggagaccgtggacagaccaataatgctgcttctgcatcagcttccaactccacctgaacagtcccgagcagccagctgcacaggaaaaaccaccagttacttgagtgtcactcagcaacactggtcacgtttggaaagaatattaaaaagagaaaaaaa

SEQ ID NO: 1821 - DNA, 1607 bp, Homo sapiens
  source 1..1607: mol_type = genomic DNA
actcattttcaatcaagtatttgcccccgtttcacgtgatacatatttttttaggatttgccctctcttttctctcctcccaggaaagggaggggaaagaattgtattttttcccaagtcctaaatcatctatatgttaaatatccgtgccgatctgtcttgaaggagaaatatatcgcttgttttgttttttatagtatacaaaaggagtgaaaagccaagaggacgaagtctttttctttttcttctgtgggagaacttaatgctgcatttatcgttaacctaacaccccaacataaagacaaaaggaagaaaaggaggaaggaaggaaaaggtgattcgcgaagagagtgatcatgtcagggcggcccagaaccacctcctttgcggagagctgcaagccggtgcagcagccttcagcttttggcagcatgaaagttagcagagacaaggacggcagcaaggtgacaacagtggtggcaactcctgggcagggtccagacaggccacaagaagtcagctatacagacactaaagtgattggaaatggatcatttggtgtggtatatcaagccaaactttgtgattcaggagaactggtcgccatcaagaaagtattgcaggacaagagatttaagaatcgagagctccagatcatgagaaagctagatcactgtaacatagtccgattgcgttatttcttctactccagtggtgagaagaaagatgaggtctatcttaatctggtgctggactatgttccggaaacagtatacagagttgccagacactatagtcgagccaaacagacgctccctgtgatttatgtcaagttgtatatgtatcagctgttccgaagtttagcctatatccattcctttggaatctgccatcgggatattaaaccgcagaacctcttgttggatcctgatactgctgtattaaaactctgtgactttggaagtgcaaagcagctggtccgaggagaacccaatgtttcgtatatctgttctcggtactatagggcaccagagttgatctttggagccactgattatacctctagtatagatgtatggtctgctggctgtgtgttggctgagctgttactaggacaaccaatatttccaggggatagtggtgtggatcagttggtagaaataatcaaggtcctgggaactccaacaagggagcaaatcagagaaatgaacccaaactacacagaatttaaattccctcaaattaaggcacatccttggactaaggtcttccgaccccgaactccaccggaggcaattgcactgtgtagccgtctgctggagtatacaccaactgcccgactaacaccactggaagcttgtgcacattcattttttgatgaattacgggacccaaatgtcaaactaccaaatgggcgagacacacctgcactcttcaacttcaccactcaagatgctaatactggagaccgtggacagaccaataatgctgcttctgcatcagcttccaactccacctgaacagtcccgagcagccagctgcacaggaaaaaccaccagttacttgagtgtcactcagcaacactggtcacgtttggaaagaatatt

SEQ ID NO: 1822 - DNA, 2854 bp, Homo sapiens
  source 1..2854: mol_type = genomic DNA
gagaagcaggacctcgggccatggattctactgaagaaaggtagccatggaagagaatatggaagagggacagacacaaaaagggtgttttgaatgctgtatcaaatgcctggggggcattccctatgcctctctgattgccaccatcctgctctatgcgggtgttgccctgttctgtggctgcggtcatgaagcgctttctggaactgtcaacattctgcaaacctactttgagatggcaagaactgctggagacacactggatgtttttaccatgattgacatctttaagtatgtgatctacggcatcgcagctgcgttctttgtgtatggcattttgctgatggtggaaggtttcttcacaactggggccatcaaagatctctatggggatttcaaaatcaccacttgtggcagatgtgtgagcgcttggttcattatgctgacatatcttttcatgttggcctggctgggagtcacggctttcacctcactgccagtttacatgtacttcaatctgtggaccatctgccggaacaccacattagtggagggagcaaatctctgcttggaccttcgtcagtttggaattgtgacaattggagaggaaaagaaaatttgtactgtctctgagaatttcttgaggatgtgcgaatctactgagctgaacatgaccttccacttgtttattgtggcacttgctggagctggggcagcagtcattgctatggttcactaccttatggttctgtctgccaactgggcctatgtgaaagacgcctgccggatgcagaagtatgaagacatcaagtcgaaggaagagcaagagcttcatgacatccactctactcgctccaaagagcggctcaatgcatacacataaatgcatcttcctgttctttctaccatttgaatgcattggtgtttaactaagggccatccaaccatccaacctttaaaaaacaaaacgaaagtgcttctcatcaatgatatgtaaggtgacttatgaatcacctgagtacaattctttgttgtttagcacttaaatttcccaatttattaaattgatgtaaatcagatcttttctacaagctcctatccagccttttttttgaaatttctcaaactcatttactagttctgtaaaatcaaagatactaacattgtcaaatgcaaagatttgtttgatttttaaccacttcccatgtgttatacataacaccttttgcattatttcttatgttttgaaaagaaaatagctttttatactttttagttttgatttcggtaactagtttaactacaggtaaccttcaaagggaccattgtacattatgaacaatagatagagattacatcttgatgactcttgaaatatggaaattttgtctgaagatcagtggccatattactgtaggccctggttcatgttttcatcaatctaaggtgcaatttctaaatttgtaagagtaggtttaaaaaaaaaagtgcttcttatctttgttaacattgtacttttccttgatgttcttaaaaggtatttccctcagattactcatgtttatgttgtgagcatgtagaaacagtaatgctaatgcatggctagttgcctttttaagattgtgacaccaggcttaccttttaaagtttagtatatagagacaattttaatggaaataactactgtagactattgaagaatgatctctttgtgatttaagaagtggctggattggaacttttaatatgctaatgtggaaaattaattacctttatgaaggtggtttattacaaataagcacactaacccctcggaagttgttttacctactttaaaagttttaatggattgcacctctgtaaactattcctaaaatgtgtatgatatatttgaaaaggcttccattaatataatagctttgcttgcagccttccaatctatgttggtttacctgtagtgttttataaagtgtggtcagaggcccctatagaatgtattgtttgaaagtgtagtgatatatttgtgtttttatttcaagtaagtcattttaaccgaatgttcattcatattcatttataaaaagtacctgtatcaaaggaattttaacaaagagcaatcagtattattggaccaaatttggtgtttgttttcaccttgacgctcttcttttcattatttctaatgctacaagaatgctgtaaagtgtcttctaaaatgatgtagcctgacaagacatttttttcagtgtataaaactaggtagtattgtgcactgatttgaccattgtgaaatcctttctcagtgtaactgcatttctaataaaaatttattgagtgaaacaatctttgtacaatgactagtcatgcatcatcagtaattttacaagttcttgtagtaggtagggggtactactagggatatctgtggcatgattatgcattccgtagtattatttaattaatttggggttcattttgcttccttttctttatgcttagattatcttactggttcaacatttttctgatatatgcagtattacagatattcagcaaaagtattaatgggcttctttaaattctatattatagtatttcagttccgtgtcttaacagtttgtgataatttctaaaactgtcttttcaacttatgtaatgatgttgacacttttggcttttatttctggtattagagtttgtattttcacagagtgctttgtagcaggcattacaattaatctgttttgtacataaatgtgccaacagcttgatggtggcgtttttgaaatgtagaacagagtgcttgcaaaatgtaataaatacacttgtgtactttgtgtacttattattagct

SEQ ID NO: 1823 - DNA, 2821 bp, Homo sapiens
  source 1..2821: mol_type = genomic DNA
actctggaatgaaggggggaattacgggttggtggtcggcttcatgttaggaggacacccctccatctgttcacagctcagcctgtttccaatttaaagcccagatttcaatacaaacctcaatttcttttccccattttaaatgcaaagcaagacttgtgaatcatagtgtctctgctcctgggattcagaccaaatttccccccaaaattctcaggctatttgtttgaatacctgcttacagtggtacacaatgggcagctttgagaagaaaaattgataatcttcacggaagagtaatttgaatgaaattacacttgacagcctgtctccaagcaaacaagaggaacgagggagcctgagctaagctctgaggacttgcccaagccactgctgttggagcttcccaggaaaaaaaaaaaaaaaaaaaaaaaaaaaaaaaaaaaaaaacccccagtttttccaacatctaattgagcttttgattaattccgtgtaccagattctactgaagaaaggtagccatggaagagaatatggaagagggacagacacaaaaagggtgttttgaatgctgtatcaaatgcctggggggcattccctatgcctctctgattgccaccatcctgctctatgcgggtgttgccctgttctgtggctgcggtcatgaagcgctttctggaactgtcaacattctgcaaacctactttgagatggcaagaactgctggagacacactggatgtttttaccatgattgacatctttaagtatgtgatctacggcatcgcagctgcgttctttgtgtatggcattttgctgatggtggaaggtttcttcacaactggggccatcaaagatctctatggggatttcaaaatcaccacttgtggcagatgtgtgagcgcttggttcattatgctgacatatcttttcatgttggcctggctgggagtcacggctttcacctcactgccagtttacatgtacttcaatctgtggaccatctgccggaacaccacattagtggagggagcaaatctctgcttggaccttcgtcagtttggaattgtgacaattggagaggaaaagaaaatttgtactgtctctgagaatttcttgaggatgtgcgaatctactgagctgaacatgaccttccacttgtttattgtggcacttgctggagctggggcagcagtcattgctatggttcactaccttatggttctgtctgccaactgggcctatgtgaaagacgcctgccggatgcagaagtatgaagacatcaagtcgaaggaagagcaagagcttcatgacatccactctactcgctccaaagagcggctcaatgcatacacataaatgcatcttcctgttctttctaccatttgaatgcattggtgtttaactaagggccatccaaccatccaacctttaaaaaacaaaacgaaagtgcttctcatcaatgatatgtaaggtgacttatgaatcacctgagtacaattctttgttgtttagcacttaaatttcccaatttattaaattgatgtaaatcagatcttttctacaagctcctatccagccttttttttgaaatttctcaaactcatttactagttctgtaaaatcaaagatactaacattgtcaaatgcaaagatttgtttgatttttaaccacttcccatgtgttatacataacaccttttgcattatttcttatgttttgaaaagaaaatagctttttatactttttagttttgatttcggtaactagtttaactacaggtaaccttcaaagggaccattgtacattatgaacaatagatagagattacatcttgatgactcttgaaatatggaaattttgtctgaagatcagtggccatattactgtaggccctggttcatgttttcatcaatctaaggtgcaatttctaaatttgtaagagtaggtttaaaaaaaaaagtgcttcttatctttgttaacattgtacttttccttgatgttcttaaaaggtatttccctcagattactcatgtttatgttgtgagcatgtagaaacagtaatgctaatgcatggctagttgcctttttaagattgtgacaccaggcttaccttttaaagtttagtatatagagacaattttaatggaaataactactgtagactattgaagaatgatctctttgtgatttaagaagtggctggattggaacttttaatatgctaatgtggaaaattaattacctttatgaaggtggtttattacaaataagcacactaacccctcggaagttgttttacctactttaaaagttttaatggattgcacctctgtaaactattcctaaaatgtgtatgatatatttgaaaaggcttccattaatataatagctttgcttgcagccttccaatctatgttggtttacctgtagtgttttataaagtgtggtcagaggcccctatagaatgtattgtttgaaagtgtagtgatatatttgtgtttttatttcaagtaagtcattttaaccgaatgttcattcatattcatttataaaaagtacctgtatcaaaggaattttaacaaagagcaatcagtattattggaccaaatttggtgtttgttttcaccttgacgctcttcttttcattatttctaatgctacaagaatgctgtaaagtgtcttctaaaatgatgtagcctgacaagacatttttttcagtgtataaaactaggtagtattgtgcactgatttgaccattgtgaaatcctttctcagtgtaactgcatttctaataaaaatttattgagtgaaacaa

SEQ ID NO: 1824 - DNA, 555 bp, Homo sapiens
  source 1..555: mol_type = genomic DNA
agttgggattgagattggaaaagagcacaattaaaactagaggactctcatgggaacaagtagtcctcttgggtgtatgcatgtgtacgtgaatctgattggaggtggaagaatggcatgtaggagagaaaaaccagtgttctgaggcagcaggtgttctgtaagacagaccaggaagaggtagtaaggcagccagaaagctaccatggtacaccagagaagccaaattattcttgaggtacccactgagcttgtcagctgcaatggctaagagcttctcaaggaataactactgtcctgaaattagaatgacttttttctgtatgtttctgttttaattacttattctggttaatgcctcctaacaaagatcatcaggaaatctgtatttgaataagttcggtacatttcgatgatggagaatgcacatcataagaaagcgtggagcacctcagtaagagggtgttagaaaggatttattacagatttggacttgcattagattctactgaagaaaggtagccatggaagagaatatggaagagggacagacac

SEQ ID NO: 1825 - DNA, 2614 bp, Homo sapiens
  source 1..2614: mol_type = genomic DNA
gggtgctgagacaacgtgtgtgtctgtaatgtgcattcaatgtatttaggagagagactttgcacgtgtctctaatgaaagtgaaagggggcagggtgggggcctctggggaggagacccacagtgaaggggaggaaaacgggcttctcgcagaggaggcaggtggaaagagggaggggtctgtgcgcccgcagagtcgccaggcgccctgcgagttgtctccgctgggaggggcgaggctgtcacttgccagggcgcgaggagcctcagcgcggcttggagaacttggccccgcgcagcgtctggtcactcgctctcctctggggactgcagagaagcaggacctcgggccatggggtgttttgaatgctgtatcaaatgcctggggggcattccctatgcctctctgattgccaccatcctgctctatgcgggtgttgccctgttctgtggctgcggtcatgaagcgctttctggaactgtcaacattctgcaaacctactttgagatggcaagaactgctggagacacactggatgtttttaccatgattgacatctttaagtatgtgatctacggcatcgcagctgcgttctttgtgtatggcattttgctgatggtggaaggtttcttcacaactggggccatcaaagatctctatggggatttcaaaatcaccacttgtggcagatgtgtgagcgcttggttcattatgctgacatatcttttcatgttggcctggctgggagtcacggctttcacctcactgccagtttacatgtacttcaatctgtggaccatctgccggaacaccacattagtggagggagcaaatctctgcttggaccttcgtcagtttggaattgtgacaattggagaggaaaagaaaatttgtactgtctctgagaatttcttgaggatgtgcgaatctactgagctgaacatgaccttccacttgtttattgtggcacttgctggagctggggcagcagtcattgctatggttcactaccttatggttctgtctgccaactgggcctatgtgaaagacgcctgccggatgcagaagtatgaagacatcaagtcgaaggaagagcaagagcttcatgacatccactctactcgctccaaagagcggctcaatgcatacacataaatgcatcttcctgttctttctaccatttgaatgcattggtgtttaactaagggccatccaaccatccaacctttaaaaaacaaaacgaaagtgcttctcatcaatgatatgtaaggtgacttatgaatcacctgagtacaattctttgttgtttagcacttaaatttcccaatttattaaattgatgtaaatcagatcttttctacaagctcctatccagccttttttttgaaatttctcaaactcatttactagttctgtaaaatcaaagatactaacattgtcaaatgcaaagatttgtttgatttttaaccacttcccatgtgttatacataacaccttttgcattatttcttatgttttgaaaagaaaatagctttttatactttttagttttgatttcggtaactagtttaactacaggtaaccttcaaagggaccattgtacattatgaacaatagatagagattacatcttgatgactcttgaaatatggaaattttgtctgaagatcagtggccatattactgtaggccctggttcatgttttcatcaatctaaggtgcaatttctaaatttgtaagagtaggtttaaaaaaaaaagtgcttcttatctttgttaacattgtacttttccttgatgttcttaaaaggtatttccctcagattactcatgtttatgttgtgagcatgtagaaacagtaatgctaatgcatggctagttgcctttttaagattgtgacaccaggcttaccttttaaagtttagtatatagagacaattttaatggaaataactactgtagactattgaagaatgatctctttgtgatttaagaagtggctggattggaacttttaatatgctaatgtggaaaattaattacctttatgaaggtggtttattacaaataagcacactaacccctcggaagttgttttacctactttaaaagttttaatggattgcacctctgtaaactattcctaaaatgtgtatgatatatttgaaaaggcttccattaatataatagctttgcttgcagccttccaatctatgttggtttacctgtagtgttttataaagtgtggtcagaggcccctatagaatgtattgtttgaaagtgtagtgatatatttgtgtttttatttcaagtaagtcattttaaccgaatgttcattcatattcatttataaaaagtacctgtatcaaaggaattttaacaaagagcaatcagtattattggaccaaatttggtgtttgttttcaccttgacgctcttcttttcattatttctaatgctacaagaatgctgtaaagtgtcttctaaaatgatgtagcctgacaagacatttttttcagtgtataaaactaggtagtattgtgcactgatttgaccattgtgaaatcctttctcagtgtaactgcatttctaataaaaatttattgagtgaaac

SEQ ID NO: 1826 - DNA, 734 bp, Homo sapiens
  source 1..734: mol_type = genomic DNA
agcaggtgttctgtaagacagaccaggaagaggtagtaaggcagccagaaagctaccatggtacaccagagaagccaaattattcttgaggtacccactgagcttgtcagctgcaatggctaagagtggctgataatgttccttacttctgtagctgagatttcccaacttaatttgggttctcatcagggtagaattccatccaagtcaatcgcagcatctgcacccacagctctgagaagggaaagatgtgcttggtggtggccccaagtttgcagtatcggattggactcattagaattacaaggaaatgaaataaagaaagattctactgaagaaaggtagccatggaagagaatatggaagagggacagacacaaaaagggtgttttgaatgctgtatcaaatgcctggggggcattccctatgcctctctgattgccaccatcctgctctatgcgggtgttgccctgttctgtggctgcggtcatgaagcgctttctggaactgtcaacattctgcaaacctactttgagatggcaagaactgctggagacacactggatgtttttaccatgattgacatctttaagtatgtgatctacggcatcgcagctgcgttctttgtgtatggcattttgctgatggtggaaggtttcttcacaactggggccatcaaagatctctatggggatttcaaaatcaccacttgtggcagatgtgtgagcgcttgg

SEQ ID NO: 1827 - DNA, 1500 bp, Homo sapiens
  source 1..1500: mol_type = genomic DNA
gcatatattaaatttgtctgactaggaagagttatgtcagtaaagcaattagatacatgggttgtgatttggggaaaaaagctgaattagaaatctgtacttgtaaatcatcaacaagtatgtaatcattggtgatgttgatactgatgaaatcaacctaaaggtggaacaaaaaggaccaaaaatagtgacttaaaaaaacaatttagaaaaaatctcagaacacgaaacagaatgttaaattgtcacaggagagagcttatgcccttgaatcaagggaaaatagagttcacaaggagccagcggccggcagcatcacacttttatgacagacctggaagggtgttttgaatgctgtatcaaatgcctggggggcattccctatgcctctctgattgccaccatcctgctctatgcgggtgttgccctgttctgtggctgcggtcatgaagcgctttctggaactgtcaacattctgcaaacctactttgagatggcaagaactgctggagacacactggatgtttttaccatgattgacatctttaagtatgtgatctacggcatcgcagctgcgttctttgtgtatggcattttgctgatggtggaaggtttcttcacaactggggccatcaaagatctctatggggatttcaaaatcaccacttgtggcagatgtgtgagcgcttggttcattatgctgacatatcttttcatgttggcctggctgggagtcacggctttcacctcactgccagtttacatgtacttcaatctgtggaccatctgccggaacaccacattagtggagggagcaaatctctgcttggaccttcgtcagtttggaattgtgacaattggagaggaaaagaaaatttgtactgtctctgagaatttcttgaggatgtgcgaatctactgagctgaacatgaccttccacttgtttattgtggcacttgctggagctggggcagcagtcattgctatggttcactaccttatggttctgtctgccaactgggcctatgtgaaagacgcctgccggatgcagaagtatgaagacatcaagtcgaaggaagagcaagagcttcatgacatccactctactcgctccaaagagcggctcaatgcatacacataaatgcatcttcctgttctttctaccatttgaatgcattggtgtttaactaagggccatccaaccatccaacctttaaaaaacaaaacgaaagtgcttctcatcaatgatatgtaaggtgacttatgaatcacctgagtacaattctttgttgtttagcacttaaatttcccaatttattaaattgatgtaaatcagatcttttctacaagctcctatccagccttttttttgaaatttctcaaactcatttactagttctgtaaaatcaaagatactaacattgtcaaatgcaaagatttgtttgatttttaaccacttcccatgtgttatacataacaccttttgcattatttcttatg

SEQ ID NO: 1828 - DNA, 3022 bp, Homo sapiens
  source 1..3022: mol_type = genomic DNA
atcttcactttttccgttgctagcagtggaagggtcacagaccaaacactaaggcctgagcggtgacaaccgaggcgagatgatggtcaacagggaatgcctcgtgggagaaaaaagacaattttattctcagcgctgattttgagatgatgggcttgggaaacgggcgtcgcagcatgaagtcgccgcccctcgtgctggccgccctggtggcctgcatcatcgtcttgggcttcaactactggattgcgagctcccggagcgtggacctccagacacggatcatggagctggaaggcagggtccgcagggcggctgcagagagaggcgccgtggagctgaagaagaacgagttccagggagagctggagaagcagcgggagcagcttgacaaaatccagtccagccacaacttccagctggagagcgtcaacaagctgtaccaggacgaaaaggcggttttggtgaataacatcaccacaggtgagaggctcatccgagtgctgcaagaccagttaaagaccctgcagaggaattacggcaggctgcagcaggatgtcctccagtttcagaagaaccagaccaacctggagaggaagttctcctacgacctgagccagtgcatcaatcagatgaaggaggtgaaggaacagtgtgaggagcgaatagaagaggtcaccaaaaaggggaatgaagctgtagcttccagagacctgagtgaaaacaacgaccagagacagcagctccaagccctcagtgagcctcagcccaggctgcaggcagcaggcctgccacacacagaggtgccacaagggaagggaaacgtgcttggtaacagcaagtcccagacaccagcccccagttccgaagtggttttggattcaaagagacaagttgagaaagaggaaaccaatgagatccaggtggtgaatgaggagcctcagagggacaggctgccgcaggagccaggccgggagcaggtggtggaagacagacctgtaggtggaagaggcttcgggggagccggagaactgggccagaccccacaggtgcaggctgccctgtcagtgagccaggaaaatccagagatggagggccctgagcgagaccagcttgtcatccccgacggacaggaggaggagcaggaagctgccggggaagggagaaaccagcagaaactgagaggagaagatgactacaacatggatgaaaatgaagcagaatctgagacagacaagcaagcagccctggcagggaatgacagaaacatagatgtttttaatgttgaagatcagaaaagagacaccataaatttacttgatcagcgtgaaaagcggaatcatacactctgaattgaactggaatcacatatttcacaacagggccgaagagatgactataaaatgttcatgagggactgaatactgaaaactgtgaaatgtactaaataaaatgtacatctgaagatgattattgtgaaattttagtatgcactttgtgtaggaaaaaatggaatggtcttttaaacagcttttggggggtactttggaagtgtctaataaggtgtcacaatttttggtagtaggtatttcgtgagaagttcaacaccaaaactggaacatagttctccttcaagtgttggcgacagcggggcttcctgattctggaatataactttgtgtaaattaacagccacctatagaagagtccatctgctgtgaaggagagacagagaactctgggttccgtcgtcctgtccacgtgctgtaccaagtgctggtgccagcctgttacctgttctcactgaaaagtctggctaatgctcttgtgtagtcacttctgattctgacaatcaatcaatcaatggcctagagcactgactgttaacacaaacgtcactagcaaagtagcaacagctttaagtctaaatacaaagctgttctgtgtgagaattttttaaaaggctacttgtataataacccttgtcatttttaatgtacaaaacgctattaagtggcttagaatttgaacatttgtggtctttatttactttgcttcgtgtgtgggcaaagcaacatcttccctaaatatatattaccaagaaaagcaagaagcagattaggtttttgacaaaacaaacaggccaaaagggggctgacctggagcagagcatggtgagaggcaaggcatgagagggcaagtttgttgtggacagatctgtgcctactttattactggagtaaaagaaaacaaagttcattgatgtcgaaggatatatacagtgttagaaattaggactgtttagaaaaacaggaatacaatggttgtttttatcatagtgtacacatttagcttgtggtaaatgactcacaaaactgattttaaaatcaagttaatgtgaattttgaaaattactacttaatcctaattcacaataacaatggcattaaggtttgacttgagttggttcttagtattatttatggtaaataggctcttaccacttgcaaataactggccacatcattaatgactgacttcccagtaaggctctctaaggggtaagtaggaggatccacaggatttgagatgctaaggccccagagatcgtttgatccaaccctcttattttcagaggggaaaatggggcctagaagttacagagcatctagctggtgcgctggcacccctggcctcacacagactcccgagtagctgggactacaggcacacagtcactgaagcaggccctgtttgcaattcacgttgccacctccaacttaaacattcttcatatgtgatgtccttagtcactaaggttaaactttcccacccagaaaaggcaacttagataaaatcttagagtactttcatactcttctaagtcctcttccagcctcactttgagtcctccttggggttgataggaattttctcttgctttctcaataaagtctctattcatctcatgtttaatttgtacgcatagaattgctgagaaataaaatgttctgttcaactt

SEQ ID NO: 1829 - DNA, 3046 bp, Homo sapiens
  source 1..3046: mol_type = genomic DNA
ggagacgcggcggcgctggacgcggaggcgctgggcgcacggcgcggagccggccggagctcgaggccggcggcggcgggagagcgacccgggcggcctcgtagcggggccccggatccccgagtggcggccggagcctcgaaaagagattctcagcgctgattttgagatgatgggcttgggaaacgggcgtcgcagcatgaagtcgccgcccctcgtgctggccgccctggtggcctgcatcatcgtcttgggcttcaactactggattgcgagctcccggagcgtggacctccagacacggatcatggagctggaaggcagggtccgcagggcggctgcagagagaggcgccgtggagctgaagaagaacgagttccagggagagctggagaagcagcgggagcagcttgacaaaatccagtccagccacaacttccagctggagagcgtcaacaagctgtaccaggacgaaaaggcggttttggtgaataacatcaccacaggtgagaggctcatccgagtgctgcaagaccagttaaagaccctgcagaggaattacggcaggctgcagcaggatgtcctccagtttcagaagaaccagaccaacctggagaggaagttctcctacgacctgagccagtgcatcaatcagatgaaggaggtgaaggaacagtgtgaggagcgaatagaagaggtcaccaaaaaggggaatgaagctgtagcttccagagacctgagtgaaaacaacgaccagagacagcagctccaagccctcagtgagcctcagcccaggctgcaggcagcaggcctgccacacacagaggtgccacaagggaagggaaacgtgcttggtaacagcaagtcccagacaccagcccccagttccgaagtggttttggattcaaagagacaagttgagaaagaggaaaccaatgagatccaggtggtgaatgaggagcctcagagggacaggctgccgcaggagccaggccgggagcaggtggtggaagacagacctgtaggtggaagaggcttcgggggagccggagaactgggccagaccccacaggtgcaggctgccctgtcagtgagccaggaaaatccagagatggagggccctgagcgagaccagcttgtcatccccgacggacaggaggaggagcaggaagctgccggggaagggagaaaccagcagaaactgagaggagaagatgactacaacatggatgaaaatgaagcagaatctgagacagacaagcaagcagccctggcagggaatgacagaaacatagatgtttttaatgttgaagatcagaaaagagacaccataaatttacttgatcagcgtgaaaagcggaatcatacactctgaattgaactggaatcacatatttcacaacagggccgaagagatgactataaaatgttcatgagggactgaatactgaaaactgtgaaatgtactaaataaaatgtacatctgaagatgattattgtgaaattttagtatgcactttgtgtaggaaaaaatggaatggtcttttaaacagcttttggggggtactttggaagtgtctaataaggtgtcacaatttttggtagtaggtatttcgtgagaagttcaacaccaaaactggaacatagttctccttcaagtgttggcgacagcggggcttcctgattctggaatataactttgtgtaaattaacagccacctatagaagagtccatctgctgtgaaggagagacagagaactctgggttccgtcgtcctgtccacgtgctgtaccaagtgctggtgccagcctgttacctgttctcactgaaaagtctggctaatgctcttgtgtagtcacttctgattctgacaatcaatcaatcaatggcctagagcactgactgttaacacaaacgtcactagcaaagtagcaacagctttaagtctaaatacaaagctgttctgtgtgagaattttttaaaaggctacttgtataataacccttgtcatttttaatgtacaaaacgctattaagtggcttagaatttgaacatttgtggtctttatttactttgcttcgtgtgtgggcaaagcaacatcttccctaaatatatattaccaagaaaagcaagaagcagattaggtttttgacaaaacaaacaggccaaaagggggctgacctggagcagagcatggtgagaggcaaggcatgagagggcaagtttgttgtggacagatctgtgcctactttattactggagtaaaagaaaacaaagttcattgatgtcgaaggatatatacagtgttagaaattaggactgtttagaaaaacaggaatacaatggttgtttttatcatagtgtacacatttagcttgtggtaaatgactcacaaaactgattttaaaatcaagttaatgtgaattttgaaaattactacttaatcctaattcacaataacaatggcattaaggtttgacttgagttggttcttagtattatttatggtaaataggctcttaccacttgcaaataactggccacatcattaatgactgacttcccagtaaggctctctaaggggtaagtaggaggatccacaggatttgagatgctaaggccccagagatcgtttgatccaaccctcttattttcagaggggaaaatggggcctagaagttacagagcatctagctggtgcgctggcacccctggcctcacacagactcccgagtagctgggactacaggcacacagtcactgaagcaggccctgtttgcaattcacgttgccacctccaacttaaacattcttcatatgtgatgtccttagtcactaaggttaaactttcccacccagaaaaggcaacttagataaaatcttagagtactttcatactcttctaagtcctcttccagcctcactttgagtcctccttggggttgataggaattttctcttgctttctcaataaagtctctattcatctcatgtttaatttgtacgcatagaattgctgagaaataaaatgttctgttcaactta

SEQ ID NO: 1830 - DNA, 506 bp, Homo sapiens
  source 1..506: mol_type = genomic DNA
atcttcactttttccgttgctagcagtggaagggtcacagaccaaacactaaggcctgagcggtgacaaccgaggcgagatgatggtcaacagggaatgcctcgtgggagaaaaaagacaattttagtctcactctgttgcccccaggctggagtgcagtggcgcgatctcgactcactgcaacctctgcctcccgggttcaagtgattcttctgcctcagcctcccgagtagctaggactacagattctcagcgctgattttgagatgatgggcttgggaaacgggcgtcgcagcatgaagtcgccgcccctcgtgctggccgccctggtggcctgcatcatcgtcttgggcttcaactactggattgcgagctcccggagcgtggacctccagacacggatcatggagctggaaggcagggtccgcagggcggctgcagagagaggcgccgtggagctgaagaagaacgagttccagggagagctggagaagcagcgggagcag

SEQ ID NO: 1831 - DNA, 869 bp, Homo sapiens
  source 1..869: mol_type = genomic DNA
acagatacggtccctaaagtgagaaatgaatgttcgaaagaaggtgctctcgtttggcatggagtgaatgccttgtttccacctcaaatcctaagatggaacacatttttcctggtgacttcaggcagatggcacacctcccacttccgttgtgtgtcatgaaggaggagacacttctatagccagggctgtgcctgaataatgatgtacatgggggggagttcacattcacctccagaatgggtttcctgctttgcttgagaaatgctttaattgggtgtcattagtaatcctgtcaagggtaaaaaaaacctcccttgttaggaatcaaagcaaaaagctctctctgaggagtaatgaggaatatactctttctaatatgatgcggaagcacttaatatttgttattggtgtttacagaaatgattacttctcaaacattgctgcttacagaaatgattaattctcaaactatgccgggaagattctcagcgctgattttgagatgatgggcttgggaaacgggcgtcgcagcatgaagtcgccgcccctcgtgctggccgccctggtggcctgcatcatcgtcttgggcttcaactactggattgcgagctcccggagcgtggacctccagacacggatcatggagctggaaggcagggtccgcagggcggctgcagagagaggcgccgtggagctgaagaagaacgagttccagggagagctggagaagcagcgggagcagcttgacaaaatccagtccagccacaacttccagctggagagcgtcaacaagctgtaccaggacgaaaaggcggttttggtgaataacatcaccacaggtgagaggctcatccgagtgctgcaag

SEQ ID NO: 1832 - DNA, 1760 bp, Homo sapiens
  source 1..1760: mol_type = genomic DNA
gtcctatatttgttgtatagcctcctttgtggaagttatgtatgcatttgacttcacttaatctaagacatctattttccttgaactcttgataggtctgctggtttcctcaagggaatccaatctagctggattttaatctctttgaattgtgtcctcagctataaaagttttagctgaggttttaatggctgcacttaagtaaatctaacagatataccagggggtgttccaattacatacaccattaaagggctttatgtgaggatttttaaaaattaccattaaaaaaaaaaaagcatagtccatttgcagtataatttaccagcaggaaagatttcaatgtcctggaaaaattccctataaaaaggaagataggaaaacagaaaagtcacagtactcaacctacttcaagggaagattgggatctttttggctctctgcctctaaacaggtaaaaggctttgtattatttctagcacgagtttttcttctttagattgcatgctattgtatgtctacagggcatttgacagcccaagggctaaatccaggtgtgacggtatctaatgatgtcctgtccttcactgtccttgccatcaccagccacagagatccaggctttggggactcccacagcttatcgaccagtgtttgatttagtttttagcctctttcccatcaaatgaaaattaacttggagacacatttcattagaaaattagaggcccccttggctaggaaggcatctggtctgggactaactactttgaacagtgttgagtcctctctcccacagatggttcagccagcagtaatgctaggaagactgaaggataaatagaaaaatgtcattagtaccatggggtagccatgtaatgtcaagcaattttatattagccagagattcctagtaggagctacttttcttaacagatgactcagttctctttatctcaggaatgaaagagttgaagaccaatccacaacaggggaaatgttaaggcaaaatgatgaacttgataagggatgaattatggggtttggataaccaaacaataaaaataaaagtatagactattttagtactaaaaaggtcctgaacatgtgagcttaagtactcattttgtccccagtggctaagaaactaaaggcaagccagcaagtgtctctgagtttcagtgtctgtatgtaaaaactgactctgacttccatcttctgcagggttagtgatacagatgctagctttttcactaaagaggtcttttagtttatactcaaccttgtctggatctaatttgattgtgcattcatgtgccttagaatgaagccaattcaaaaactcctagctggccttattctactgacttggtgcgtggaaggctgctccagccagcactggtcctatggactgcgccctggaggaaagagagatgccgaaaatttgattgattctttccaagagatagtcaaagaggttggtcaactggcagaaacccaacgcttcgaatgcaccacgcaccagccacgttctcccctccgagacctgaaaggagctctggaaagtctgattgaagaggaaactgggcagaagaagatttaaatccattgggccagaaggaatgaccattactaacatgacttaagtataattctgacattgaaaatttataacccattaaatacctgtaaatggtatgaatttcagaaatccttacaccaagttgcacatattccataataaagtgctgtgttgtgaa

SEQ ID NO: 1833 - DNA, 470 bp, Homo sapiens
  source 1..470: mol_type = genomic DNA
gggatctttttggctctctgcctctaaacagaatgaagccaattcaaaaactcctagctggccttattctactgacttggtgcgtggaaggctgctccagccagcactggtcctatggactgcgccctggaggaaagagagatgccgaaaatttgattgattctttccaagagatagtcaaagaggttggtcaactggcagaaacccaacgcttcgaatgcaccacgcaccagccacgttctcccctccgagacctgaaaggagctctggaaagtctgattgaagaggaaactgggcagaagaagatttaaatccattgggccagaaggaatgaccattactaacatgacttaagtataattctgacattgaaaatttataacccattaaatacctgtaaatggtatgaatttcagaaatccttacaccaagttgcacatattccataataaagtgctgtgttgtgaatg

SEQ ID NO: 1834 - DNA, 1259 bp, Homo sapiens
  source 1..1259: mol_type = genomic DNA
cccgcgggttgagttcagcgaacgctgcggctaggggagggcgggaggagggagagcggacgcagggggcggggaggggcgcagggctgcgcgctcgccggcgctctctttcggtttggtcggcggctggaggagagtggacccccccactttaaggctctgtcctcggcgcgttcccgccgccccccggtcccgacgcggggctcggggatgcccgccagcatgttcagcatcgacaacatcctagccgcccggccgcgctgcaaggactcggtgttgccggtggcgcacagcgcggcggctcccgtcgtcttcccggccctgcacggggactcgctctacggcgccagcggcggcgcctcctcggactatggcgccttctacccgcgccccgtggcccccggcggcgcgggcctcccggccgcggtcagcggctcccgcctcggctacaacaactacttctacgggcagctgcacgtgcaggcggcgcccgtgggcccggcctgctgcggggccgtgccgccgctgggcgcccagcagtgctcctgcgtcccgacgcccccaggctacgagggccccggttcggtgctggtgtccccggtaccgcaccagatgctgccctacatgaacgtgggcacgctgtcgcgcaccgagctgcagcttctcaaccagctgcactgtcggcggaagcggcggcaccgcaccatcttcactgacgagcagctcgaagctctcgagaacctcttccaggagaccaagtacccggacgtgggcacgcgcgagcagctggcccggaaagtgcacctccgcgaggagaaagtggaggtctggtttaagaaccgccgcgccaaatggaggcggcagaagcggtcctcatcagaggagtcggagaacgcggagaagtggaacaagacgtcgtcgtcgaaggcgtcaccggagaagagggaagaggaaggtaaaagcgatttggactcggacagctgacggccgcgggacacttgcccgtattacttacctaactcgaaggacttgcacagacagacgatgctactttcttgcacacgcgctgccttgcgggagggggtcgagaaagaggaacgaggagctgtaaatagtgtacagagccgggagggtcggcgtctggggtcagggcgcgcacagcccagcagcccgaggccgcccgcgactagcccccaccgtagtatttatagttaaattaagggtgacagtacaataaagtgatggcgatgtagacgggc

SEQ ID NO: 1835 - DNA, 1992 bp, Homo sapiens
  source 1..1992: mol_type = genomic DNA
ggcctgcggaagggggcgggttcggaggagtgaactgtgcggttagtgcgcctttcagcctcacctgcagctgcgcctccttgcacctgcgcctgtgctttttctcccagcactgcggacgcgactcgagggtgacgctcgctccgctcgtcccgctcgtcatggcctacccgggatacggaggagggtttggaaattttagcattcaggtgccaggaatgcagatgggacagccagtgccagaaacaggcccagctatactcctcgatggatactctgggccagcatattcagacacttattcctcagctggtgactccgtgtatacttacttcagtgctgttgctggacaggatggtgaagtggatgctgaagaacttcagagatgtttgacacagtctggaattaatggaacttactctcccttcagtttggaaacctgcagaattatgattgccatgttggatagagatcacacaggaaaaatgggatttaatgcattcaaagagctatgggcagctcttaatgcctggaaggaaaacttcatgactgttgatcaagatggaagtggcacagtagaacatcatgagttgcgtcaagccattggtcttatgggttataggttgagtcctcaaacattaactactattgttaaacgttatagcaagaatggcagaattttctttgatgattatgttgcttgctgtgtgaagcttcgagcattgacagatttctttaggaaaagagaccacttgcaacaagggtctgcgaatttcatatatgacgattttttgcagggcactatggcaatttgaatgcttagaattttaaacctgaagagacactgtgaattcttttgtttggaagaagtgaactggactactttaaaacttttaagggttttctatgttcttcctacctgttaaacctcttccctttctgtgtgtttttattttagcagatagttcaaagcaataaaagatttcttttttaatttgaggtattactgcttttggaaaagttattttataaatatgtgcatattgtcataaaatattgtatgattaattgatttaaataatgcttagccttaattttagataatgtaaatttagaggaatgtactttacaagatagattgtataagaagccaaataatgaaagcctagaaaaaactaatttatacttatctgaaggttacaaattagacttttaaattttctttgtagttggtggtgtttgagggttggctagaaatgaaagcctggattttgtgccatgtttgtaatatagtttgttccttgatcaaataatcagagaaaagaaacttaaagatctttgtctgtgaagaagaaaattatctccctagttcaatctgtagtgaaataagactacagaaggcattgttttttccttttttattttttgtattatatatttttcttaaatatgttttattgtcttctctaagcaaaaagttcttaataaacatagtatttctctctgcgtcctatttcattagtgaagacatagttcacctaaaatggcatcctgctctgaatctagactttttagaaatggcatatgtttttgatgatatgtcaacattcaaaattgtcctaattaaattgttgtttaaatgtaatgtcaactctttataaacttaaaaataaacaagtaattaaccactctaattgttcagaaattttacatttgacttatttgacaacattaacattagtggtggctttgccattaaaaacccagtaagtattttgagtgcatctatgtgatgtggtgttttgagcatagtaggcaccacagcaacttttctgcgtggtactaaaactgccgaaaatgcgacgtagaatcaccagatctttagtgtttaatatccctggtataagatgttataattaatgtaatttctttcttggcaaacacctcatgtctgtcttagtgaagatttaataaaccacttatttttcttat

SEQ ID NO: 1836 - DNA, 846 bp, Homo sapiens
  source 1..846: mol_type = genomic DNA
gtatctgtggtaaacccagtgacacgggggagatgacatacaaaaagggcaggacctgagaaagattaagctgcaggctccctgcccataaaacagggtgtgaaaggcatctcagcggctgccccaccatggctacctgggccctcctgctccttgcagccatgctcctgggcaacccaggtctggtcttctctcgtctgagccctgagtactacgacctggcaagagcccacctgcgtgatgaggagaaatcctgcccgtgcctggcccaggagggcccccagggtgacctgttgaccaaaacacaggagctgggccgtgactacaggacctgtctgacgatagtccaaaaactgaagaagatggtggataagcccacccagagaagtgtttccaatgctgcgacccgggtgtgtaggacggggaggtcacgatggcgcgacgtctgcagaaatttcatgaggaggtatcagtctagagttacccagggcctcgtggccggagaaactgcccagcagatctgtgaggacctcaggttgtgtataccttctacaggtcccctctgagccctctcaccttgtcctgtggaagaagcacaggctcctgtcctcagatcccgggaacctcagcaacctctgccggctcctcgcttcctcgatccagaatccactctccagtctccctcccctgactccctctgctgtcctcccctctcacgagaataaagtgtcaagcaagattttagccgcagctgcttcttctttggtggatttgaggggtgggtgtcagtggcatgctggggtgagctgtgtagtccttcaataaatgtctgtcgtgtgtcccata

SEQ ID NO: 1837 - DNA, 858 bp, Homo sapiens
  source 1..858: mol_type = genomic DNA
cctgggccctcctgctccttgcagccatgctcctgggcaacccagcccctgcctccgcatctgcgtggtgaaggccattggccctcatcggtggatctgcgtttcctcgggcctacactgtctaggattgtgcggggctggtgagagaacaagatctcttctgtgttcaaggcagacttcctgccccctgcaccctgctctctcccaggccttgaggtcagtgtgagccccaagggcaagaacacttctggaagggagagtggatttggctgggccatctggatggaaggtctggtcttctctcgtctgagccctgagtactacgacctggcaagagcccacctgcgtgatgaggagaaatcctgcccgtgcctggcccaggagggcccccagggtgacctgttgaccaaaacacaggagctgggccgtgactacaggacctgtctgacgatagtccaaaaactgaagaagatggtggataagcccacccagagaagtgtttccaatgctgcgacccgggtgtgtaggacggggaggtcacgatggcgcgacgtctgcagaaatttcatgaggaggtatcagtctagagttacccagggcctcgtggccggagaaactgcccagcagatctgtgaggacctcaggttgtgtataccttctacaggtcccctctgagccctctcaccttgtcctgtggaagaagcacaggctcctgtcctcagatcccgggaacctcagcaacctctgccggctcctcgcttcctcgatccagaatccactctccagtctccctcccctgactccctctgctgtcctcccctctcacgagaataaagtgtcaagcaagattttagccgc

SEQ ID NO: 1838 - DNA, 4168 bp, Homo sapiens
  source 1..4168: mol_type = genomic DNA
atttaaacgggagacggcgcgatgcctggcactcggtgcgccttccgcggaccgggcgacccagtgcacggccgccgcgtcactctcggtcccgctgaccccgcgccgagccccggcggctctggccgcggccgcactcagcgccacgcgtcgaaagcgcaggccccgaggacccgccgcactgacagtatgagccgcacagcctacacggtgggagccctgcttctcctcttggggaccctgctgccggctgctgaagggaaaaagaaagggtcccaaggtgccatccccccgccagacaaggcccagcacaatgactcagagcagactcagtcgccccagcagcctggctccaggaaccgggggcggggccaagggcggggcactgccatgcccggggaggaggtgctggagtccagccaagaggccctgcatgtgacggagcgcaaatacctgaagcgagactggtgcaaaacccagccgcttaagcagaccatccacgaggaaggctgcaacagtcgcaccatcatcaaccgcttctgttacggccagtgcaactctttctacatccccaggcacatccggaaggaggaaggttcctttcagtcctgctccttctgcaagcccaagaaattcactaccatgatggtcacactcaactgccctgaactacagccacctaccaagaagaagagagtcacacgtgtgaagcagtgtcgttgcatatccatcgatttggattaagccaaatccaggtgcacccagcatgtcctaggaatgcagccccaggaagtcccagacctaaaacaaccagattcttacttggcttaaacctagaggccagaagaacccccagctgcctcctggcaggagcctgcttgtgcgtagttcgtgtgcatgagtgtggatgggtgcctgtgggtgtttttagacaccagagaaaacacagtctctgctagagagcactccctattttgtaaacatatctgctttaatggggatgtaccagaaacccacctcaccccggctcacatctaaaggggcggggccgtggtctggttctgactttgtgtttttgtgccctcctggggaccagaatctcctttcggaatgaatgttcatggaagaggctcctctgagggcaagagacctgttttagtgctgcattcgacatggaaaagtccttttaacctgtgcttgcatcctcctttcctcctcctcctcacaatccatctcttcttaagttgatagtgactatgtcagtctaatctcttgtttgccaaggttcctaaattaattcacttaaccatgatgcaaatgtttttcattttgtgaagaccctccagactctgggagaggctggtgtgggcaaggacaagcaggatagtggagtgagaaagggagggtggagggtgaggccaaatcaggtccagcaaaagtcagtagggacattgcagaagcttgaaaggccaataccagaacacaggctgatgcttctgagaaagtcttttcctagtatttaacagaacccaagtgaacagaggagaaatgagattgccagaaagtgattaactttggccgttgcaatctgctcaaacctaacaccaaactgaaaacataaatactgaccactcctatgttcggacccaagcaagttagctaaaccaaaccaactcctctgctttgtccctcaggtggaaaagagaggtagtttagaactctctgcataggggtgggaattaatcaaaaacctcagaggctgaaattcctaatacctttcctttatcgtggttatagtcagctcatttccattccactatttcccataatgcttctgagagccactaacttgattgataaagatcctgcctctgctgagtgtacctgacagtagtctaagatgagagagtttagggactactctgttttagcaagagatattttgggggtctttttgttttaactattgtcaggagattgggctaaagagaagacgacgagagtaaggaaataaagggaattgcctctggctagagagtagttaggtgttaatacctggtagagatgtaagggatatgacctccctttctttatgtgctcactgaggatctgaggggaccctgttaggagagcatagcatcatgatgtattagctgttcatctgctactggttggatggacataactattgtaactattcagtatttactggtaggcactgtcctctgattaaacttggcctactggcaatggctacttaggattgatctaagggccaaagtgcagggtgggtgaactttattgtactttggatttggttaacctgttttcttcaagcctgaggttttatatacaaactccctgaatactctttttgccttgtatcttctcagcctcctagccaagtcctatgtaatatggaaaacaaacactgcagacttgagattcagttgccgatcaaggctctggcattcagagaacccttgcaactcgagaagctgtttttatttcgtttttgttttgatccagtgctctcccatctaacaactaaacaggagccatttcaaggcgggagatattttaaacacccaaaatgttgggtctgattttcaaacttttaaactcactactgatgattctcacgctaggcgaatttgtccaaacacatagtgtgtgtgttttgtatacactgtatgaccccaccccaaatctttgtattgtccacattctccaacaataaagcacagagtggatttaattaagcacacaaatgctaaggcagaattttgagggtgggagagaagaaaagggaaagaagctgaaaatgtaaaaccacaccagggaggaaaaatgacattcagaaccagcaaacactgaatttctcttgttgttttaactctgccacaagaatgcaatttcgttaacggagatgacttaagttggcagcagtaatcttcttttaggagcttgtaccacagtcttgcacataagtgcagatttggctcaagtaaagagaatttcctcaacactaacttcactgggataatcagcagcgtaactaccctaaaagcatatcactagccaaagagggaaatatctgttcttcttactgtgcctatattaagactagtacaaatgtggtgtgtcttccaactttcattgaaaatgccatatctataccatattttattcgagtcactgatgatgtaatgatatattttttcattattatagtagaatatttttatggcaagatatttgtggtcttgatcatacctattaaaataatgccaaacaccaaatatgaattttatgatgtacactttgtgcttggcattaaaagaaaaaaacacacatcctggaagtctgtaagttgttttttgttactgtaggtcttcaaagttaagagtgtaagtgaaaaatctggaggagaggataatttccactgtgtggaatgtgaatagttaaatgaaaagttatggttatttaatgtaattattacttcaaatcctttggtcactgtgatttcaagcatgttttctttttctcctttatatgactttctctgagttgggcaaagaagaagctgacacaccgtatgttgttagagtcttttatctggtcaggggaaacaaaatcttgacccagctgaacatgtcttcctgagtcagtgcctgaatctttattttttaaattgaatgttccttaaaggttaacatttctaaagcaatattaagaaagactttaaatgttattttggaagacttacgatgcatgtatacaaacgaatagcagataatgatgactagttcacacataaagtccttttaaggagaaaatctaaaatgaaaagtggataaacagaacatttataagtgatcagttaatgcctaagagtgaaagtagttctattgacattcctcaagatatttaatatcaactgcattatgtattatgtctgcttaaatcatttaaaaacggcaaagaattatatagactatgaggtaccttgctgtgtaggaggatgaaaggggagttgatagtctcataaaactaatttggcttcaagtttcatgaatctgtaactagaatttaattttcaccccaataatgttctatatagcctttgctaaagagcaactaataaattaaacctattctttctgtg

SEQ ID NO: 1839 - DNA, 3026 bp, Homo sapiens
  source 1..3026: mol_type = genomic DNA
atgagccgcacagcctacacggtgggagccctgcttctcctcttggggaccctgctgccggctgctgaagggaaaaagaaagggtcccaaggtgccatccccccgccagacaaggccctgcatgtgacggagcgcaaatacctgaagcgagactggtgcaaaacccagccgcttaagcagaccatccacgaggaaggctgcaacagtcgcaccatcatcaaccgcttctgttacggccagtgcaactctttctacatccccaggcacatccggaaggaggaaggttcctttcagtcctgctccttctgcaagcccaagaaattcactaccatgatggtcacactcaactgccctgaactacagccacctaccaagaagaagagagtcacacgtgtgaagcagtgtcgttgcatatccatcgatttggattaagccaaatccaggtgcacccagcatgtcctaggaatgcagccccaggaagtcccagacctaaaacaaccagattcttacttggcttaaacctagaggccagaagaacccccagctgcctcctggcaggagcctgcttgtgcgtagttcgtgtgcatgagtgtggatgggtgcctgtgggtgtttttagacaccagagaaaacacagtctctgctagagagcactccctattttgtaaacatatctgctttaatggggatgtaccagaaacccacctcaccccggctcacatctaaaggggcggggccgtggtctggttctgactttgtgtttttgtgccctcctggggaccagaatctcctttcggaatgaatgttcatggaagaggctcctctgagggcaagagacctgttttagtgctgcattcgacatggaaaagtccttttaacctgtgcttgcatcctcctttcctcctcctcctcacaatccatctcttcttaagttgatagtgactatgtcagtctaatctcttgtttgccaaggttcctaaattaattcacttaaccatgatgcaaatgtttttcattttgtgaagaccctccagactctgggagaggctggtgtgggcaaggacaagcaggatagtggagtgagaaagggagggtggagggtgaggccaaatcaggtccagcaaaagtcagtagggacattgcagaagcttgaaaggccaataccagaacacaggctgatgcttctgagaaagtcttttcctagtatttaacagaacccaagtgaacagaggagaaatgagattgccagaaagtgattaactttggccgttgcaatctgctcaaacctaacaccaaactgaaaacataaatactgaccactcctatgttcggacccaagcaagttagctaaaccaaaccaactcctctgctttgtccctcaggtggaaaagagaggtagtttagaactctctgcataggggtgggaattaatcaaaaacctcagaggctgaaattcctaatacctttcctttatcgtggttatagtcagctcatttccattccactatttcccataatgcttctgagagccactaacttgattgataaagatcctgcctctgctgagtgtacctgacagtagtctaagatgagagagtttagggactactctgttttagcaagagatattttgggggtctttttgttttaactattgtcaggagattgggctaaagagaagacgacgagagtaaggaaataaagggaattgcctctggctagagagtagttaggtgttaatacctggtagagatgtaagggatatgacctccctttctttatgtgctcactgaggatctgaggggaccctgttaggagagcatagcatcatgatgtattagctgttcatctgctactggttggatggacataactattgtaactattcagtatttactggtaggcactgtcctctgattaaacttggcctactggcaatggctacttaggattgatctaagggccaaagtgcagggtgggtgaactttattgtactttggatttggttaacctgttttcttcaagcctgaggttttatatacaaactccctgaatactctttttgccttgtatcttctcagcctcctagccaagtcctatgtaatatggaaaacaaacactgcagacttgagattcagttgccgatcaaggctctggcattcagagaacccttgcaactcgagaagctgtttttatttcgtttttgttttgatccagtgctctcccatctaacaactaaacaggagccatttcaaggcgggagatattttaaacacccaaaatgttgggtctgattttcaaacttttaaactcactactgatgattctcacgctaggcgaatttgtccaaacacatagtgtgtgtgttttgtatacactgtatgaccccaccccaaatctttgtattgtccacattctccaacaataaagcacagagtggatttaattaagcacacaaatgctaaggcagaattttgagggtgggagagaagaaaagggaaagaagctgaaaatgtaaaaccacaccagggaggaaaaatgacattcagaaccagcaaacactgaatttctcttgttgttttaactctgccacaagaatgcaatttcgttaacggagatgacttaagttggcagcagtaatcttcttttaggagcttgtaccacagtcttgcacataagtgcagatttggctcaagtaaagagaatttcctcaacactaacttcactgggataatcagcagcgtaactaccctaaaagcatatcactagccaaagagggaaatatctgttcttcttactgtgcctatattaagactagtacaaatgtggtgtgtcttccaactttcattgaaaatgccatatctataccatattttattcgagtcactgatgatgtaatgatatattttttcattattatagtagaatatttttatggcaagatatttgtggtcttgatcatacctattaaaataatgccaaacaccaaatatgaattttatgatgtacactttgtgcttggcatt

SEQ ID NO: 1840 - DNA, 2648 bp, Homo sapiens
  source 1..2648: mol_type = genomic DNA
actcggtgcgccttccgcggaccgggcgacccagtgcacggccgccgcgtcactctcggtcccgctgaccccgcgccgagccccggcggctctggccgcggccgcactcagcgccacgcgtcgaaagcgcaggccccgaggacccgccgcactgacagtatgagccgcacagcctacacggtgggagccctgcttctcctcttggggaccctgctgccggctgctgaagggaaaaagaaagggtcccaaggtgccatccccccgccagacaaggccctgcatgtgacggagcgcaaatacctgaagcgagactggtgcaaaacccagccgcttaagcagaccatccacgaggaaggctgcaacagtcgcaccatcatcaaccgcttctgttacggccagtgcaactctttctacatccccaggcacatccggaaggaggaaggttcctttcagtcctgctccttctgcaagcccaagaaattcactaccatgatggtcacactcaactgccctgaactacagccacctaccaagaagaagagagtcacacgtgtgaagcagtgtcgttgcatatccatcgatttggattaagccaaatccaggtgcacccagcatgtcctaggaatgcagccccaggaagtcccagacctaaaacaaccagattcttacttggcttaaacctagaggccagaagaacccccagctgcctcctggcaggagcctgcttgtgcgtagttcgtgtgcatgagtgtggatgggtgcctgtgggtgtttttagacaccagagaaaacacagtctctgctagagagcactccctattttgtaaacatatctgctttaatggggatgtaccagaaacccacctcaccccggctcacatctaaaggggcggggccgtggtctggttctgactttgtgtttttgtgccctcctggggaccagaatctcctttcggaatgaatgttcatggaagaggctcctctgagggcaagagacctgttttagtgctgcattcgacatggaaaagtccttttaacctgtgcttgcatcctcctttcctcctcctcctcacaatccatctcttcttaagttgatagtgactatgtcagtctaatctcttgtttgccaaggttcctaaattaattcacttaaccatgatgcaaatgtttttcattttgtgaagaccctccagactctgggagaggctggtgtgggcaaggacaagcaggatagtggagtgagaaagggagggtggagggtgaggccaaatcaggtccagcaaaagtcagtagggacattgcagaagcttgaaaggccaataccagaacacaggctgatgcttctgagaaagtcttttcctagtatttaacagaacccaagtgaacagaggagaaatgagattgccagaaagtgattaactttggccgttgcaatctgctcaaacctaacaccaaactgaaaacataaatactgaccactcctatgttcggacccaagcaagttagctaaaccaaaccaactcctctgctttgtccctcaggtggaaaagagaggtagtttagaactctctgcataggggtgggaattaatcaaaaacctcagaggctgaaattcctaatacctttcctttatcgtggttatagtcagctcatttccattccactatttcccataatgcttctgagagccactaacttgattgataaagatcctgcctctgctgagtgtacctgacagtagtctaagatgagagagtttagggactactctgttttagcaagagatattttgggggtctttttgttttaactattgtcaggagattgggctaaagagaagacgacgagagtaaggaaataaagggaattgcctctggctagagagtagttaggtgttaatacctggtagagatgtaagggatatgacctccctttctttatgtgctcactgaggatctgaggggaccctgttaggagagcatagcatcatgatgtattagctgttcatctgctactggttggatggacataactattgtaactattcagtatttactggtaggcactgtcctctgattaaacttggcctactggcaatggctacttaggattgatctaagggccaaagtgcagggtgggtgaactttattgtactttggatttggttaacctgttttcttcaagcctgaggttttatatacaaactccctgaatactctttttgccttgtatcttctcagcctcctagccaagtcctatgtaatatggaaaacaaacactgcagacttgagattcagttgccgatcaaggctctggcattcagagaacccttgcaactcgagaagctgtttttatttcgtttttgttttgatccagtgctctcccatctaacaactaaacaggagccatttcaaggcgggagatattttaaacacccaaaatgttgggtctgattttcaaacttttaaactcactactgatgattctcacgctaggcgaatttgtccaaacacatagtgtgtgtgttttgtatacactgtatgaccccaccccaaatctttgtattgtccacattctccaacaataaagcacagagtggatttaattaagcacacaaatgctaaggcagaattttgagggtgggagag

SEQ ID NO: 1841 - DNA, 803 bp, Homo sapiens
  source 1..803: mol_type = genomic DNA
agtggctggtaggcagtggctgggaggcagcggcccaattagtgtcgtgcggcccgtggcgaggcgaggtccggggagcgagcgagcaagcaaggcgggaggggtggccggagctgcggcggctggcacaggaggaggagcccgggcgggcgaggggcggccggagagcgccagggcctgagctgccggagcggcgcctgtgagtgagtgcagaaagcaggcgcccgcgcgctagccgtggcaggagcagcccgcacgccgcgctctctccctgggcgacctgcagtttgcaatatgactttggaggaattctcggctggagagcagaagaccgaaagcgaccccgataacgtggtgttgtgcctgctggcggcggacgaggacgacgacagagatgtggctctgcagatccacttcaccctgatccaggcgttttgctgcgagaacgacatcaacatcctgcgcgtcagcaacccgggccggctggcggagctcctgctcttggagaccgacgctggccccgcggcgagcgagggcgccgagcagcccccggacctgcactgcgtgctggtgacgaatccacattcatctcaatggaaggatcctgccttaagtcaacttatttgtttttgccgggaaagtcgctacatggatcaatgggttccagtgattaatctccctgaacggtgatggcatctgaatgaaaataactgaaccaaattgcactgaagtttttgaaatacctttgtagttactcaagcagttactccctacactgatgcaaggattacagaaactgatgc

SEQ ID NO: 1842 - DNA, 1496 bp, Homo sapiens
  source 1..1496: mol_type = genomic DNA
ctgactccaggagctggggtcaaattgctggagcaggctgatttgcatagcccaatggccaagctgcatgcaaatgaggcggaaggtggttggctgagggttggcaggataaccccggagagcggggccctttgtcctccagtggctggtaggcagtggctgggaggcagcggcccaattagtgtcgtgcggcccgtggcgaggcgaggtccggggagcgagcgagcaagcaaggcgggaggggtggccggagctgcggcggctggcacaggaggaggagcccgggcgggcgaggggcggccggagagcgccagggcctgagctgccggagcggcgcctgtgagtgagtgcagaaagcaggcgcccgcgcgctagccgtggcaggagcagcccgcacgccgcgctctctccctgggcgacctgcagtttgcaatatgactttggaggaattctcggctggagagcagaagaccgaaaggatggataaggtgggggatgccctggaggaagtgctcagcaaagccctgagtcagcgcacgatcactgtcggggtgtacgaagcggccaagctgctcaacgtcgaccccgataacgtggtgttgtgcctgctggcggcggacgaggacgacgacagagatgtggctctgcagatccacttcaccctgatccaggcgttttgctgcgagaacgacatcaacatcctgcgcgtcagcaacccgggccggctggcggagctcctgctcttggagaccgacgctggccccgcggcgagcgagggcgccgagcagcccccggacctgcactgcgtgctggtgacgaatccacattcatctcaatggaaggatcctgccttaagtcaacttatttgtttttgccgggaaagtcgctacatggatcaatgggttccagtgattaatctccctgaacggtgatggcatctgaatgaaaataactgaaccaaattgcactgaagtttttgaaatacctttgtagttactcaagcagttactccctacactgatgcaaggattacagaaactgatgccaaggggctgagtgagttcaactacatgttctgggggcccggagatagatgactttgcagatggaaagaggtgaaaatgaagaaggaagctgtgttgaaacagaaaaataagtcaaaaggaacaaaaattacaaagaaccatgcaggaaggaaaactatgtattaatttagaatggttgagttacattaaaataaaccaaatatgttaaagtttaagtgtgcagccatagtttgggtatttttggtttatatgccctcaagtaaaagaaaagccgaaagggttaatcatatttgaaaaccatattttattgtattttgatgagatattaaattctcaaagttttattataaattctactaagttattttatgacatgaaaagttatttatgctataaattttttgaaacacaatacctacaataaactggtatgaataattgcatcatttc

SEQ ID NO: 1843 - DNA, 1375 bp, Homo sapiens
  source 1..1375: mol_type = genomic DNA
tcagatcgccgaagcgtcggactaccgttggtttccgcaacttcctggattatcctcgccaaggactttgcaatatatttttccgccttttctggaaggatttcgctgcttcccgaaggtcttggacgagcgctctagctctgtgggaaggttttgggctctctggctcggattttgcaatttctccctggggactgccgtggagccgcatccactgtggattataattgcaacatgacgctggaagagctcgtggcgtgcgacaacgcggcgcagaagatgcagacggtgaccgccgcggtggaggagcttttggtggccgctcagcgccaggatcgcctcacagtgggggtgtacgagtcggccaagttgatgaatgtggacccagacagcgtggtcctctgcctcttggccattgacgaggaggaggaggatgacatcgccctgcaaatccacttcacgctcatccagtccttctgctgtgacaacgacatcaacatcgtgcgggtgtcgggcatgcagcgcctggcgcagctcctgggagagccggccgagacccagggcaccaccgaggcccgagacctgcattgtctcctggtcacgaaccctcacacggacgcctggaagagccacggcttggtggaggtggccagctactgcgaagaaagccggggcaacaaccagtgggtcccctacatctctcttcaggaacgctgaggcccttcccagcagcagaatctgttgagttgctgccacaaacaaaaaatacaataaatatttgaaccccctcccccccagcacaacccccccaaaacaacccaacccacgaggaccatcgggggcagagtcgttggagactgaagaggaagaggaggaggagaaggggagtgagcggccgcccccagggcggagatccaggagctggcggccgccgatccgatggagaaggggggacccaggccagcaggagacaggacccccgaagctgaggccttgggatggagcagaagccggagtggcggggcacgctgccgccttccccatcacggagggtccagactgtccactcgggggtggagtgagactgactgcaagccccaccctccttgagactggagctggcgtctgcatacgagagacttggttgaacttggttggtccttgtctgcaccctcgacaagaccacactttgggacttgggagctggggctgaagttgctctgtacccatgaactcccagtttgcgaattatagagacaatctattttgttacttgcacttgttattcgaaccactgagagcgagatgggaagcatagatatctatatttttatttctactatgagggccttgtaataaatttctaaagcctctg

SEQ ID NO: 1844 - DNA, 1065 bp, Homo sapiens
  source 1..1065: mol_type = genomic DNA
cactcgctggtggtgggcgcgccgtgctgagctctggctgtcagtgtgttcgcccgcgtcccctccgcgctctccgcttgtggataactagctgctggttgatcgcactatgactctggaagaagtccgcggccaggacacagttccggaaagcacagccaggatgcagggtgccgggaaagcgctgcatgagttgctgctgtcggcgcagcgtcagggctgcctcactgccggcgtctacgagtcagccaaagtcttgaacgtggaccccgacaatgtgaccttctgtgtgctggctgcgggtgaggaggacgagggcgacatcgcgctgcagatccattttacgctgatccaggctttctgctgcgagaacgacatcgacatagtgcgcgtgggcgatgtgcagcggctggcggctatcgtgggcgccggcgaggaggcgggtgcgccgggcgacctgcactgcatcctcatttcgaaccccaacgaggacgcctggaaggatcccgccttggagaagctcagcctgttttgcgaggagagccgcagcgttaacgactgggtgcccagcatcaccctccccgagtgacagcccggcggggaccttggtctgatcgacgtggtgacgccccggggcgcctagagcgcggctggctctgtggaggggccctccgagggtgcccgagtgcggcgtggagactggcaggcggggggggcgcctggagagcgaggaggcgcggcctcccgaggaggggcccggtggcggcagggccaggctggtccgagctgaggactctgcaagtgtctggagcggctgctcgcccaggaaggcctaggctaggacgttggcctcagggccaggaaggacagactggccgggcaggcgtgactcagcagcctgcgctcggcaggaaggagcggcgccctggacttggtacagttgcaggagcgtgaaggacttagccgactgcgctgctttttcaaaacggatccgggcaatgcttcgttttctaaaggatgctgctgttgaagctttgaattttacaataaactttttgaaacaaa

SEQ ID NO: 1845 - DNA, 977 bp, Homo sapiens
  source 1..977: mol_type = genomic DNA
gctgagctctggctgtcagtgtgttcgcccgcgtcccctccgcgctctccgcttgtggataactagctgctggttgatcgcactatgactctggaagaagtccgcggccaggacacagttccggaaagcacagccaggtgggtttcagggcgctgagaaagccgctggtcggtcggcgaccgtcagggttttccagggtgggaatccgcggggtaggaggggagcgcgggggtccgggcgccagatcccggttggagagccggggtgcaggcgctgagccgggattggagtgtggttggagttggggagccaagggtgtgtgccggtggccggggctggggtctccgccgcgccctccggccggctcccgctcactgcgctggctcctccgcaggatgcagggtgccgggaaagcgctgcatgagttgctgctgtcggcgcagcgtcagggctgcctcactgccggcgtctacgagtcagccaaagtcttgaacgtggaccccgacaatgtgaccttctgtgtgctggctgcgggtgaggaggacgagggcgacatcgcgctgcagatccattttacgctgatccaggctttctgctgcgagaacgacatcgacatagtgcgcgtgggcgatgtgcagcggctggcggctatcgtgggcgccggcgaggaggcgggtgcgccgggcgacctgcactgcatcctcatttcgaaccccaacgaggacgcctggaaggatcccgccttggagaagctcagcctgttttgcgaggagagccgcagcgttaacgactgggtgcccagcatcaccctccccgagtgacagcccggcggggaccttggtctgatcgacgtggtgacgccccggggcgcctagagcgcggctggctctgtggaggggccctccgagggtgcccgagtgcggcgtggagactggcaggcggggggggcgcctggagagcgaggaggcgcggcctcc

SEQ ID NO: 1846 - DNA, 2218 bp, Homo sapiens
  source 1..2218: mol_type = genomic DNA
caggcggcggcggcagcggcggcggttggtcaggggcgtgttggccccgcacagattgagccgagttgtcgccccgctgggagaagtgaccctcctgcgcctgaaaagaaatttcatttcaatataggtgactatgcagcctgcaattcaagtatggtttggagaagatctgcctctaagtcctcggagtcctctgactcccagacacggaccaggattggctaatgtttgtcagtacgatgagtggatagctgtgaggcatgaagccactttgttgcccatgcaagaagatctgtcaatctggttatctggtttattaggtattaaagttaaggcagaaaaattattggaagaacttgataatggagtactattatgtcaactgattgatgttcttcaaaacatggtgaaaacatgcaactctgaagaatcagggaattttccaatgagaaaagtgccctgtaagaaagatgctgcatcaggttcattctttgctcgggacaataccgcaaacttccttcactggtgtagggacattggggttgatgaaacttacctctttgaatctgaaggtttagttttgcacaaagatccaagacaggtgtatctttgtcttcttgaaattggtcgaattgtgtcaagatacggggttgagccaccagtgttagtaaaacttgagaaagaaattgagttagaagagactttgcttaatacttctgggcctgaagattccatcagcattccaaaatcatgctgtcggcatgaagagctacatgaagctgttaaacatattgctgaggaccctccttgtagttgttctcatcgattttctattgagtatttatctgaaggacggtaccgactaggggataaaatactctttataagaatgcttcatggaaaacatgtcatggttcgcgttggtggaggctgggatactcttcaaggatttttgcttaaatatgacccctgtcgaatattacagtttgccacattagaacaaaaaattttagcatttcaaaaaggagtttctaatgaaagtgtacctgattcgcctgccagaacacctcagcctcctgaaatgaatcctttgtcagcagttaacatgtttcagaaacaaaattcaaaacccagcgtgccagttagtattccaaaaagcaaagaaaaacagggacgtccaccaggtgcattggtgccagcatcttcactgaaaggaggtaatctgggctctatgtcagtccgttctaaattgccaaattctccagcagcatcttctcatcccaagctcaagtcttcaaaaggcataacgaagaaaccgcaggctccttcaaacaatgcatcatcttcacttgcttcattaaatccagtaggtaaaaacacttcttcaccagctttaccaagaactgcaccttgtatatctgagtcaccgagaaaatgtatttcatcccccaatacccccaaggccaaggttattccagcccagaattcagcagatctgcccgagtccacacttttgccaaataagtgttcaggaaaaactcaacctaagtatttgaaacataatcatatttcttccagagataatgcagtatctcacttagctgcacattcaaattcatcctcaaaatgtcccaagctgcctaaagcaaatatacctgtaagacctaaaccttctttccagtcctctgcaaaaatgacaaaaaccagttccaaaaccatagccacgggtctaggaacacagtctcaaccatccgatggagccccacaagcaaagccagtcccagcacagaaacttaaatcggccttgaatttaaatcagccagtttctgtgtcctcagtttctcctgtaaaagccacacagaaatcaaaagataagaatatagtttcagctaccaaaaagcagcctcagaataaaagtgcatttcagaagacaggacccagctccttgaagtctcctggccgtaccccactgtccatcgtgagcctaccccagtcttctaccaaaacacaaactgcaccgaagtcagcacagactgtcgctaagagccagcattcaactaaagggcctcccagaagtggcaaaaccccagcttcaatcaggaaaccaccctcatctgttaaggatgcagatagtggagataaaaaacctactgcaaagaaaaaggaagatgatgaccattattttgtcatgactggaagtaagaaacctagaaaataa

SEQ ID NO: 1847 - DNA, 2486 bp, Homo sapiens
  source 1..2486: mol_type = genomic DNA
atgtggaactccattttaataggagcagcttctttgctgcatttttaaaaaatggtcttggaagcttcttacttccgagaagtggatctttgttgcggacaaaggattatttatgctaaaggaaaatgtattccccactgaattagctcgtgggaagcataacaagctcattaggaatgctcacttgtactttggccttttgctgtggtggagagaagggaaaatgacatcaaaaaggacattctgttgtcttttgccttcctgcaaagaaaatgtgttataatattaggcttttcagtatggtttagctcaggttcaactttggtactagaagaaatgttcctgaaaggaaagtgaaaagaaatttcatttcaatataggtgactatgcagcctgcaattcaagtatggtttggagaagatctgcctctaagtcctcggagtcctctgactcccagacacggaccaggattggctaatgtttgtcagtacgatgagtggatagctgtgaggcatgaagccactttgttgcccatgcaagaagatctgtcaatctggttatctggtttattaggtattaaagttaaggcagaaaaattattggaagaacttgataatggagtactattatgtcaactgattgatgttcttcaaaacatggtgaaaacatgcaactctgaagaatcagggaattttccaatgagaaaagtgccctgtaagaaagatgctgcatcaggttcattctttgctcgggacaataccgcaaacttccttcactggtgtagggacattggggttgatgaaacttacctctttgaatctgaaggtttagttttgcacaaagatccaagacaggtgtatctttgtcttcttgaaattggtcgaattgtgtcaagatacggggttgagccaccagtgttagtaaaacttgagaaagaaattgagttagaagagactttgcttaatacttctgggcctgaagattccatcagcattccaaaatcatgctgtcggcatgaagagctacatgaagctgttaaacatattgctgaggaccctccttgtagttgttctcatcgattttctattgagtatttatctgaaggacggtaccgactaggggataaaatactctttataagaatgcttcatggaaaacatgtcatggttcgcgttggtggaggctgggatactcttcaaggatttttgcttaaatatgacccctgtcgaatattacagtttgccacattagaacaaaaaattttagcatttcaaaaaggagtttctaatgaaagtgtacctgattcgcctgccagaacacctcagcctcctgaaatgaatcctttgtcagcagttaacatgtttcagaaacaaaattcaaaacccagcgtgccagttagtattccaaaaagcaaagaaaaacagggacgtccaccaggtgcattggtgccagcatcttcactgaaaggaggtaatctgggctctatgtcagtccgttctaaattgccaaattctccagcagcatcttctcatcccaagctcaagtcttcaaaaggcataacgaagaaaccgcaggctccttcaaacaatgcatcatcttcacttgcttcattaaatccagtaggtaaaaacacttcttcaccagctttaccaagaactgcaccttgtatatctgagtcaccgagaaaatgtatttcatcccccaatacccccaaggccaaggttattccagcccagaattcagcagatctgcccgagtccacacttttgccaaataagtgttcaggaaaaactcaacctaagtatttgaaacataatcatatttcttccagagataatgcagtatctcacttagctgcacattcaaattcatcctcaaaatgtcccaagctgcctaaagcaaatatacctgtaagacctaaaccttctttccagtcctctgcaaaaatgacaaaaaccagttccaaaaccatagccacgggtctaggaacacagtctcaaccatccgatggagccccacaagcaaagccagtcccagcacagaaacttaaatcggccttgaatttaaatcagccagtttctgtgtcctcagtttctcctgtaaaagccacacagaaatcaaaagataagaatatagtttcagctaccaaaaagcagcctcagaataaaagtgcatttcagaagacaggacccagctccttgaagtctcctggccgtaccccactgtccatcgtgagcctaccccagtcttctaccaaaacacaaactgcaccgaagtcagcacagactgtcgctaagagccagcattcaactaaagggcctcccagaagtggcaaaaccccagcttcaatcaggaaaccaccctcatctgttaaggatgcagatagtggagataaaaaacctactgcaaagaaaaaggaagatgatgaccattattttgtcatgactggaagtaagaaacctagaaaataaatacatactcattat

SEQ ID NO: 1848 - DNA, 2340 bp, Homo sapiens
  source 1..2340: mol_type = genomic DNA
gtcaggggcgtgttggccccgcacagattgagccgagttgtcgccccgctgggagaagtgaccctcctgcgcctgatcagaacactgaggctcagagaagttaactactccaaagtcatatagccagtattttctggagctgtaattcaaatcagatgtgttcaataccttctactaccccattgctgtctttatgaaaagaaatttcatttcaatataggtgactatgcagcctgcaattcaagtatggtttggagaagatctgcctctaagtcctcggagtcctctgactcccagacacggaccaggattggctaatgtttgtcagtacgatgagtggatagctgtgaggcatgaagccactttgttgcccatgcaagaagatctgtcaatctggttatctggtttattaggtattaaagttaaggcagaaaaattattggaagaacttgataatggagtactattatgtcaactgattgatgttcttcaaaacatggtgaaaacatgcaactctgaagaatcagggaattttccaatgagaaaagtgccctgtaagaaagatgctgcatcaggttcattctttgctcgggacaataccgcaaacttccttcactggtgtagggacattggggttgatgaaacttacctctttgaatctgaaggtttagttttgcacaaagatccaagacaggtgtatctttgtcttcttgaaattggtcgaattgtgtcaagatacggggttgagccaccagtgttagtaaaacttgagaaagaaattgagttagaagagactttgcttaatacttctgggcctgaagattccatcagcattccaaaatcatgctgtcggcatgaagagctacatgaagctgttaaacatattgctgaggaccctccttgtagttgttctcatcgattttctattgagtatttatctgaaggacggtaccgactaggggataaaatactctttataagaatgcttcatggaaaacatgtcatggttcgcgttggtggaggctgggatactcttcaaggatttttgcttaaatatgacccctgtcgaatattacagtttgccacattagaacaaaaaattttagcatttcaaaaaggagtttctaatgaaagtgtacctgattcgcctgccagaacacctcagcctcctgaaatgaatcctttgtcagcagttaacatgtttcagaaacaaaattcaaaacccagcgtgccagttagtattccaaaaagcaaagaaaaacagggacgtccaccaggtgcattggtgccagcatcttcactgaaaggaggtaatctgggctctatgtcagtccgttctaaattgccaaattctccagcagcatcttctcatcccaagctcaagtcttcaaaaggcataacgaagaaaccgcaggctccttcaaacaatgcatcatcttcacttgcttcattaaatccagtaggtaaaaacacttcttcaccagctttaccaagaactgcaccttgtatatctgagtcaccgagaaaatgtatttcatcccccaatacccccaaggccaaggttattccagcccagaattcagcagatctgcccgagtccacacttttgccaaataagtgttcaggaaaaactcaacctaagtatttgaaacataatcatatttcttccagagataatgcagtatctcacttagctgcacattcaaattcatcctcaaaatgtcccaagctgcctaaagcaaatatacctgtaagacctaaaccttctttccagtcctctgcaaaaatgacaaaaaccagttccaaaaccatagccacgggtctaggaacacagtctcaaccatccgatggagccccacaagcaaagccagtcccagcacagaaacttaaatcggccttgaatttaaatcagccagtttctgtgtcctcagtttctcctgtaaaagccacacagaaatcaaaagataagaatatagtttcagctaccaaaaagcagcctcagaataaaagtgcatttcagaagacaggacccagctccttgaagtctcctggccgtaccccactgtccatcgtgagcctaccccagtcttctaccaaaacacaaactgcaccgaagtcagcacagactgtcgctaagagccagcattcaactaaagggcctcccagaagtggcaaaaccccagcttcaatcaggaaaccaccctcatctgttaaggatgcagatagtggagataaaaaacctactgcaaagaaaaaggaagatgatgaccattattttgtcatgactggaagtaagaaacctagaaaataaatacatactcattataaaaaaagagaaaa

SEQ ID NO: 1849 - DNA, 567 bp, Homo sapiens
  source 1..567: mol_type = genomic DNA
ctcttttcctggcgaacttttacgcgctgtctcggggcctccgcgcctcagcctgagggctccaggagccccccgctctctgaggccccgaagctgaggtttgttgggtctcccggctgcgggagccagtacgctctgcgtttgcctggctgcggcagtcgcgtgctctgattggctcctggggccgtcaagatcagaacactgaggctcagagaagttaactactccaaagtcatatagccagtattttctggagctgtaattcaaatcagatgtgttcaataccttctactaccccattgctgtctttatgatttgtaacagatggagccatgacattttgaattctccccatcataccgtataacgtgagaaaggattgaaaatgtaaaagaaatttcatttcaatataggtgactatgcagcctgcaattcaagtatggtttggagaagatctgcctctaagtcctcggagtcctctgactcccagacacggaccaggattggctaatgtttgtcagtacgatgagtggatagctgtgaggcatgaagccactttgttgccca

SEQ ID NO: 1850 - DNA, 5032 bp, Homo sapiens
  source 1..5032: mol_type = genomic DNA
ggggaggtcgggaggaggcagagagggaagcgagctgcggccgggcgggctcggcgctcggagacccggtggagcccaaagtttccgcgcagcccctgggtggcggcagcgccggcggcgcggggcgcccgggacagtcttgagcgccggcctcgccccgcggggacccgcgcccgccgccggccacgccgagtgtcgcccgcagccacgcggaggcggcggggagccgcgcgcggcagctttggcgctgaccacaatgctgagcaggaagcagcagctgcaggcccagtgactggtagctcagtgaccagcagcccagtgaccggcagccaggtcctcacctgggtcctctcagtgaagccagggtggccgccccagcagacagtgctacagagccaactcctgacaggacaaggtggagcagacacctcgcagtcaacaagacccggcaggaccaggactccccgcacagtctgaccgacttgcgaatcaccaggaggatgatgtggacctggaagccctggtgaacgatatgaatgcatccctggagagcctgtactcggcctgcagcatgcagtcagacacggtgcccctcctgcagaatggccagcatgcccgcagccagcctcgggcttcaggccctcctcggtccatccagccacaggtgtccccgaggcagagggtgcagcgctcccagcctgtgcacatcctcgctgtcaggcgccttcaggaggaagaccagcagtttagaacctcatctctgccggccatccccaatccttttcctgaactctgtggccctgggagcccccctgtgctcacgccgggttctttacctccgagccaggccgccgcaaagcaggatgttaaagtctttagtgaagatgggacaagcaaagtggtggagattctagcagacatgacagccagagacctgtgccaattgctggtttacaaaagtcactgtgtggatgacaacagctggacactagtggagcaccacccgcacctaggattagagaggtgcttggaagaccatgagctggtggtccaggtggagagtaccatggccagtgagagtaaatttctattcaggaagaattacgcaaaatacgagttctttaaaaatcccatgaatttcttcccagaacagatggttacttggtgccagcagtcaaatggcagtcaaacccagcttttgcagaattttctgaactccagtagttgtcctgaaattcaagggtttttgcatgtgaaagagctgggaaagaaatcatggaaaaagctgtatgtgtgtttgcggagatctggcctttattgctccaccaagggaacttcaaaggaacccagacacctgcagctgctggccgacctggaggacagcaacatcttctccctgatcgctggcaggaagcagtacaacgcccctacagaccacgggctctgcataaagccaaacaaagtcaggaatgaaactaaagagctgaggttgctctgtgcagaggacgagcaaaccaggacgtgctggatgacagcgttcagactcctcaagtatggaatgctcctttaccagaattaccgaatccctcagcagaggaaggccttgctgtccccgttctcgacgccagtgcgcagtgtctccgagaactccctcgtggcaatggatttttctgggcaaacaggacgcgtgatagagaatccggcagaggcccagagcgcagccctggaggagggccacgcctggaggaagcgaagcacacggatgaacatcctaggtagccaaagtcccctccacccttctaccctaagtacagtgattcacaggacacagcactggtttcacgggaggatctccagggaggaatcccacaggatcattaaacagcaagggctcgtggatgggctttttctcctccgtgacagccagagtaatccaaaggcatttgtactcacactgtgtcatcaccagaaaattaaaaatttccagatcttaccttgcgaggacgacgggcagacgttcttcagcctagatgacgggaacaccaaattctctgacctgatccagctggttgacttttaccagctgaacaaaggagtcctgccttgcaaactcaagcaccactgcatccgagtggccttatgaccgcagatgtcctctcggctgaagactggaggaagtgaacactggagtgaagaagcggtctgtgcgttggtgaagaacacacatcgattctgcacctggggacccagagcgagatgggtttgttcggtgccagccgaccaagattgactagtttgttggacttaaacgacgatttgctgctgtgaacccagcagggtcgcctccctctgcatcggccaaattggggagggcatggaagatccagcggaaagttgaaaataaactggaatgatcatcttggcttgggccgcttaggaacaagaaccggagagaagtgattggaaatgaactcttgccctggaataatcttgacaattaaaactgatatgtttactttttttgtattgatcacttttttgcactccttctttgttttcaatattgtattcagcctattgtaggagggggatgtggcgtttcaactcatataatacagaaagagttttgaatgggcagatttcaaactgaatatgggtccccaaatgttcccagagggtcctccacaccctctgccgactaccacggtgtggattcagctcccaaatgacaaacccagcccttcccagtatacttgaaaagctttcttgttaaaataaaaggtgtcactgtggtaggcatttggcatattttgtggactcagtcaagcaaccacagtctgttaatcatttctctatgctcagatgtcagatcctcttgttattagtgtgtcttgttctgcacagtgcaggagactttattcctttggaaaattcactgttccacaaacagcaggctgaatggcctcgcctctagattgacgtgggccagcctccttgagacacacctggcacccgtcatcggccagcggtggatgctgcataatccacctgggtacttcagccttgcgtttccacagccttcagcctgttctagaacgatcactgccttacccctgctgctgcagtggtgtgagtcgtttcacggctgatgtccctcgggggattaaaggatctaaagagaaaatggcacctggttgtcttcgtgctgtgtctcatgggtttccatagtgataaagacaaggaaacgctgcaggggccacaggcacaggctgatatttaaagatctttgcttgcagccctccgtcctgctgaaaacccccataagccagtgaacacagagcagctagaggctcctcctctgctggcttagggtcagaagtacctcacagtggttgtggacatggaagagttttgtcaacacaacactttgtccccgctccgggagatgagtcagatggtggcttgagttgtcacttggtcccctccgcccctcgggtggccccctttgccacgtccccttagcttagtgatcaggtgtgagagtggccatttccttacctttgatccctgtaaagcagaaaggactcctttgacaggcgacaaactactgtggtgagcagaatgatttcctttttcaagacaacacctgcctggcttctattaatgtgtgctggccatgatattgccccaaatccgccccactgaagtgttccctaaggaacagcatttctctgctcctcagtcaacccccgtagcctagagcagtgtcacaagcttcagtaaggccagtcagctggaagtcagtctaccgtatagtaacactgtatgtcagtctacagaccacactctagttgttttccatgaaaggtatacaaatgaagaattttctagcaaaacatgtttttaaccatcagtgctcaattgcattttcttcctttcgcagccagtcagtctttcaaactattgacagtaagataattctcacgttcacacctggtggcaggcttcactgtagggacggacattgcagttacaccacgattccttcctcttcactggctcgaggtaaacccttttcaaggaaaaacaactctaggatttcttttttctgtgtacgtagaccagtcccatcagtgtataatctctctctcacacgcctctctccaatagacagcttgtatttgcagtatttcatatttataaatatgcgtttatttaaaaggagaacaaaagcttgactctgattcacagttttgtatgtagctggtttgacgtagtcttttgtattttccctgccgaagtgaattgttggagaatgtaaaccgcctccacgtggcggcagacttcctaaggccccagctcgctggcctcgcgctgggcggctgggaattccacctgagaacaagtcccgcaaaccggggacggaaggacatttgacttttatttttgtatttaattgacatgaatgtaaaggggacagctcagggttgttttggagcctgttgactttgtatctctgcctgtgattttcttttctaaatgaaactccatgtagcaaccaggacgaagttgagaaggaaaacgccaaatgctttggttattagagtttaataggtaagctctgttacactaggtgttagagttccagaatgttcttttgtttgctaaaccttgaagaaacatgtgcctcagcctagatgttttgtcttctcttttctgcacttaatacctgacagtatgaccgatctctgcgcctttctgggggcgggcaagctggcggtagatttgtgatgtcacagtgcaaactgcagtgactgtaaattggcctggcgtgtataaacgttttcagggaatgcagaaggtattaatgaagagacaaaacctttattccatgtgctttgcttcattctgtacatagctctttggctcgtgaacctaattgtaaactttcaggtatttttgtacaaataagggactgatgttctgtttcttgtaattagaaataaacattaatacagtgttcttcattttc

SEQ ID NO: 1851 - DNA, 2050 bp, Homo sapiens
  source 1..2050: mol_type = genomic DNA
aaatgtaatttgaagaaggcagaaggaacccatggctttagccggctgcccagattcctttttgcaccatccgtactaccaggacaaggtggagcagacacctcgcagtcaacaagacccggcaggaccaggactccccgcacagtctgaccgacttgcgaatcaccaggaggatgatgtggacctggaagccctggtgaacgatatgaatgcatccctggagagcctgtactcggcctgcagcatgcagtcagacacggtgcccctcctgcagaatggccagcatgcccgcagccagcctcgggcttcaggccctcctcggtccatccagccacaggtgtccccgaggcagagggtgcagcgctcccagcctgtgcacatcctcgctgtcaggcgccttcaggaggaagaccagcagtttagaacctcatctctgccggccatccccaatccttttcctgaactctgtggccctgggagcccccctgtgctcacgccgggttctttacctccgagccaggccgccgcaaagcaggatgttaaagtctttagtgaagatgggacaagcaaagtggtggagattctagcagacatgacagccagagacctgtgccaattgctggtttacaaaagtcactgtgtggatgacaacagctggacactagtggagcaccacccgcacctaggattagagaggtgcttggaagaccatgagctggtggtccaggtggagagtaccatggccagtgagagtaaatttctattcaggaagaattacgcaaaatacgagttctttaaaaatcccatgaatttcttcccagaacagatggttacttggtgccagcagtcaaatggcagtcaaacccagcttttgcaggaacccagacacctgcagctgctggccgacctggaggacagcaacatcttctccctgatcgctggcaggaagcagtacaacgcccctacagaccacgggctctgcataaagccaaacaaagtcaggaatgaaactaaagagctgaggttgctctgtgcagaggacgagcaaaccaggacgtgctggatgacagcgttcagactcctcaagtatggaatgctcctttaccagaattaccgaatccctcagcagaggaaggccttgctgtccccgttctcgacgccagtgcgcagtgtctccgagaactccctcgtggcaatggatttttctgggcaaacaggacgcgtgatagagaatccggcagaggcccagagcgcagccctggaggagggccacgcctggaggaagcgaagcacacggatgaacatcctaggtagccaaagtcccctccacccttctaccctaagtacagtgattcacaggacacagcactggtttcacgggaggatctccagggaggaatcccacaggatcattaaacagcaagggctcgtggatgggctttttctcctccgtgacagccagagtaatccaaaggcatttgtactcacactgtgtcatcaccagaaaattaaaaatttccagatcttaccttgcgaggacgacgggcagacgttcttcagcctagatgacgggaacaccaaattctctgacctgatccagctggttgacttttaccagctgaacaaaggagtcctgccttgcaaactcaagcaccactgcatccgagtggccttatgaccgcagatgtcctctcggctgaagactggaggaagtgaacactggagtgaagaagcggtctgtgcgttggtgaagaacacacatcgattctgcacctggggacccagagcgagatgggtttgttcggtgccagccgaccaagattgactagtttgttggacttaaacgacgatttgctgctgtgaacccagcagggtcgcctccctctgcatcggccaaattggggagggcatggaagatccagcggaaagttgaaaataaactggaatgatcatcttggcttgggccgcttaggaacaagaaccggagagaagtgattggaaatgaactcttgccctggaataatcttgacaattaaaactgatatgttta

SEQ ID NO: 1852 - DNA, 2627 bp, Homo sapiens
  source 1..2627: mol_type = genomic DNA
cagcccggcccggctccgagcgctgtccatgcggagcgctgtccacgcgccgggcactgcgggggccgggccccgaagccctacccgggccggcggcgcacacgcagcgaccccgtgcggccagtgctgccgcccgctctccagacttgggaggctgcattctgataattctcaggaggaagaatgtataggagagaccagggtttttaaggtgtgacctctgaaccacctacatcagagctgactgcctctcgctttggcgctgaccacaatgctgagcaggaagcagcagctgcaggcccagtgactggtagctcagtgaccagcagcccagtgaccggcagccaggtcctcacctgggtcctctcagtgaagccagggtggccgccccagcagacagtgctacagagccaactcctgacaggtgctgcagcgcagtaaatgtaatttgaagaaggcagaaggaacccatggctttagccggctgcccagattcctttttgcaccatccgtactaccaggacaaggtggagcagacacctcgcagtcaacaagacccggcaggaccaggactccccgcacagtctgaccgacttgcgaatcaccaggaggatgatgtggacctggaagccctggtgaacgatatgaatgcatccctggagagcctgtactcggcctgcagcatgcagtcagacacggtgcccctcctgcagaatggccagcatgcccgcagccagcctcgggcttcaggccctcctcggtccatccagccacaggtgtccccgaggcagagggtgcagcgctcccagcctgtgcacatcctcgctgtcaggcgccttcaggaggaagaccagcagtttagaacctcatctctgccggccatccccaatccttttcctgaactctgtggccctgggagcccccctgtgctcacgccgggttctttacctccgagccaggccgccgcaaagcaggatgttaaagtctttagtgaagatgggacaagcaaagtggtggagattctagcagacatgacagccagagacctgtgccaattgctggtttacaaaagtcactgtgtggatgacaacagctggacactagtggagcaccacccgcacctaggattagagaggtgcttggaagaccatgagctggtggtccaggtggagagtaccatggccagtgagagtaaatttctattcaggaagaattacgcaaaatacgagttctttaaaaatcccatgaatttcttcccagaacagatggttacttggtgccagcagtcaaatggcagtcaaacccagcttttgcagaattttctgaactccagtagttgtcctgaaattcaagggtttttgcatgtgaaagagctgggaaagaaatcatggaaaaagctgtatgtgtgtttgcggagatctggcctttattgctccaccaagggaacttcaaaggaacccagacacctgcagctgctggccgacctggaggacagcaacatcttctccctgatcgctggcaggaagcagtacaacgcccctacagaccacgggctctgcataaagccaaacaaagtcaggaatgaaactaaagagctgaggttgctctgtgcagaggacgagcaaaccaggacgtgctggatgacagcgttcagactcctcaagtatggaatgctcctttaccagaattaccgaatccctcagcagaggaaggccttgctgtccccgttctcgacgccagtgcgcagtgtctccgagaactccctcgtggcaatggatttttctgggcaaacaggacgcgtgatagagaatccggcagaggcccagagcgcagccctggaggagggccacgcctggaggaagcgaagcacacggatgaacatcctaggtagccaaagtcccctccacccttctaccctaagtacagtgattcacaggacacagcactggtttcacgggaggatctccagggaggaatcccacaggatcattaaacagcaagggctcgtggatgggctttttctcctccgtgacagccagagtaatccaaaggcatttgtactcacactgtgtcatcaccagaaaattaaaaatttccagatcttaccttgcgaggacgacgggcagacgttcttcagcctagatgacgggaacaccaaattctctgacctgatccagctggttgacttttaccagctgaacaaaggagtcctgccttgcaaactcaagcaccactgcatccgagtggccttatgaccgcagatgtcctctcggctgaagactggaggaagtgaacactggagtgaagaagcggtctgtgcgttggtgaagaacacacatcgattctgcacctggggacccagagcgagatgggtttgttcggtgccagccgaccaagattgactagtttgttggacttaaacgacgatttgctgctgtgaacccagcagggtcgcctccctctgcatcggccaaattggggagggcatggaagatccagcggaaagttgaaaataaactggaatgatcatcttggcttgggccgcttaggaacaagaaccggagagaagtgattggaaatgaactcttgccctggaataatcttgacaattaaaactgatatgttta

SEQ ID NO: 1853 - DNA, 4785 bp, Homo sapiens
  source 1..4785: mol_type = genomic DNA
cgcaactttgcctcccagggaacaaacatcctccttctaagtggtagatgtgggtgagctgaccctgctggagtctgtcccctgggctaccctctgcttccccccattgtgagtggtccgtgaagcacagcgttgaccagacctaaacctgtttgctcccaggacaaggtggagcagacacctcgcagtcaacaagacccggcaggaccaggactccccgcacagtctgaccgacttgcgaatcaccaggaggatgatgtggacctggaagccctggtgaacgatatgaatgcatccctggagagcctgtactcggcctgcagcatgcagtcagacacggtgcccctcctgcagaatggccagcatgcccgcagccagcctcgggcttcaggccctcctcggtccatccagccacaggtgtccccgaggcagagggtgcagcgctcccagcctgtgcacatcctcgctgtcaggcgccttcaggaggaagaccagcagtttagaacctcatctctgccggccatccccaatccttttcctgaactctgtggccctgggagcccccctgtgctcacgccgggttctttacctccgagccaggccgccgcaaagcaggatgttaaagtctttagtgaagatgggacaagcaaagtggtggagattctagcagacatgacagccagagacctgtgccaattgctggtttacaaaagtcactgtgtggatgacaacagctggacactagtggagcaccacccgcacctaggattagagaggtgcttggaagaccatgagctggtggtccaggtggagagtaccatggccagtgagagtaaatttctattcaggaagaattacgcaaaatacgagttctttaaaaatcccatgaatttcttcccagaacagatggttacttggtgccagcagtcaaatggcagtcaaacccagcttttgcagaattttctgaactccagtagttgtcctgaaattcaagggtttttgcatgtgaaagagctgggaaagaaatcatggaaaaagctgtatgtgtgtttgcggagatctggcctttattgctccaccaagggaacttcaaaggaacccagacacctgcagctgctggccgacctggaggacagcaacatcttctccctgatcgctggcaggaagcagtacaacgcccctacagaccacgggctctgcataaagccaaacaaagtcaggaatgaaactaaagagctgaggttgctctgtgcagaggacgagcaaaccaggacgtgctggatgacagcgttcagactcctcaagtatggaatgctcctttaccagaattaccgaatccctcagcagaggaaggccttgctgtccccgttctcgacgccagtgcgcagtgtctccgagaactccctcgtggcaatggatttttctgggcaaacaggacgcgtgatagagaatccggcagaggcccagagcgcagccctggaggagggccacgcctggaggaagcgaagcacacggatgaacatcctaggtagccaaagtcccctccacccttctaccctaagtacagtgattcacaggacacagcactggtttcacgggaggatctccagggaggaatcccacaggatcattaaacagcaagggctcgtggatgggctttttctcctccgtgacagccagagtaatccaaaggcatttgtactcacactgtgtcatcaccagaaaattaaaaatttccagatcttaccttgcgaggacgacgggcagacgttcttcagcctagatgacgggaacaccaaattctctgacctgatccagctggttgacttttaccagctgaacaaaggagtcctgccttgcaaactcaagcaccactgcatccgagtggccttatgaccgcagatgtcctctcggctgaagactggaggaagtgaacactggagtgaagaagcggtctgtgcgttggtgaagaacacacatcgattctgcacctggggacccagagcgagatgggtttgttcggtgccagccgaccaagattgactagtttgttggacttaaacgacgatttgctgctgtgaacccagcagggtcgcctccctctgcatcggccaaattggggagggcatggaagatccagcggaaagttgaaaataaactggaatgatcatcttggcttgggccgcttaggaacaagaaccggagagaagtgattggaaatgaactcttgccctggaataatcttgacaattaaaactgatatgtttactttttttgtattgatcacttttttgcactccttctttgttttcaatattgtattcagcctattgtaggagggggatgtggcgtttcaactcatataatacagaaagagttttgaatgggcagatttcaaactgaatatgggtccccaaatgttcccagagggtcctccacaccctctgccgactaccacggtgtggattcagctcccaaatgacaaacccagcccttcccagtatacttgaaaagctttcttgttaaaataaaaggtgtcactgtggtaggcatttggcatattttgtggactcagtcaagcaaccacagtctgttaatcatttctctatgctcagatgtcagatcctcttgttattagtgtgtcttgttctgcacagtgcaggagactttattcctttggaaaattcactgttccacaaacagcaggctgaatggcctcgcctctagattgacgtgggccagcctccttgagacacacctggcacccgtcatcggccagcggtggatgctgcataatccacctgggtacttcagccttgcgtttccacagccttcagcctgttctagaacgatcactgccttacccctgctgctgcagtggtgtgagtcgtttcacggctgatgtccctcgggggattaaaggatctaaagagaaaatggcacctggttgtcttcgtgctgtgtctcatgggtttccatagtgataaagacaaggaaacgctgcaggggccacaggcacaggctgatatttaaagatctttgcttgcagccctccgtcctgctgaaaacccccataagccagtgaacacagagcagctagaggctcctcctctgctggcttagggtcagaagtacctcacagtggttgtggacatggaagagttttgtcaacacaacactttgtccccgctccgggagatgagtcagatggtggcttgagttgtcacttggtcccctccgcccctcgggtggccccctttgccacgtccccttagcttagtgatcaggtgtgagagtggccatttccttacctttgatccctgtaaagcagaaaggactcctttgacaggcgacaaactactgtggtgagcagaatgatttcctttttcaagacaacacctgcctggcttctattaatgtgtgctggccatgatattgccccaaatccgccccactgaagtgttccctaaggaacagcatttctctgctcctcagtcaacccccgtagcctagagcagtgtcacaagcttcagtaaggccagtcagctggaagtcagtctaccgtatagtaacactgtatgtcagtctacagaccacactctagttgttttccatgaaaggtatacaaatgaagaattttctagcaaaacatgtttttaaccatcagtgctcaattgcattttcttcctttcgcagccagtcagtctttcaaactattgacagtaagataattctcacgttcacacctggtggcaggcttcactgtagggacggacattgcagttacaccacgattccttcctcttcactggctcgaggtaaacccttttcaaggaaaaacaactctaggatttcttttttctgtgtacgtagaccagtcccatcagtgtataatctctctctcacacgcctctctccaatagacagcttgtatttgcagtatttcatatttataaatatgcgtttatttaaaaggagaacaaaagcttgactctgattcacagttttgtatgtagctggtttgacgtagtcttttgtattttccctgccgaagtgaattgttggagaatgtaaaccgcctccacgtggcggcagacttcctaaggccccagctcgctggcctcgcgctgggcggctgggaattccacctgagaacaagtcccgcaaaccggggacggaaggacatttgacttttatttttgtatttaattgacatgaatgtaaaggggacagctcagggttgttttggagcctgttgactttgtatctctgcctgtgattttcttttctaaatgaaactccatgtagcaaccaggacgaagttgagaaggaaaacgccaaatgctttggttattagagtttaataggtaagctctgttacactaggtgttagagttccagaatgttcttttgtttgctaaaccttgaagaaacatgtgcctcagcctagatgttttgtcttctcttttctgcacttaatacctgacagtatgaccgatctctgcgcctttctgggggcgggcaagctggcggtagatttgtgatgtcacagtgcaaactgcagtgactgtaaattggcctggcgtgtataaacgttttcagggaatgcagaaggtattaatgaagagacaaaacctttattccatgtgctttgcttcattctgtacatagctctttggctcgtgaacctaattgtaaactttcaggtatttttgtacaaataagggactgatgttctgtttcttgtaattagaaataaacattaatacagtgttcttcattttc

SEQ ID NO: 1854 - DNA, 4705 bp, Homo sapiens
  source 1..4705: mol_type = genomic DNA
aaatgtaatttgaagaaggcagaaggaacccatggctttagccggctgcccagattcctttttgcaccatccgtactaccaggacaaggtggagcagacacctcgcagtcaacaagacccggcaggaccaggactccccgcacagtctgaccgacttgcgaatcaccaggaggatgatgtggacctggaagccctggtgaacgatatgaatgcatccctggagagcctgtactcggcctgcagcatgcagtcagacacggtgcccctcctgcagaatggccagcatgcccgcagccagcctcgggcttcaggccctcctcggtccatccagccacaggtgtccccgaggcagagggtgcagcgctcccagcctgtgcacatcctcgctgtcaggcgccttcaggaggaagaccagcagtttagaacctcatctctgccggccatccccaatccttttcctgaactctgtggccctgggagcccccctgtgctcacgccgggttctttacctccgagccaggccgccgcaaagcaggatgttaaagtctttagtgaagatgggacaagcaaagtggtggagattctagcagacatgacagccagagacctgtgccaattgctggtttacaaaagtcactgtgtggatgacaacagctggacactagtggagcaccacccgcacctaggattagagaggtgcttggaagaccatgagctggtggtccaggtggagagtaccatggccagtgagagtaaatttctattcaggaagaattacgcaaaatacgagttctttaaaaatcccatgaatttcttcccagaacagatggttacttggtgccagcagtcaaatggcagtcaaacccagcttttgcagaattttctgaactccagtagttgtcctgaaattcaagggtttttgcatgtgaaagagctgggaaagaaatcatggaaaaagctgtatgtgtgtttgcggagatctggcctttattgctccaccaagggaacttcaaaggaacccagacacctgcagctgctggccgacctggaggacagcaacatcttctccctgatcgctggcaggaagcagtacaacgcccctacagaccacgggctctgcataaagccaaacaaagtcaggaatgaaactaaagagctgaggttgctctgtgcagaggacgagcaaaccaggacgtgctggatgacagcgttcagactcctcaagtatggaatgctcctttaccagaattaccgaatccctcagcagaggaaggccttgctgtccccgttctcgacgccagtgcgcagtgtctccgagaactccctcgtggcaatggatttttctgggcaaacaggacgcgtgatagagaatccggcagaggcccagagcgcagccctggaggagggccacgcctggaggaagcgaagcacacggatgaacatcctaggtagccaaagtcccctccacccttctaccctaagtacagtgattcacaggacacagcactggtttcacgggaggatctccagggaggaatcccacaggatcattaaacagcaagggctcgtggatgggctttttctcctccgtgacagccagagtaatccaaaggcatttgtactcacactgtgtcatcaccagaaaattaaaaatttccagatcttaccttgcgaggacgacgggcagacgttcttcagcctagatgacgggaacaccaaattctctgacctgatccagctggttgacttttaccagctgaacaaaggagtcctgccttgcaaactcaagcaccactgcatccgagtggccttatgaccgcagatgtcctctcggctgaagactggaggaagtgaacactggagtgaagaagcggtctgtgcgttggtgaagaacacacatcgattctgcacctggggacccagagcgagatgggtttgttcggtgccagccgaccaagattgactagtttgttggacttaaacgacgatttgctgctgtgaacccagcagggtcgcctccctctgcatcggccaaattggggagggcatggaagatccagcggaaagttgaaaataaactggaatgatcatcttggcttgggccgcttaggaacaagaaccggagagaagtgattggaaatgaactcttgccctggaataatcttgacaattaaaactgatatgtttactttttttgtattgatcacttttttgcactccttctttgttttcaatattgtattcagcctattgtaggagggggatgtggcgtttcaactcatataatacagaaagagttttgaatgggcagatttcaaactgaatatgggtccccaaatgttcccagagggtcctccacaccctctgccgactaccacggtgtggattcagctcccaaatgacaaacccagcccttcccagtatacttgaaaagctttcttgttaaaataaaaggtgtcactgtggtaggcatttggcatattttgtggactcagtcaagcaaccacagtctgttaatcatttctctatgctcagatgtcagatcctcttgttattagtgtgtcttgttctgcacagtgcaggagactttattcctttggaaaattcactgttccacaaacagcaggctgaatggcctcgcctctagattgacgtgggccagcctccttgagacacacctggcacccgtcatcggccagcggtggatgctgcataatccacctgggtacttcagccttgcgtttccacagccttcagcctgttctagaacgatcactgccttacccctgctgctgcagtggtgtgagtcgtttcacggctgatgtccctcgggggattaaaggatctaaagagaaaatggcacctggttgtcttcgtgctgtgtctcatgggtttccatagtgataaagacaaggaaacgctgcaggggccacaggcacaggctgatatttaaagatctttgcttgcagccctccgtcctgctgaaaacccccataagccagtgaacacagagcagctagaggctcctcctctgctggcttagggtcagaagtacctcacagtggttgtggacatggaagagttttgtcaacacaacactttgtccccgctccgggagatgagtcagatggtggcttgagttgtcacttggtcccctccgcccctcgggtggccccctttgccacgtccccttagcttagtgatcaggtgtgagagtggccatttccttacctttgatccctgtaaagcagaaaggactcctttgacaggcgacaaactactgtggtgagcagaatgatttcctttttcaagacaacacctgcctggcttctattaatgtgtgctggccatgatattgccccaaatccgccccactgaagtgttccctaaggaacagcatttctctgctcctcagtcaacccccgtagcctagagcagtgtcacaagcttcagtaaggccagtcagctggaagtcagtctaccgtatagtaacactgtatgtcagtctacagaccacactctagttgttttccatgaaaggtatacaaatgaagaattttctagcaaaacatgtttttaaccatcagtgctcaattgcattttcttcctttcgcagccagtcagtctttcaaactattgacagtaagataattctcacgttcacacctggtggcaggcttcactgtagggacggacattgcagttacaccacgattccttcctcttcactggctcgaggtaaacccttttcaaggaaaaacaactctaggatttcttttttctgtgtacgtagaccagtcccatcagtgtataatctctctctcacacgcctctctccaatagacagcttgtatttgcagtatttcatatttataaatatgcgtttatttaaaaggagaacaaaagcttgactctgattcacagttttgtatgtagctggtttgacgtagtcttttgtattttccctgccgaagtgaattgttggagaatgtaaaccgcctccacgtggcggcagacttcctaaggccccagctcgctggcctcgcgctgggcggctgggaattccacctgagaacaagtcccgcaaaccggggacggaaggacatttgacttttatttttgtatttaattgacatgaatgtaaaggggacagctcagggttgttttggagcctgttgactttgtatctctgcctgtgattttcttttctaaatgaaactccatgtagcaaccaggacgaagttgagaaggaaaacgccaaatgctttggttattagagtttaataggtaagctctgttacactaggtgttagagttccagaatgttcttttgtttgctaaaccttgaagaaacatgtgcctcagcctagatgttttgtcttctcttttctgcacttaatacctgacagtatgaccgatctctgcgcctttctgggggcgggcaagctggcggtagatttgtgatgtcacagtgcaaactgcagtgactgtaaattggcctggcgtgtataaacgttttcagggaatgcagaaggtattaatgaagagacaaaacctttattccatgtgctttgcttcattctgtacatagctctttggctcgtgaacctaattgtaaactttcaggtatttttgtacaaataagggactgatgttctgtttcttgtaattagaaataaacattaatacagtgttcttcattttc

SEQ ID NO: 1855 - DNA, 2627 bp, Homo sapiens; identical to SEQ ID NO: 1852
  source 1..2627: mol_type = genomic DNA

SEQ ID NO: 1856 - DNA, 2289 bp, Homo sapiens
  source 1..2289: mol_type = genomic DNA
gaagcgagctgcggccgggcgggctcggcgctcggagacccggtggagcccaaagtttccgcgcagcccctgggtggcggcagcgccggcggcgcggggcgcccgggacagtcttgagcgccggcctcgccccgcggggacccgcgcccgccgccggccacgccgagtgtcgcccgcagccacgcggaggcggcggggagccgcgcgcggcaggacaaggtggagcagacacctcgcagtcaacaagacccggcaggaccaggactccccgcacagtctgaccgacttgcgaatcaccaggaggatgatgtggacctggaagccctggtgaacgatatgaatgcatccctggagagcctgtactcggcctgcagcatgcagtcagacacggtgcccctcctgcagaatggccagcatgcccgcagccagcctcgggcttcaggccctcctcggtccatccagccacaggtgtccccgaggcagagggtgcagcgctcccagcctgtgcacatcctcgctgtcaggcgccttcaggaggaagaccagcagtttagaacctcatctctgccggccatccccaatccttttcctgaactctgtggccctgggagcccccctgtgctcacgccgggttctttacctccgagccaggccgccgcaaagcaggatgttaaagtctttagtgaagatgggacaagcaaagtggtggagattctagcagacatgacagccagagacctgtgccaattgctggtttacaaaagtcactgtgtggatgacaacagctggacactagtggagcaccacccgcacctaggattagagaggtgcttggaagaccatgagctggtggtccaggtggagagtaccatggccagtgagagtaaatttctattcaggaagaattacgcaaaatacgagttctttaaaaatcccatgaatttcttcccagaacagatggttacttggtgccagcagtcaaatggcagtcaaacccagcttttgcagaattttctgaactccagtagttgtcctgaaattcaagggtttttgcatgtgaaagagctgggaaagaaatcatggaaaaagctgtatgtgtgtttgcggagatctggcctttattgctccaccaagggaacttcaaaggaacccagacacctgcagctgctggccgacctggaggacagcaacatcttctccctgatcgctggcaggaagcagtacaacgcccctacagaccacgggctctgcataaagccaaacaaagtcaggaatgaaactaaagagctgaggttgctctgtgcagaggacgagcaaaccaggacgtgctggatgacagcgttcagactcctcaagtatggaatgctcctttaccagaattaccgaatccctcagcagaggaaggccttgctgtccccgttctcgacgccagtgcgcagtgtctccgagaactccctcgtggcaatggatttttctgggcaaacaggacgcgtgatagagaatccggcagaggcccagagcgcagccctggaggagggccacgcctggaggaagcgaagcacacggatgaacatcctaggtagccaaagtcccctccacccttctaccctaagtacagtgattcacaggacacagcactggtttcacgggaggatctccagggaggaatcccacaggatcattaaacagcaagggctcgtggatgggctttttctcctccgtgacagccagagtaatccaaaggcatttgtactcacactgtgtcatcaccagaaaattaaaaatttccagatcttaccttgcgaggacgacgggcagacgttcttcagcctagatgacgggaacaccaaattctctgacctgatccagctggttgacttttaccagctgaacaaaggagtcctgccttgcaaactcaagcaccactgcatccgagtggccttatgaccgcagatgtcctctcggctgaagactggaggaagtgaacactggagtgaagaagcggtctgtgcgttggtgaagaacacacatcgattctgcacctggggacccagagcgagatgggtttgttcggtgccagccgaccaagattgactagtttgttggacttaaacgacgatttgctgctgtgaacccagcagggtcgcctccctctgcatcggccaaattggggagggcatggaagatccagcggaaagttgaaaataaactggaatgatcatcttggcttgggccgcttaggaacaagaaccggagagaagtgattggaaatgaactcttgccctggaa

SEQ ID NO: 1857 - DNA, 4760 bp, Homo sapiens
  source 1..4760: mol_type = genomic DNA
accgactctgtgaattgggtaccttcatgatacccattttataaatgagaaaactgaggtttttactatatgctggtcatcatgctgaggactttacttggattttctctcctgccaatgctacgcggtggggaccttcatgttctcccctttgcagatgagattatcaaagcagaaaaagaccatctctcctactgagtaacagaggaaaccagggcttgcagatattgaggatgatgtggacctggaagccctggtgaacgatatgaatgcatccctggagagcctgtactcggcctgcagcatgcagtcagacacggtgcccctcctgcagaatggccagcatgcccgcagccagcctcgggcttcaggccctcctcggtccatccagccacaggtgtccccgaggcagagggtgcagcgctcccagcctgtgcacatcctcgctgtcaggcgccttcaggaggaagaccagcagtttagaacctcatctctgccggccatccccaatccttttcctgaactctgtggccctgggagcccccctgtgctcacgccgggttctttacctccgagccaggccgccgcaaagcaggatgttaaagtctttagtgaagatgggacaagcaaagtggtggagattctagcagacatgacagccagagacctgtgccaattgctggtttacaaaagtcactgtgtggatgacaacagctggacactagtggagcaccacccgcacctaggattagagaggtgcttggaagaccatgagctggtggtccaggtggagagtaccatggccagtgagagtaaatttctattcaggaagaattacgcaaaatacgagttctttaaaaatcccatgaatttcttcccagaacagatggttacttggtgccagcagtcaaatggcagtcaaacccagcttttgcagaattttctgaactccagtagttgtcctgaaattcaagggtttttgcatgtgaaagagctgggaaagaaatcatggaaaaagctgtatgtgtgtttgcggagatctggcctttattgctccaccaagggaacttcaaaggaacccagacacctgcagctgctggccgacctggaggacagcaacatcttctccctgatcgctggcaggaagcagtacaacgcccctacagaccacgggctctgcataaagccaaacaaagtcaggaatgaaactaaagagctgaggttgctctgtgcagaggacgagcaaaccaggacgtgctggatgacagcgttcagactcctcaagtatggaatgctcctttaccagaattaccgaatccctcagcagaggaaggccttgctgtccccgttctcgacgccagtgcgcagtgtctccgagaactccctcgtggcaatggatttttctgggcaaacaggacgcgtgatagagaatccggcagaggcccagagcgcagccctggaggagggccacgcctggaggaagcgaagcacacggatgaacatcctaggtagccaaagtcccctccacccttctaccctaagtacagtgattcacaggacacagcactggtttcacgggaggatctccagggaggaatcccacaggatcattaaacagcaagggctcgtggatgggctttttctcctccgtgacagccagagtaatccaaaggcatttgtactcacactgtgtcatcaccagaaaattaaaaatttccagatcttaccttgcgaggacgacgggcagacgttcttcagcctagatgacgggaacaccaaattctctgacctgatccagctggttgacttttaccagctgaacaaaggagtcctgccttgcaaactcaagcaccactgcatccgagtggccttatgaccgcagatgtcctctcggctgaagactggaggaagtgaacactggagtgaagaagcggtctgtgcgttggtgaagaacacacatcgattctgcacctggggacccagagcgagatgggtttgttcggtgccagccgaccaagattgactagtttgttggacttaaacgacgatttgctgctgtgaacccagcagggtcgcctccctctgcatcggccaaattggggagggcatggaagatccagcggaaagttgaaaataaactggaatgatcatcttggcttgggccgcttaggaacaagaaccggagagaagtgattggaaatgaactcttgccctggaataatcttgacaattaaaactgatatgtttactttttttgtattgatcacttttttgcactccttctttgttttcaatattgtattcagcctattgtaggagggggatgtggcgtttcaactcatataatacagaaagagttttgaatgggcagatttcaaactgaatatgggtccccaaatgttcccagagggtcctccacaccctctgccgactaccacggtgtggattcagctcccaaatgacaaacccagcccttcccagtatacttgaaaagctttcttgttaaaataaaaggtgtcactgtggtaggcatttggcatattttgtggactcagtcaagcaaccacagtctgttaatcatttctctatgctcagatgtcagatcctcttgttattagtgtgtcttgttctgcacagtgcaggagactttattcctttggaaaattcactgttccacaaacagcaggctgaatggcctcgcctctagattgacgtgggccagcctccttgagacacacctggcacccgtcatcggccagcggtggatgctgcataatccacctgggtacttcagccttgcgtttccacagccttcagcctgttctagaacgatcactgccttacccctgctgctgcagtggtgtgagtcgtttcacggctgatgtccctcgggggattaaaggatctaaagagaaaatggcacctggttgtcttcgtgctgtgtctcatgggtttccatagtgataaagacaaggaaacgctgcaggggccacaggcacaggctgatatttaaagatctttgcttgcagccctccgtcctgctgaaaacccccataagccagtgaacacagagcagctagaggctcctcctctgctggcttagggtcagaagtacctcacagtggttgtggacatggaagagttttgtcaacacaacactttgtccccgctccgggagatgagtcagatggtggcttgagttgtcacttggtcccctccgcccctcgggtggccccctttgccacgtccccttagcttagtgatcaggtgtgagagtggccatttccttacctttgatccctgtaaagcagaaaggactcctttgacaggcgacaaactactgtggtgagcagaatgatttcctttttcaagacaacacctgcctggcttctattaatgtgtgctggccatgatattgccccaaatccgccccactgaagtgttccctaaggaacagcatttctctgctcctcagtcaacccccgtagcctagagcagtgtcacaagcttcagtaaggccagtcagctggaagtcagtctaccgtatagtaacactgtatgtcagtctacagaccacactctagttgttttccatgaaaggtatacaaatgaagaattttctagcaaaacatgtttttaaccatcagtgctcaattgcattttcttcctttcgcagccagtcagtctttcaaactattgacagtaagataattctcacgttcacacctggtggcaggcttcactgtagggacggacattgcagttacaccacgattccttcctcttcactggctcgaggtaaacccttttcaaggaaaaacaactctaggatttcttttttctgtgtacgtagaccagtcccatcagtgtataatctctctctcacacgcctctctccaatagacagcttgtatttgcagtatttcatatttataaatatgcgtttatttaaaaggagaacaaaagcttgactctgattcacagttttgtatgtagctggtttgacgtagtcttttgtattttccctgccgaagtgaattgttggagaatgtaaaccgcctccacgtggcggcagacttcctaaggccccagctcgctggcctcgcgctgggcggctgggaattccacctgagaacaagtcccgcaaaccggggacggaaggacatttgacttttatttttgtatttaattgacatgaatgtaaaggggacagctcagggttgttttggagcctgttgactttgtatctctgcctgtgattttcttttctaaatgaaactccatgtagcaaccaggacgaagttgagaaggaaaacgccaaatgctttggttattagagtttaataggtaagctctgttacactaggtgttagagttccagaatgttcttttgtttgctaaaccttgaagaaacatgtgcctcagcctagatgttttgtcttctcttttctgcacttaatacctgacagtatgaccgatctctgcgcctttctgggggcgggcaagctggcggtagatttgtgatgtcacagtgcaaactgcagtgactgtaaattggcctggcgtgtataaacgttttcagggaatgcagaaggtattaatgaagagacaaaacctttattccatgtgctttgcttcattctgtacatagctctttggctcgtgaacctaattgtaaactttcaggtatttttgtacaaataagggactgatgttctgtttcttgtaattagaaataaacattaatacagtgttcttca

SEQ ID NO: 1858 - DNA, 5432 bp, Homo sapiens
  source 1..5432: mol_type = genomic DNA
ggcagccgggcgccccgcggggctctccgcgctgcgttcccgacccctggggggaggtgtggagtccaagcggtgcattcttgaaccatcttgtcagacgccggcggctcgcgggctgtggcgggggctgcggtcaaggccgcgctcctgggggccgccgcctgggagggtgggcgcccaggcgtccctgcagccccgggtgctccgactgcgcggcggggccgcggcgcgcgcgcccgggcgtccgggcgtccgggacagtggtgccagacactcccaaatcccgagccggcccagcctcgtacggaggaccttttttttggttctgttggtgacccgttagccgccgctggggcctaacaccaagttgagggctcgcggattagccgcccgccagccgtggaaatgtgataagagcggtaccgtttgcagaaggaaatttctgatgcaactcttcgcctttgctgattgcctctccaaacgcctgcctgacgactgccttggagcatgtgcgttatggaaattaggctttggcgctgaccacaatgctgagcaggaagcagcagctgcaggcccagtgactggtagctcagtgaccagcagcccagtgaccggcagccaggtcctcacctgggtcctctcagtgaagccagggtggccgccccagcagacagtgctacagagccaactcctgacaggttctgaaaatattgtgcacagggcaggctgaggacacagccacgtgatacccactgtagagagagggagagagagacctcctatgcaagctgccggccctctgttccgtagtaaggacaaggtggagcagacacctcgcagtcaacaagacccggcaggaccaggactccccgcacagtctgaccgacttgcgaatcaccaggaggatgatgtggacctggaagccctggtgaacgatatgaatgcatccctggagagcctgtactcggcctgcagcatgcagtcagacacggtgcccctcctgcagaatggccagcatgcccgcagccagcctcgggcttcaggccctcctcggtccatccagccacaggtgtccccgaggcagagggtgcagcgctcccagcctgtgcacatcctcgctgtcaggcgccttcaggaggaagaccagcagtttagaacctcatctctgccggccatccccaatccttttcctgaactctgtggccctgggagcccccctgtgctcacgccgggttctttacctccgagccaggccgccgcaaagcaggatgttaaagtctttagtgaagatgggacaagcaaagtggtggagattctagcagacatgacagccagagacctgtgccaattgctggtttacaaaagtcactgtgtggatgacaacagctggacactagtggagcaccacccgcacctaggattagagaggtgcttggaagaccatgagctggtggtccaggtggagagtaccatggccagtgagagtaaatttctattcaggaagaattacgcaaaatacgagttctttaaaaatcccatgaatttcttcccagaacagatggttacttggtgccagcagtcaaatggcagtcaaacccagcttttgcagaattttctgaactccagtagttgtcctgaaattcaagggtttttgcatgtgaaagagctgggaaagaaatcatggaaaaagctgtatgtgtgtttgcggagatctggcctttattgctccaccaagggaacttcaaaggaacccagacacctgcagctgctggccgacctggaggacagcaacatcttctccctgatcgctggcaggaagcagtacaacgcccctacagaccacgggctctgcataaagccaaacaaagtcaggaatgaaactaaagagctgaggttgctctgtgcagaggacgagcaaaccaggacgtgctggatgacagcgttcagactcctcaagtatggaatgctcctttaccagaattaccgaatccctcagcagaggaaggccttgctgtccccgttctcgacgccagtgcgcagtgtctccgagaactccctcgtggcaatggatttttctgggcaaacaggacgcgtgatagagaatccggcagaggcccagagcgcagccctggaggagggccacgcctggaggaagcgaagcacacggatgaacatcctaggtagccaaagtcccctccacccttctaccctaagtacagtgattcacaggacacagcactggtttcacgggaggatctccagggaggaatcccacaggatcattaaacagcaagggctcgtggatgggctttttctcctccgtgacagccagagtaatccaaaggcatttgtactcacactgtgtcatcaccagaaaattaaaaatttccagatcttaccttgcgaggacgacgggcagacgttcttcagcctagatgacgggaacaccaaattctctgacctgatccagctggttgacttttaccagctgaacaaaggagtcctgccttgcaaactcaagcaccactgcatccgagtggccttatgaccgcagatgtcctctcggctgaagactggaggaagtgaacactggagtgaagaagcggtctgtgcgttggtgaagaacacacatcgattctgcacctggggacccagagcgagatgggtttgttcggtgccagccgaccaagattgactagtttgttggacttaaacgacgatttgctgctgtgaacccagcagggtcgcctccctctgcatcggccaaattggggagggcatggaagatccagcggaaagttgaaaataaactggaatgatcatcttggcttgggccgcttaggaacaagaaccggagagaagtgattggaaatgaactcttgccctggaataatcttgacaattaaaactgatatgtttactttttttgtattgatcacttttttgcactccttctttgttttcaatattgtattcagcctattgtaggagggggatgtggcgtttcaactcatataatacagaaagagttttgaatgggcagatttcaaactgaatatgggtccccaaatgttcccagagggtcctccacaccctctgccgactaccacggtgtggattcagctcccaaatgacaaacccagcccttcccagtatacttgaaaagctttcttgttaaaataaaaggtgtcactgtggtaggcatttggcatattttgtggactcagtcaagcaaccacagtctgttaatcatttctctatgctcagatgtcagatcctcttgttattagtgtgtcttgttctgcacagtgcaggagactttattcctttggaaaattcactgttccacaaacagcaggctgaatggcctcgcctctagattgacgtgggccagcctccttgagacacacctggcacccgtcatcggccagcggtggatgctgcataatccacctgggtacttcagccttgcgtttccacagccttcagcctgttctagaacgatcactgccttacccctgctgctgcagtggtgtgagtcgtttcacggctgatgtccctcgggggattaaaggatctaaagagaaaatggcacctggttgtcttcgtgctgtgtctcatgggtttccatagtgataaagacaaggaaacgctgcaggggccacaggcacaggctgatatttaaagatctttgcttgcagccctccgtcctgctgaaaacccccataagccagtgaacacagagcagctagaggctcctcctctgctggcttagggtcagaagtacctcacagtggttgtggacatggaagagttttgtcaacacaacactttgtccccgctccgggagatgagtcagatggtggcttgagttgtcacttggtcccctccgcccctcgggtggccccctttgccacgtccccttagcttagtgatcaggtgtgagagtggccatttccttacctttgatccctgtaaagcagaaaggactcctttgacaggcgacaaactactgtggtgagcagaatgatttcctttttcaagacaacacctgcctggcttctattaatgtgtgctggccatgatattgccccaaatccgccccactgaagtgttccctaaggaacagcatttctctgctcctcagtcaacccccgtagcctagagcagtgtcacaagcttcagtaaggccagtcagctggaagtcagtctaccgtatagtaacactgtatgtcagtctacagaccacactctagttgttttccatgaaaggtatacaaatgaagaattttctagcaaaacatgtttttaaccatcagtgctcaattgcattttcttcctttcgcagccagtcagtctttcaaactattgacagtaagataattctcacgttcacacctggtggcaggcttcactgtagggacggacattgcagttacaccacgattccttcctcttcactggctcgaggtaaacccttttcaaggaaaaacaactctaggatttcttttttctgtgtacgtagaccagtcccatcagtgtataatctctctctcacacgcctctctccaatagacagcttgtatttgcagtatttcatatttataaatatgcgtttatttaaaaggagaacaaaagcttgactctgattcacagttttgtatgtagctggtttgacgtagtcttttgtattttccctgccgaagtgaattgttggagaatgtaaaccgcctccacgtggcggcagacttcctaaggccccagctcgctggcctcgcgctgggcggctgggaattccacctgagaacaagtcccgcaaaccggggacggaaggacatttgacttttatttttgtatttaattgacatgaatgtaaaggggacagctcagggttgttttggagcctgttgactttgtatctctgcctgtgattttcttttctaaatgaaactccatgtagcaaccaggacgaagttgagaaggaaaacgccaaatgctttggttattagagtttaataggtaagctctgttacactaggtgttagagttccagaatgttcttttgtttgctaaaccttgaagaaacatgtgcctcagcctagatgttttgtcttctcttttctgcacttaatacctgacagtatgaccgatctctgcgcctttctgggggcgggcaagctggcggtagatttgtgatgtcacagtgcaaactgcagtgactgtaaattggcctggcgtgtataaacgttttcagggaatgcagaaggtattaatgaagagacaaaacctttattccatgtgctttgcttcattctgtacatagctctttggctcgtgaacctaattgtaaactttcaggtatttttgtacaaataagggactgatgttctgtttcttgtaattagaaataaacattaatacagtgttcttca

SEQ ID NO: 1859 - DNA, 2700 bp, Homo sapiens
  source 1..2700: mol_type = genomic DNA
ctttccagctttggcgctgaccacaatgctgagcaggaagcagcagctgcaggcccagtgactggtagctcagtgaccagcagcccagtgaccggcagccaggtcctcacctgggtcctctcagtgaagccagggtggccgccccagcagacagtgctacagagccaactcctgacagatattctggaggaaggtgtgaacgcaactttgcctcccagggaacaaacatcctccttctaagtggtagatgtgggtgagctgaccctgctggagtctgtcccctgggctaccctctgcttccccccattgtgagtggtccgtgaagcacagcgttgaccagacctaaacctgtttgctcccaggacaaggtggagcagacacctcgcagtcaacaagacccggcaggaccaggactccccgcacagtctgaccgacttgcgaatcaccaggaggatgatgtggacctggaagccctggtgaacgatatgaatgcatccctggagagcctgtactcggcctgcagcatgcagtcagacacggtgcccctcctgcagaatggccagcatgcccgcagccagcctcgggcttcaggccctcctcggtccatccagccacaggtgtccccgaggcagagggtgcagcgctcccagcctgtgcacatcctcgctgtcaggcgccttcaggaggaagaccagcagtttagaacctcatctctgccggccatccccaatccttttcctgaactctgtggccctgggagcccccctgtgctcacgccgggttctttacctccgagccaggccgccgcaaagcaggatgttaaagtctttagtgaagatgggacaagcaaagtggtggagattctagcagacatgacagccagagacctgtgccaattgctggtttacaaaagtcactgtgtggatgacaacagctggacactagtggagcaccacccgcacctaggattagagaggtgcttggaagaccatgagctggtggtccaggtggagagtaccatggccagtgagagtaaatttctattcaggaagaattacgcaaaatacgagttctttaaaaatcccatgaatttcttcccagaacagatggttacttggtgccagcagtcaaatggcagtcaaacccagcttttgcagaattttctgaactccagtagttgtcctgaaattcaagggtttttgcatgtgaaagagctgggaaagaaatcatggaaaaagctgtatgtgtgtttgcggagatctggcctttattgctccaccaagggaacttcaaaggaacccagacacctgcagctgctggccgacctggaggacagcaacatcttctccctgatcgctggcaggaagcagtacaacgcccctacagaccacgggctctgcataaagccaaacaaagtcaggaatgaaactaaagagctgaggttgctctgtgcagaggacgagcaaaccaggacgtgctggatgacagcgttcagactcctcaagtatggaatgctcctttaccagaattaccgaatccctcagcagaggaaggccttgctgtccccgttctcgacgccagtgcgcagtgtctccgagaactccctcgtggcaatggatttttctgggcaaacaggacgcgtgatagagaatccggcagaggcccagagcgcagccctggaggagggccacgcctggaggaagcgaagcacacggatgaacatcctaggtagccaaagtcccctccacccttctaccctaagtacagtgattcacaggacacagcactggtttcacgggaggatctccagggaggaatcccacaggatcattaaacagcaagggctcgtggatgggctttttctcctccgtgacagccagagtaatccaaaggcatttgtactcacactgtgtcatcaccagaaaattaaaaatttccagatcttaccttgcgaggacgacgggcagacgttcttcagcctagatgacgggaacaccaaattctctgacctgatccagctggttgacttttaccagctgaacaaaggagtcctgccttgcaaactcaagcaccactgcatccgagtggccttatgaccgcagatgtcctctcggctgaagactggaggaagtgaacactggagtgaagaagcggtctgtgcgttggtgaagaacacacatcgattctgcacctggggacccagagcgagatgggtttgttcggtgccagccgaccaagattgactagtttgttggacttaaacgacgatttgctgctgtgaacccagcagggtcgcctccctctgcatcggccaaattggggagggcatggaagatccagcggaaagttgaaaataaactggaatgatcatcttggcttgggccgcttaggaacaagaaccggagagaagtgattggaaatgaactcttgccctggaataatcttgacaattaaaactgatatgtttactttttttgtattgatcacttttttgcactccttctttgttttcaatattgtattcagcctattgtaggagggggatgtggcgtttcaactcatataatacagaaagagttttgaatgggcagatttcaaactgaatatgggtccccaaatgttcccagagggtcctccacaccctctgccgactaccacggtgtggattcagctcccaaatgacaaacccagcccttccca

SEQ ID NO: 1860 - DNA, 2279 bp, Homo sapiens
  source 1..2279: mol_type = genomic DNA
cagctttggcgctgaccacaatgctgagcaggaagcagcagctgcaggcccagtgactggtagctcagtgaccagcagcccagtgaccggcagccaggtcctcacctgggtcctctcagtgaagccagggtggccgccccagcagacagtgctacagagccaactcctgacaggacaaggtggagcagacacctcgcagtcaacaagacccggcaggaccaggactccccgcacagtctgaccgacttgcgaatcaccaggaggatgatgtggacctggaagccctggtgaacgatatgaatgcatccctggagagcctgtactcggcctgcagcatgcagtcagacacggtgcccctcctgcagaatggccagcatgcccgcagccagcctcgggcttcaggccctcctcggtccatccagccacaggtgtccccgaggcagagggtgcagcgctcccagcctgtgcacatcctcgctgtcaggcgccttcaggaggaagaccagcagtttagaacctcatctctgccggccatccccaatccttttcctgaactctgtggccctgggagcccccctgtgctcacgccgggttctttacctccgagccaggccgccgcaaagcaggatgttaaagtctttagtgaagatgggacaagcaaagtggtggagattctagcagacatgacagccagagacctgtgccaattgctggtttacaaaagtcactgtgtggatgacaacagctggacactagtggagcaccacccgcacctaggattagagaggtgcttggaagaccatgagctggtggtccaggtggagagtaccatggccagtgagagtaaatttctattcaggaagaattacgcaaaatacgagttctttaaaaatcccatgaatttcttcccagaacagatggttacttggtgccagcagtcaaatggcagtcaaacccagcttttgcagaattttctgaactccagtagttgtcctgaaattcaagggtttttgcatgtgaaagagctgggaaagaaatcatggaaaaagctgtatgtgtgtttgcggagatctggcctttattgctccaccaagggaacttcaaaggaacccagacacctgcagctgctggccgacctggaggacagcaacatcttctccctgatcgctggcaggaagcagtacaacgcccctacagaccacgggctctgcataaagccaaacaaagtcaggaatgaaactaaagagctgaggttgctctgtgcagaggacgagcaaaccaggacgtgctggatgacagcgttcagactcctcaagtatggaatgctcctttaccagaattaccgaatccctcagcagaggaaggccttgctgtccccgttctcgacgccagtgcgcagtgtctccgagaactccctcgtggcaatggatttttctgggcaaacaggacgcgtgatagagaatccggcagaggcccagagcgcagccctggaggagggccacgcctggaggaagcgaagcacacggatgaacatcctaggtagccaaagtcccctccacccttctaccctaagtacagtgattcacaggacacagcactggtttcacgggaggatctccagggaggaatcccacaggatcattaaacagcaagggctcgtggatgggctttttctcctccgtgacagccagagtaatccaaaggcatttgtactcacactgtgtcatcaccagaaaattaaaaatttccagatcttaccttgcgaggacgacgggcagacgttcttcagcctagatgacgggaacaccaaattctctgacctgatccagctggttgacttttaccagctgaacaaaggagtcctgccttgcaaactcaagcaccactgcatccgagtggccttatgaccgcagatgtcctctcggctgaagactggaggaagtgaacactggagtgaagaagcggtctgtgcgttggtgaagaacacacatcgattctgcacctggggacccagagcgagatgggtttgttcggtgccagccgaccaagattgactagtttgttggacttaaacgacgatttgctgctgtgaacccagcagggtcgcctccctctgcatcggccaaattggggagggcatggaagatccagcggaaagttgaaaataaactggaatgatcatcttggcttgggccgcttaggaacaagaaccggagagaagtgattggaaatgaactcttgccctggaataatcttgacaattaaaactgatatgttta

SEQ ID NO: 1861 - DNA, 733 bp, Homo sapiens
  source 1..733: mol_type = genomic DNA
cgagctgcggccgggcgggctcggcgctcggagacccggtggagcccaaagtttccgcgcagcccctgggtggcggcagcgccggcggcgcggggcgcccgggacagtcttgagcgccggcctcgccccgcggggacccgcgcccgccgccggccacgccgagtgtcgcccgcagccacgcggaggcggcggggagccgcgcgcggcaggtgctgcagcgcagtaaatgtaatttgaagaaggcagaaggaacccatggctttagccggctgcccagattcctttttgcaccatccgtactaccaggttctgaaaatattgtgcacagggcaggctgaggacacagccacgtgatacccactgtagagagagggagagagagacctcctatgcaagctgccggccctctgttccgtagtaaggacaaggtggagcagacacctcgcagtcaacaagacccggcaggaccaggactccccgcacagtctgaccgacttgcgaatcaccaggaggatgatgtggacctggaagccctggtgaacgatatgaatgcatccctggagagcctgtactcggcctgcagcatgcagtcagacacggtgcccctcctgcagaatggccagcatgcccgcagccagcctcgggcttcaggccctcctcggtccatccagccacaggtgtccccgaggcagagggtgcagcgctcccagcctgtgcacatcctcgctgtcag

SEQ ID NO: 1862 - DNA, 4656 bp, Homo sapiens
  source 1..4656: mol_type = genomic DNA
atgcaagctgccggccctctgttccgtagtaaggacaaggtggagcagacacctcgcagtcaacaagacccggcaggaccaggactccccgcacagtctgaccgacttgcgaatcaccaggaggatgatgtggacctggaagccctggtgaacgatatgaatgcatccctggagagcctgtactcggcctgcagcatgcagtcagacacggtgcccctcctgcagaatggccagcatgcccgcagccagcctcgggcttcaggccctcctcggtccatccagccacaggtgtccccgaggcagagggtgcagcgctcccagcctgtgcacatcctcgctgtcaggcgccttcaggaggaagaccagcagtttagaacctcatctctgccggccatccccaatccttttcctgaactctgtggccctgggagcccccctgtgctcacgccgggttctttacctccgagccaggccgccgcaaagcaggatgttaaagtctttagtgaagatgggacaagcaaagtggtggagattctagcagacatgacagccagagacctgtgccaattgctggtttacaaaagtcactgtgtggatgacaacagctggacactagtggagcaccacccgcacctaggattagagaggtgcttggaagaccatgagctggtggtccaggtggagagtaccatggccagtgagagtaaatttctattcaggaagaattacgcaaaatacgagttctttaaaaatcccatgaatttcttcccagaacagatggttacttggtgccagcagtcaaatggcagtcaaacccagcttttgcagaattttctgaactccagtagttgtcctgaaattcaagggtttttgcatgtgaaagagctgggaaagaaatcatggaaaaagctgtatgtgtgtttgcggagatctggcctttattgctccaccaagggaacttcaaaggaacccagacacctgcagctgctggccgacctggaggacagcaacatcttctccctgatcgctggcaggaagcagtacaacgcccctacagaccacgggctctgcataaagccaaacaaagtcaggaatgaaactaaagagctgaggttgctctgtgcagaggacgagcaaaccaggacgtgctggatgacagcgttcagactcctcaagtatggaatgctcctttaccagaattaccgaatccctcagcagaggaaggccttgctgtccccgttctcgacgccagtgcgcagtgtctccgagaactccctcgtggcaatggatttttctgggcaaacaggacgcgtgatagagaatccggcagaggcccagagcgcagccctggaggagggccacgcctggaggaagcgaagcacacggatgaacatcctaggtagccaaagtcccctccacccttctaccctaagtacagtgattcacaggacacagcactggtttcacgggaggatctccagggaggaatcccacaggatcattaaacagcaagggctcgtggatgggctttttctcctccgtgacagccagagtaatccaaaggcatttgtactcacactgtgtcatcaccagaaaattaaaaatttccagatcttaccttgcgaggacgacgggcagacgttcttcagcctagatgacgggaacaccaaattctctgacctgatccagctggttgacttttaccagctgaacaaaggagtcctgccttgcaaactcaagcaccactgcatccgagtggccttatgaccgcagatgtcctctcggctgaagactggaggaagtgaacactggagtgaagaagcggtctgtgcgttggtgaagaacacacatcgattctgcacctggggacccagagcgagatgggtttgttcggtgccagccgaccaagattgactagtttgttggacttaaacgacgatttgctgctgtgaacccagcagggtcgcctccctctgcatcggccaaattggggagggcatggaagatccagcggaaagttgaaaataaactggaatgatcatcttggcttgggccgcttaggaacaagaaccggagagaagtgattggaaatgaactcttgccctggaataatcttgacaattaaaactgatatgtttactttttttgtattgatcacttttttgcactccttctttgttttcaatattgtattcagcctattgtaggagggggatgtggcgtttcaactcatataatacagaaagagttttgaatgggcagatttcaaactgaatatgggtccccaaatgttcccagagggtcctccacaccctctgccgactaccacggtgtggattcagctcccaaatgacaaacccagcccttcccagtatacttgaaaagctttcttgttaaaataaaaggtgtcactgtggtaggcatttggcatattttgtggactcagtcaagcaaccacagtctgttaatcatttctctatgctcagatgtcagatcctcttgttattagtgtgtcttgttctgcacagtgcaggagactttattcctttggaaaattcactgttccacaaacagcaggctgaatggcctcgcctctagattgacgtgggccagcctccttgagacacacctggcacccgtcatcggccagcggtggatgctgcataatccacctgggtacttcagccttgcgtttccacagccttcagcctgttctagaacgatcactgccttacccctgctgctgcagtggtgtgagtcgtttcacggctgatgtccctcgggggattaaaggatctaaagagaaaatggcacctggttgtcttcgtgctgtgtctcatgggtttccatagtgataaagacaaggaaacgctgcaggggccacaggcacaggctgatatttaaagatctttgcttgcagccctccgtcctgctgaaaacccccataagccagtgaacacagagcagctagaggctcctcctctgctggcttagggtcagaagtacctcacagtggttgtggacatggaagagttttgtcaacacaacactttgtccccgctccgggagatgagtcagatggtggcttgagttgtcacttggtcccctccgcccctcgggtggccccctttgccacgtccccttagcttagtgatcaggtgtgagagtggccatttccttacctttgatccctgtaaagcagaaaggactcctttgacaggcgacaaactactgtggtgagcagaatgatttcctttttcaagacaacacctgcctggcttctattaatgtgtgctggccatgatattgccccaaatccgccccactgaagtgttccctaaggaacagcatttctctgctcctcagtcaacccccgtagcctagagcagtgtcacaagcttcagtaaggccagtcagctggaagtcagtctaccgtatagtaacactgtatgtcagtctacagaccacactctagttgttttccatgaaaggtatacaaatgaagaattttctagcaaaacatgtttttaaccatcagtgctcaattgcattttcttcctttcgcagccagtcagtctttcaaactattgacagtaagataattctcacgttcacacctggtggcaggcttcactgtagggacggacattgcagttacaccacgattccttcctcttcactggctcgaggtaaacccttttcaaggaaaaacaactctaggatttcttttttctgtgtacgtagaccagtcccatcagtgtataatctctctctcacacgcctctctccaatagacagcttgtatttgcagtatttcatatttataaatatgcgtttatttaaaaggagaacaaaagcttgactctgattcacagttttgtatgtagctggtttgacgtagtcttttgtattttccctgccgaagtgaattgttggagaatgtaaaccgcctccacgtggcggcagacttcctaaggccccagctcgctggcctcgcgctgggcggctgggaattccacctgagaacaagtcccgcaaaccggggacggaaggacatttgacttttatttttgtatttaattgacatgaatgtaaaggggacagctcagggttgttttggagcctgttgactttgtatctctgcctgtgattttcttttctaaatgaaactccatgtagcaaccaggacgaagttgagaaggaaaacgccaaatgctttggttattagagtttaataggtaagctctgttacactaggtgttagagttccagaatgttcttttgtttgctaaaccttgaagaaacatgtgcctcagcctagatgttttgtcttctcttttctgcacttaatacctgacagtatgaccgatctctgcgcctttctgggggcgggcaagctggcggtagatttgtgatgtcacagtgcaaactgcagtgactgtaaattggcctggcgtgtataaacgttttcagggaatgcagaaggtattaatgaagagacaaaacctttattccatgtgctttgcttcattctgtacatagctctttggctcgtgaacctaattgtaaactttcaggtatttttgtacaaataagggactgatgttctgtttcttgtaattagaaataaacattaatacagtgttcttcattttc

SEQ ID NO: 1863 - DNA, 3181 bp, Homo sapiens
  source 1..3181: mol_type = genomic DNA
aagttctcgcgggacaccgacggggagcggaagccaggaggtattgctgcttcggcgaccgggcggcggcagcggcggcggcggctgtggcagagtctgtgcctgtggcggtgacggcggcgggagcaagcgctgccctcgcagagcagccttggggtcgccggccgctcgcagcgttgtggaggggcgggccggacgctgagcggagcagctgcgccacgggtggcattgtgtgtcccagagtgccggagcgagtcccagaagagaggcgaggctaagcccagagcgctgggttgcttcagcagggaagactcccttccccctgcttcaggctgctgagcactgagcagcgctcagaatggaagccatcgccaaatatgacttcaaagctactgcagacgacgagctgagcttcaaaaggggggacatcctcaaggttttgaacgaagaatgtgatcagaactggtacaaggcagagcttaatggaaaagacggcttcattcccaagaactacatagaaatgaaaccacatccgtttggaaacgatgtgcagcacttcaaggtgctccgagatggagccgggaagtacttcctctgggtggtgaagttcaattctttgaatgagctggtggattatcacagatctacatctgtctccagaaaccagcagatattcctgcgggacatagaacaggtgccacagcagccgacatacgtccaggccctctttgactttgatccccaggaggatggagagctgggcttccgccggggagattttatccatgtcatggataactcagaccccaactggtggaaaggagcttgccacgggcagaccggcatgtttccccgcaattatgtcacccccgtgaaccggaacgtctaagagtcaagaagcaattatttaaagaaagtgaaaaatgtaaaacacatacaaaagaattaaacccacaagctgcctctgacagcagcctgtgagggagtgcagaacacctggccgggtcaccctgtgaccctctcactttggttggaactttagggggtgggagggggcgttggatttaaaaatgccaaaacttacctataaattaagaagagtttttattacaaattttcactgctgctcctctttcccctcctttgtcttttttttcatccttttttctcttctgtccatcagtgcatgacgtttaaggccacgtatagtcctagctgacgccaataataaaaaacaagaaaccaagtgggctggtattctctctatgcaaaatgtctgttttagttggaatgactgaaagaagaacagctgttcctgtgttcttcgtatatacacacaaaaaggagcgggcagggccgctcgatgcctttgctgtttagcttcctccagaggaggggacttgtaggaatctgccttccagcccagacccccagtgtattttgtccaagttcacagtagagtagggtagaaggaaagcatgtctctgcttccatggcttcctgagaaagcccacctgggctgggcgcggtggctcacgcctgtaatcccagcactttgggaggccaaggtgggcggatcacaaggtcaggagttcgagaccaacctagccaacatggtgaaaccccgtctctactaaaaataagaaattagccgggtgtggcacgcacctgtagtcccagctacttgggagcctgaggcaggagaatcgcttgaacctgggaagtggaggttgagtgagccgggaccgtgccattgtactccagcctgggtgacagagcgagattccgtctcaaaaaaaaaaaaaaaaagcccacctgaaagcctgtctctttccactttgttggcccttccagtgggattatcgagcatgttgttttttcatagtgcctttttccttatttcaagggttgcttctgagtggtgttttttttttttttttaatttgttttgttttaaaataagttaaaggcagtccagagcttttcagccaatttgtctcctactctgtgtaaatatttttccctccgggcaggggagccagggtagagcaaaggagacaaagcaggagtggaaggtgaggcgttctcctgcttgtactaagccaggaggctttaagctccagctttaagggttgtgagccccttgggggttcagggaactgcttgcccagggtgcagtgtgagtgtgatgggccaccggggcaagagggaaggtgaccgcccagctctcccacatcccactggatctggcttacaggggggtcggaagcctgtcctcaccgtctcgggggttgtggcccccgccccctccctatatgcacccctggaaccagcaagtcccagacaaggagagcggaggaggaagtcatgggaacgcagcctccagttgtagcaggtttcactattcctatgctggggtacacagtgagagtactcacttttcacttgtcttgctcttagattgggccatggctttcatcctgtgtcccctgacctgtccaggtgagtgtgagggcagcactgggaagctggagtgctgcttgtgcctcccttcccagtgggctgtgttgactgctgctccccacccctaccgatggtcccaggaagcagggagagttggggaaggcaagattggaaagacaggaagaccaaggcctcggcagaactctctgtcttctctccacttctggtcccctgtggtgatgtgcctgtaatctttttctccacccaaaccccttcccacgacaaaaacaagactgcctccctctcttccgggagctggtgacagccttgggcctttcagtcccaaagcggccgatgggagtctccctccgactccagatatgaacagggcccaggcctggagcgtttgctgtgccaggaggcggcagctcttctgggcagagcctgtccccgccttccctcactcttcctcatcctgcttctcttttcctcgcagatgataaaaggaatctggcattctacacctggaccatttgattgttttattttggaattggtgtatatcatgaagccttgctgaactaagttttgtgtgtatatatttaaaaaaaaaatcagtgtttaaataaagacctatgtacttaatcctttaactctgcggatagcatttggtaggtagtgattaactgtgaataataaatacacaatgaattcttca

SEQ ID NO: 1864 - DNA, 3248 bp, Homo sapiens
  source 1..3248: mol_type = genomic DNA
gaccgggcggcggcagcggcggcggcggctgtggcagagtctgtgcctgtggcggtgacggcggcgggagcaagcgctgccctcgcagagcagccttggggtcgccggccgctcgcagcgttgtggaggggcgggccggacgctgagcggagcagctgcgccacgggtggcattgtgtgtcccagagtgccggagcgagtcccagaagagaggcgaggctaagcccagagcgctgggttgcttcagcagggaagactcccttccccctgcttcaggctgctgagcactgagcagcgctcagaatggaagccatcgccaaatatgacttcaaagctactgcagacgacgagctgagcttcaaaaggggggacatcctcaaggttttgaacgaagaatgtgatcagaactggtacaaggcagagcttaatggaaaagacggcttcattcccaagaactacatagaaatgaaaccacatccgtggttttttggcaaaatccccagagccaaggcagaagaaatgcttagcaaacagcggcacgatggggcctttcttatccgagagagtgagagcgctcctggggacttctccctctctgtcaagtttggaaacgatgtgcagcacttcaaggtgctccgagatggagccgggaagtacttcctctgggtggtgaagttcaattctttgaatgagctggtggattatcacagatctacatctgtctccagaaaccagcagatattcctgcgggacatagaacaggtgccacagcagccgacatacgtccaggccctctttgactttgatccccaggaggatggagagctgggcttccgccggggagattttatccatgtcatggataactcagaccccaactggtggaaaggagcttgccacgggcagaccggcatgtttccccgcaattatgtcacccccgtgaaccggaacgtctaagagtcaagaagcaattatttaaagaaagtgaaaaatgtaaaacacatacaaaagaattaaacccacaagctgcctctgacagcagcctgtgagggagtgcagaacacctggccgggtcaccctgtgaccctctcactttggttggaactttagggggtgggagggggcgttggatttaaaaatgccaaaacttacctataaattaagaagagtttttattacaaattttcactgctgctcctctttcccctcctttgtcttttttttcatccttttttctcttctgtccatcagtgcatgacgtttaaggccacgtatagtcctagctgacgccaataataaaaaacaagaaaccaagtgggctggtattctctctatgcaaaatgtctgttttagttggaatgactgaaagaagaacagctgttcctgtgttcttcgtatatacacacaaaaaggagcgggcagggccgctcgatgcctttgctgtttagcttcctccagaggaggggacttgtaggaatctgccttccagcccagacccccagtgtattttgtccaagttcacagtagagtagggtagaaggaaagcatgtctctgcttccatggcttcctgagaaagcccacctgggctgggcgcggtggctcacgcctgtaatcccagcactttgggaggccaaggtgggcggatcacaaggtcaggagttcgagaccaacctagccaacatggtgaaaccccgtctctactaaaaataagaaattagccgggtgtggcacgcacctgtagtcccagctacttgggagcctgaggcaggagaatcgcttgaacctgggaagtggaggttgagtgagccgggaccgtgccattgtactccagcctgggtgacagagcgagattccgtctcaaaaaaaaaaaaaaaaagcccacctgaaagcctgtctctttccactttgttggcccttccagtgggattatcgagcatgttgttttttcatagtgcctttttccttatttcaagggttgcttctgagtggtgttttttttttttttttaatttgttttgttttaaaataagttaaaggcagtccagagcttttcagccaatttgtctcctactctgtgtaaatatttttccctccgggcaggggagccagggtagagcaaaggagacaaagcaggagtggaaggtgaggcgttctcctgcttgtactaagccaggaggctttaagctccagctttaagggttgtgagccccttgggggttcagggaactgcttgcccagggtgcagtgtgagtgtgatgggccaccggggcaagagggaaggtgaccgcccagctctcccacatcccactggatctggcttacaggggggtcggaagcctgtcctcaccgtctcgggggttgtggcccccgccccctccctatatgcacccctggaaccagcaagtcccagacaaggagagcggaggaggaagtcatgggaacgcagcctccagttgtagcaggtttcactattcctatgctggggtacacagtgagagtactcacttttcacttgtcttgctcttagattgggccatggctttcatcctgtgtcccctgacctgtccaggtgagtgtgagggcagcactgggaagctggagtgctgcttgtgcctcccttcccagtgggctgtgttgactgctgctccccacccctaccgatggtcccaggaagcagggagagttggggaaggcaagattggaaagacaggaagaccaaggcctcggcagaactctctgtcttctctccacttctggtcccctgtggtgatgtgcctgtaatctttttctccacccaaaccccttcccacgacaaaaacaagactgcctccctctcttccgggagctggtgacagccttgggcctttcagtcccaaagcggccgatgggagtctccctccgactccagatatgaacagggcccaggcctggagcgtttgctgtgccaggaggcggcagctcttctgggcagagcctgtccccgccttccctcactcttcctcatcctgcttctcttttcctcgcagatgataaaaggaatctggcattctacacctggaccatttgattgttttattttggaattggtgtatatcatgaagccttgctgaactaagttttgtgtgtatatatttaaaaaaaaaatcagtgtttaaataaagacctatgtacttaatcctttaactctgcggatagcatttggtaggtagtgattaactgtgaataataaatacacaatgaattcttca

SEQ ID NO: 1865 - DNA, 3729 bp, Homo sapiens
  source 1..3729: mol_type = genomic DNA
gagtacgggaggctgcgctcggcgcctctctcgtgccttttcctcttggctctacagcgggagtgggccccgggggaaccgggaccggccccggggttcgcgtcggggcggcgaggcttgggacgtggagcgcaatccccggggctccggactctacgtttccccttttggggcgcttccttcctggggaccgtcctcctccggctcttggctctgggcagtccgggggaagaggtcggggttctctggcgaggtcccctgccttcatcgggagggtttgcacggaaggggcccgggaagcccaggcgggccgaacgccgaccgagtcagtctacccgagcctggcggcgggggactggtgtgggctgcagctgtggtgattgatgtgccttcgacctgcacggcaaccacgtcaccatctcctggcgtctttgggcttaattttgtgcgggaatccactttggggtggaacgtttgctgctggagccgggggagatacctttattctgacacttaaaaaaaaaaactatttgaaaaatatttgtcaagaaaaattcagcagtagcaggttggactgcaccgaggaaggattgcggcgagagcgggcgctggtaattttcatttgcagcgcgccctctctatgattggtggcattgtgtgtcccagagtgccggagcgagtcccagaagagaggcgaggctaagcccagagcgctgggttgcttcagcagggaagactcccttccccctgcttcaggctgctgagcactgagcagcgctcagaatggaagccatcgccaaatatgacttcaaagctactgcagacgacgagctgagcttcaaaaggggggacatcctcaaggttttgaacgaagaatgtgatcagaactggtacaaggcagagcttaatggaaaagacggcttcattcccaagaactacatagaaatgaaaccacatccgtggttttttggcaaaatccccagagccaaggcagaagaaatgcttagcaaacagcggcacgatggggcctttcttatccgagagagtgagagcgctcctggggacttctccctctctgtcaagtttggaaacgatgtgcagcacttcaaggtgctccgagatggagccgggaagtacttcctctgggtggtgaagttcaattctttgaatgagctggtggattatcacagatctacatctgtctccagaaaccagcagatattcctgcgggacatagaacaggtgccacagcagccgacatacgtccaggccctctttgactttgatccccaggaggatggagagctgggcttccgccggggagattttatccatgtcatggataactcagaccccaactggtggaaaggagcttgccacgggcagaccggcatgtttccccgcaattatgtcacccccgtgaaccggaacgtctaagagtcaagaagcaattatttaaagaaagtgaaaaatgtaaaacacatacaaaagaattaaacccacaagctgcctctgacagcagcctgtgagggagtgcagaacacctggccgggtcaccctgtgaccctctcactttggttggaactttagggggtgggagggggcgttggatttaaaaatgccaaaacttacctataaattaagaagagtttttattacaaattttcactgctgctcctctttcccctcctttgtcttttttttcatccttttttctcttctgtccatcagtgcatgacgtttaaggccacgtatagtcctagctgacgccaataataaaaaacaagaaaccaagtgggctggtattctctctatgcaaaatgtctgttttagttggaatgactgaaagaagaacagctgttcctgtgttcttcgtatatacacacaaaaaggagcgggcagggccgctcgatgcctttgctgtttagcttcctccagaggaggggacttgtaggaatctgccttccagcccagacccccagtgtattttgtccaagttcacagtagagtagggtagaaggaaagcatgtctctgcttccatggcttcctgagaaagcccacctgggctgggcgcggtggctcacgcctgtaatcccagcactttgggaggccaaggtgggcggatcacaaggtcaggagttcgagaccaacctagccaacatggtgaaaccccgtctctactaaaaataagaaattagccgggtgtggcacgcacctgtagtcccagctacttgggagcctgaggcaggagaatcgcttgaacctgggaagtggaggttgagtgagccgggaccgtgccattgtactccagcctgggtgacagagcgagattccgtctcaaaaaaaaaaaaaaaaagcccacctgaaagcctgtctctttccactttgttggcccttccagtgggattatcgagcatgttgttttttcatagtgcctttttccttatttcaagggttgcttctgagtggtgttttttttttttttttaatttgttttgttttaaaataagttaaaggcagtccagagcttttcagccaatttgtctcctactctgtgtaaatatttttccctccgggcaggggagccagggtagagcaaaggagacaaagcaggagtggaaggtgaggcgttctcctgcttgtactaagccaggaggctttaagctccagctttaagggttgtgagccccttgggggttcagggaactgcttgcccagggtgcagtgtgagtgtgatgggccaccggggcaagagggaaggtgaccgcccagctctcccacatcccactggatctggcttacaggggggtcggaagcctgtcctcaccgtctcgggggttgtggcccccgccccctccctatatgcacccctggaaccagcaagtcccagacaaggagagcggaggaggaagtcatgggaacgcagcctccagttgtagcaggtttcactattcctatgctggggtacacagtgagagtactcacttttcacttgtcttgctcttagattgggccatggctttcatcctgtgtcccctgacctgtccaggtgagtgtgagggcagcactgggaagctggagtgctgcttgtgcctcccttcccagtgggctgtgttgactgctgctccccacccctaccgatggtcccaggaagcagggagagttggggaaggcaagattggaaagacaggaagaccaaggcctcggcagaactctctgtcttctctccacttctggtcccctgtggtgatgtgcctgtaatctttttctccacccaaaccccttcccacgacaaaaacaagactgcctccctctcttccgggagctggtgacagccttgggcctttcagtcccaaagcggccgatgggagtctccctccgactccagatatgaacagggcccaggcctggagcgtttgctgtgccaggaggcggcagctcttctgggcagagcctgtccccgccttccctcactcttcctcatcctgcttctcttttcctcgcagatgataaaaggaatctggcattctacacctggaccatttgattgttttattttggaattggtgtatatcatgaagccttgctgaactaagttttgtgtgtatatatttaaaaaaaaaatcagtgtttaaataaagacctatgtacttaatcctttaactctgcggatagcatttggtaggtagtgattaactgtgaataataaatacacaatgaattcttca

SEQ ID NO: 1866 - DNA, 3182 bp, Homo sapiens
  source 1..3182: mol_type = genomic DNA
gagccagggggcgtgggggctgggacagcaggccgattggcagggcggggttgccttcaatcctggccactgctcttaatcgtccctctcctgcttcagggtggcattgtgtgtcccagagtgccggagcgagtcccagaagagaggcgaggctaagcccagagcgctgggttgcttcagcagggaagactcccttccccctgcttcaggctgctgagcactgagcagcgctcagaatggaagccatcgccaaatatgacttcaaagctactgcagacgacgagctgagcttcaaaaggggggacatcctcaaggttttgaacgaagaatgtgatcagaactggtacaaggcagagcttaatggaaaagacggcttcattcccaagaactacatagaaatgaaaccacatccgtggttttttggcaaaatccccagagccaaggcagaagaaatgcttagcaaacagcggcacgatggggcctttcttatccgagagagtgagagcgctcctggggacttctccctctctgtcaagtttggaaacgatgtgcagcacttcaaggtgctccgagatggagccgggaagtacttcctctgggtggtgaagttcaattctttgaatgagctggtggattatcacagatctacatctgtctccagaaaccagcagatattcctgcgggacatagaacaggtgccacagcagccgacatacgtccaggccctctttgactttgatccccaggaggatggagagctgggcttccgccggggagattttatccatgtcatggataactcagaccccaactggtggaaaggagcttgccacgggcagaccggcatgtttccccgcaattatgtcacccccgtgaaccggaacgtctaagagtcaagaagcaattatttaaagaaagtgaaaaatgtaaaacacatacaaaagaattaaacccacaagctgcctctgacagcagcctgtgagggagtgcagaacacctggccgggtcaccctgtgaccctctcactttggttggaactttagggggtgggagggggcgttggatttaaaaatgccaaaacttacctataaattaagaagagtttttattacaaattttcactgctgctcctctttcccctcctttgtcttttttttcatccttttttctcttctgtccatcagtgcatgacgtttaaggccacgtatagtcctagctgacgccaataataaaaaacaagaaaccaagtgggctggtattctctctatgcaaaatgtctgttttagttggaatgactgaaagaagaacagctgttcctgtgttcttcgtatatacacacaaaaaggagcgggcagggccgctcgatgcctttgctgtttagcttcctccagaggaggggacttgtaggaatctgccttccagcccagacccccagtgtattttgtccaagttcacagtagagtagggtagaaggaaagcatgtctctgcttccatggcttcctgagaaagcccacctgggctgggcgcggtggctcacgcctgtaatcccagcactttgggaggccaaggtgggcggatcacaaggtcaggagttcgagaccaacctagccaacatggtgaaaccccgtctctactaaaaataagaaattagccgggtgtggcacgcacctgtagtcccagctacttgggagcctgaggcaggagaatcgcttgaacctgggaagtggaggttgagtgagccgggaccgtgccattgtactccagcctgggtgacagagcgagattccgtctcaaaaaaaaaaaaaaaaagcccacctgaaagcctgtctctttccactttgttggcccttccagtgggattatcgagcatgttgttttttcatagtgcctttttccttatttcaagggttgcttctgagtggtgttttttttttttttttaatttgttttgttttaaaataagttaaaggcagtccagagcttttcagccaatttgtctcctactctgtgtaaatatttttccctccgggcaggggagccagggtagagcaaaggagacaaagcaggagtggaaggtgaggcgttctcctgcttgtactaagccaggaggctttaagctccagctttaagggttgtgagccccttgggggttcagggaactgcttgcccagggtgcagtgtgagtgtgatgggccaccggggcaagagggaaggtgaccgcccagctctcccacatcccactggatctggcttacaggggggtcggaagcctgtcctcaccgtctcgggggttgtggcccccgccccctccctatatgcacccctggaaccagcaagtcccagacaaggagagcggaggaggaagtcatgggaacgcagcctccagttgtagcaggtttcactattcctatgctggggtacacagtgagagtactcacttttcacttgtcttgctcttagattgggccatggctttcatcctgtgtcccctgacctgtccaggtgagtgtgagggcagcactgggaagctggagtgctgcttgtgcctcccttcccagtgggctgtgttgactgctgctccccacccctaccgatggtcccaggaagcagggagagttggggaaggcaagattggaaagacaggaagaccaaggcctcggcagaactctctgtcttctctccacttctggtcccctgtggtgatgtgcctgtaatctttttctccacccaaaccccttcccacgacaaaaacaagactgcctccctctcttccgggagctggtgacagccttgggcctttcagtcccaaagcggccgatgggagtctccctccgactccagatatgaacagggcccaggcctggagcgtttgctgtgccaggaggcggcagctcttctgggcagagcctgtccccgccttccctcactcttcctcatcctgcttctcttttcctcgcagatgataaaaggaatctggcattctacacctggaccatttgattgttttattttggaattggtgtatatcatgaagccttgctgaactaagttttgtgtgtatatatttaaaaaaaaaatcagtgtttaaataaagacctatgtacttaatcctttaactctgcggatagcatttggtaggtagtgattaactgtgaataataaatacacaatgaattcttca

SEQ ID NO: 1867 - DNA, 964 bp, Homo sapiens
  source 1..964: mol_type = genomic DNA
gcgcggagaacacaaagtaaaacttctgctgttcccagtcctgcagccccagcccagccgtcccccgcgggcgtggcaggtcctgagtcagggcctgtccgtggccagcatccctgctgggcgattgagcagcgggaagctgcttggacccagtctcaaacttaaccctcatctagcacccgggcaggcctcctgggttgcagggacttgagaaaaggcagagttctcaggtcctaggaagctggggcacgctggcgtgacaagcgtcccggagaaagccaagccctcggggagctggggaccgcagcagggctgcagtcacatcctgcgcgggtgggcggcgggccaggccttcagttgtttcgggacgcgccgagcttcgccgctcttccagcggctccgctgccagagctagcccgagcccggttctggggcgaaaatgcctgcccttcacatcgaagatttgccagagaaggaaaaactgaaaatggaagttgagcagcttcgcaaagaagtgaagttgcagagacaacaagtgtctaaatgttctgaagaaataaagaactatattgaagaacgttctggagaggatcctctagtaaagggaattccagaagacaagaacccctttaaagaaaaaggcagctgtgttatttcataaataacttgggagaaactgcatcctaagtggaagaactagtttgttttagttttcccagataaaaccaacatgctttttaaggaaggaagaatgaaattaaaaggagactttcttaagcaccatatagatagggttatgtataaaagcatatgtgctactcatctttgctcactatgcagtcttttttaagagagcagagagtatcagatgtacaattatggaaataagaacattacttgagcatgacacttctttcagtatattgcttgatgcttcaaataaagttttgtcttgggaagatga

SEQ ID NO: 1868 - DNA, 1373 bp, Homo sapiens
  source 1..1373: mol_type = genomic DNA
cgggcgtctgttctagtgtttgagccgtcgtgcttcaccggtctacctcgctagcatgtcgggccgcggcaagactggcggcaaggcccgcgccaaggccaagtcgcgctcgtcgcgcgccggcctccagttcccagtgggccgtgtacaccggctgctgcggaagggccactacgccgagcgcgttggcgccggcgcgccagtgtacctggcggcagtgctggagtacctcaccgctgagatcctggagctggcgggcaatgcggcccgcgacaacaagaagacgcgaatcatcccccgccacctgcagctggccatccgcaacgacgaggagctcaacaagctgctgggcggcgtgacgatcgcccagggaggcgtcctgcccaacatccaggccgtgctgctgcccaagaagaccagcgccaccgtggggccgaaggcgccctcgggcggcaagaaggccacccaggcctcccaggagtactaagagggcccgcgccgcggccggccgccaggcctccccatgccaccacaaaggcccttttaagggccaccaccgccctcatggaaagagctgagccgcttcagactgcggggcaagcgggccgcggctcccttcccctcccctcccctcgcccgccttcgccgcccggcctcgagtccccgcccgcccccgctcccgtcccgcaccgcctgccgcgtcggcctcgggccctgccctgtccgccgtccgccctccggtagggttcgggccttccggatgcggcttgggcgctcttcggggacctccgtggcgcggaagacccgagcctgccggggggaggccggcggcgccgcacctgcccgcctcggcgttcgtgactcagccgccccatcccgagtcgctaaggggctgcggggaggccgcagcaccttctggaagacttggccttccgctctgacgcagggccgaggtgggcagtccaggccgagaggccggcggccctgaaggtctgcgctggggccgggacgaagcacttggtaacaggcacatcttcctcccgagtgactgcctcctaggaggacatttaggggagggcagaggcctgcagtttggcttcacggctggctatgtggacagcaagagtcgttttcgcggaagccgactggcagccaggcctgtcgggccccccgacgccgccccatttcccttccagcaaactcaactcggcaatccaagcacctagataccagcacaagtcggttaatccctgtctggactgagcctccgttggcttctgaactggaattctgcagctaacccttccacgactagaaccttaggcattggggagttttagatggactaattttattaaaggattgtttttttt

SEQ ID NO: 1869 - DNA, 1614 bp, Homo sapiens
  source 1..1614: mol_type = genomic DNA
acagcagttacactgcggcgggcgtctgttctagtgtttgagccgtcgtgcttcaccggtctacctcgctagcatgtcgggccgcggcaagactggcggcaaggcccgcgccaaggccaagtcgcgctcgtcgcgcgccggcctccagttcccagtgggccgtgtacaccggctgctgcggaagggccactacgccgagcgcgttggcgccggcgcgccagtgtacctggcggcagtgctggagtacctcaccgctgagatcctggagctggcgggcaatgcggcccgcgacaacaagaagacgcgaatcatcccccgccacctgcagctggccatccgcaacgacgaggagctcaacaagctgctgggcggcgtgacgatcgcccagggaggcgtcctgcccaacatccaggccgtgctgctgcccaagaagaccagcgccaccgtggggccgaaggcgccctcgggcggcaagaaggccacccaggcctcccaggagtactaagagggcccgcgccgcggccggccgccaggcctccccatgccaccacaaaggcccttttaagggccaccaccgccctcatggaaagagctgagccgcttcagactgcggggcaagcgggccgcggctcccttcccctcccctcccctcgcccgccttcgccgcccggcctcgagtccccgcccgcccccgctcccgtcccgcaccgcctgccgcgtcggcctcgggccctgccctgtccgccgtccgccctccggtagggttcgggccttccggatgcggcttgggcgctcttcggggacctccgtggcgcggaagacccgagcctgccggggggaggccggcggcgccgcacctgcccgcctcggcgttcgtgactcagccgccccatcccgagtcgctaaggggctgcggggaggccgcagcaccttctggaagacttggccttccgctctgacgcagggccgaggtgggcagtccaggccgagaggccggcggccctgaaggtgagtgaggccctcggcagctgcagccggggtgtctggtacccccccggcgtggtgcttagcccaggactttcagacgcggccgctggccgggaggctttggtgggagagacgcgatcgccgatttcggtctggcgccccttctgcggccgggacccaggcctttcacatcagctctccctccatcttcattcataggtctgcgctggggccgggacgaagcacttggtaacaggcacatcttcctcccgagtgactgcctcctaggaggacatttaggggagggcagaggcctgcagtttggcttcacggctggctatgtggacagcaagagtcgttttcgcggaagccgactggcagccaggcctgtcgggccccccgacgccgccccatttcccttccagcaaactcaactcggcaatccaagcacctagataccagcacaagtcggttaatccctgtctggactgagcctccgttggcttctgaactggaattctgcagctaacccttccacgactagaaccttaggcattggggagttttagatggactaattttattaaaggattgttttttttttaaatggagcgtttgttttcattt

SEQ ID NO: 1870 - DNA, 697 bp, Homo sapiens
  source 1..697: mol_type = genomic DNA
gaaacttggtgtccaggggaggcccccggcggctggagcgcggcggcagcgggcgcagaggccggagggagaggaggcgaggggcggcccgagcgcggggcgggagcgaggccagcggtcatgtgcccgtgccccctgcaccgcggccgcggccccccggccgtgtgcgcctgcagcgcgggtcgcctggggctgcgctcgtccgccgcgcagctcaccgccgcccggctcaaggcgctaggcgacgagctgcaccagcgcaccatgtggcggcgccgcgcgcggagccggagggcgccggcgcccggcgcgctccccacctactggccttggctgtgcgcggccgcgcaggtggcggcgctggcggcctggctgctcggcaggcggaacttgtaggaacgcggggcttcttggtggggccggagccgagacccagccggagcgagcaacaggttggtgaaaaccctgtgtccttggagaaagctggttcccgttttccagagggggagcccagagcttgaaaggccgcggttggcacttcgagaaggaagtggagagtaaagacagcgcctggagcgatcgtagaaacacagaatgggactggggaagccctttggaaatccagctgcagaaacagacaccccaatgctatttacatacagctctatatatataaaaaaagaaaatatgaatatta

SEQ ID NO: 1871 - DNA, 909 bp, Homo sapiens
  source 1..909: mol_type = genomic DNA
gctgggggaggagtgcatggggaggggcggccctcaaacgggtcattgccattaatagagacctcaaacaccgcctgctaaaaatacccgactggaggagcataaaagcgcagccgagcccagcgccccgcacttttctgagcagacgtccagagcagagtcagccagcatgaccgagcgccgcgtccccttctcgctcctgcggggccccagctgggaccccttccgcgactggtacccgcatagccgcctcttcgaccaggccttcgggctgccccggctgccggaggagtggtcgcagtggttaggcggcagcagctggccaggctacgtgcgccccctgccccccgccgccatcgagagccccgcagtggccgcgcccgcctacagccgcgcgctcagccggcaactcagcagcggggtctcggagatccggcacactgcggaccgctggcgcgtgtccctggatgtcaaccacttcgccccggacgagctgacggtcaagaccaaggatggcgtggtggagatcaccggcaagcacgaggagcggcaggacgagcatggctacatctcccggtgcttcacgcggaaatacacgctgccccccggtgtggaccccacccaagtttcctcctccctgtcccctgagggcacactgaccgtggaggcccccatgcccaagctagccacgcagtccaacgagatcaccatcccagtcaccttcgagtcgcgggcccagcttgggggcccagaagctgcaaaatccgatgagactgccgccaagtaaagccttagcccggatgcccacccctgctgccgccactggctgtgcctcccccgccacctgtgtgttcttttgatacatttatcttctgtttttctcaaataaagttcaaagcaaccacctgt

SEQ ID NO: 1872 - DNA, 672 bp, Homo sapiens
  source 1..672: mol_type = genomic DNA
gcacttttctgagcagacgtccagagcagagtcagccagcatgaccgagcgccgcgtccccttctcgctcctgcggggccccagctggccaggctacgtgcgccccctgccccccgccgccatcgagagccccgcagtggccgcgcccgcctacagccgcgcgctcagccggcaactcagcagcggggtctcggagatccggcacactgcggaccgctggcgcgtgtccctggatgtcaaccacttcgccccggacgagctgacggtcaagaccaaggatggcgtggtggagatcaccggcaagcacgaggagcggcaggacgagcatggctacatctcccggtgcttcacgcggaaatacacgctgccccccggtgtggaccccacccaagtttcctcctccctgtcccctgagggcacactgaccgtggaggcccccatgcccaagctagccacgcagtccaacgagatcaccatcccagtcaccttcgagtcgcgggcccagcttgggggcccagaagctgcaaaatccgatgagactgccgccaagtaaagccttagcccggatgcccacccctgctgccgccactggctgtgcctcccccgccacctgtgtgttcttttgatacatttatcttctgtttttctcaaataaagttcaaagcaaccacc

SEQ ID NO: 1873 - DNA, 2544 bp, Homo sapiens
  source 1..2544: mol_type = genomic DNA
gggccagtttggaaaaagattactgagttggagccgtctcaaatttgcagggagggacggggtggggggtggggggaccccggttgtgcagtttgatattgagggagcccccacctactcgctggggctgcgtaatctggacgtttccaaactgaagcgaaggcgtcgggagactaggcctcagagaaccatggctactgccaagggaatcgccataggcatcgacctgggcaccacctactcctgtgtgggggtgttccagcacggcaaggtggagatcatcgccaacgaccagggcaaccgcaccacccccagctacgtggccttcacagacaccgagcggctcattggggatgcggccaagaaccaggtagcaatgaatccccagaacactgtttttgatgctaaacgtctgatcggcaggaaatttaatgatcctgttgtacaagcagatatgaaactttggccttttcaagtgattaatgaaggaggcaagcccaaagtccttgtgtcctacaaaggggagaataaagctttctaccctgaggaaatctcttcgatggtattgactaagttgaaggagactgctgaggcctttttgggccaccctgtcaccaatgcagtgattaccgtgccagcctatttcaatgactctcaacgtcaggctactaaggatgcaggtgtgattgctggacttaatgtgctaagaatcatcaatgagcccacggctgctgccattgcctatggtttagataaaggaggtcaaggagaacgacatgtcctgatttttgatctgggtggaggcacatttgatgtgtcaattctgaccatagatgatgggatttttgaggtaaaggccactgctggggacactcacctgggtggggaggactttgacaacaggcttgtgagccacttcgtggaggagttcaagaggaaacacaaaaaggacatcagccagaacaagcgagccgtgaggcggctgcgcaccgcctgcgagagggccaagaggaccctgtcgtccagcacccaggccaacctagaaattgattcactttatgaaggcattgacttctatacatccatcaccagagctcgatttgaagagttgtgtgcagacctgtttaggggtaccctggagcctgtagaaaaagcgcttcgggatgccaagatggataaggctaaaatccatgacattgttttagtagggggctccacccgcatccccaaggtgcagcggctgcttcaggactacttcaatggacgtgatctcaacaagagcatcaaccctgatgaggccgtagcatatggggctgcggtacaagcagccatcctgatgggggacaagtctgagaaggtacaggacctgctgctgctggacgtggctcccctgtccctggggctggagacggctgggggcgtgatgactgccctgataaagcgcaactccaccatccccaccaagcagacacagattttcaccacctactctgacaaccaacccggggtgctgatccaggtgtatgagggcgagagggccatgacaaaggacaacaacctgctggggcggtttgacctgactggaatccctccagcacccaggggagttcctcagatcgaggtgacgtttgacattgatgccaatggtattctcaatgtcacagccatggacaagagcaccggcaaggtgaacaagatcaccatcaccaatgacaagggccgcctgagcaaggaggagattgagcgcatggttctggatgctgagaaatataaagctgaagatgaggtccagagggagaaaattgctgcaaagaatgccttagaatcctatgcttttaacatgaagagtgttgtgagtgatgaaggtttgaagggcaagattagtgagtctgataaaaataaaatattggataaatgcaacgagctcctttcgtggctggaggtcaatcaactggcagagaaagatgagtttgatcataagagaaaggaattgaagcagatgtgtaaccctatcatcacaaaactctaccaaggaggatgcactgggcctgcctgcggaacagggtatgtgcctggaaggcctgccacaggccccacaattgaagaagtagattaattctttttagaactgaagcatcctaggatgcctctacatgtatttcattcccctcatcttcaaacatcattattattcttgaccagacctgaatctaagttaccatcccttggaaattctggagaaggagtctcatgcaccacctatcacactccctcacatcctgtttctgactttggaatggactcaggaaaactaggcccctctttaaaccgtgtgatgtatttgaatgtctgttatttccagccaccctaacattcttcttcctgtgtggatgcttatttgtcaatcagtaaatttgttcgtaaagaaaattacttctggtatttaggctgtgaatgtaccttgaaggggagagttcatggagagagcatgtgttctctgattgtgaggtcactgtgaatgattaaattggtaagggtaaagta

SEQ ID NO: 1874 - DNA, 1984 bp, Homo sapiens
  source 1..1984: mol_type = genomic DNA
aaatttgcagggagggacggggtggggggtggggggaccccggttgtgcagtttgatattgagggagcccccacctactcgctggggctgcgtaatctggacgtttccaaactgaagcgaaggcgtcgggagactaggcctcagagaaccatggctactgccaagggaatcgccataggcatcgacctgggcaccacctactcctgtgtgggggtgttccagcacggcaaggtggagatcatcgccaacgaccagggcaaccgcaccacccccagctacgtggccttcacagacaccgagcggctcattggggatgcggccaagaaccaggtagcaatgaatccccagaacactgtttttgatgctaaacgtctgatcggcaggaaatttaatgatcctgttgtacaagcagatatgaaactttggccttttcaagtgattaatgaaggaggcaagcccaaagtccttgtgtcctacaaaggggagaataaagctttctaccctgaggaaatctcttcgatggtattgactaagttgaaggagactgctgaggcctttttgggccaccctgtcaccaatgcagtgattaccgtgccagcctatttcaatgactctcaacgtcaggctactaaggatgcaggtgtgattgctggacttaatgtgctaagaatcatcaatgagcccacggctgctgccattgcctatggtttagataaaggaggtcaaggagaacgacatgtcctgatttttgatctgggtggaggcacatttgatgtgtcaattctgaccatagatgatgggatttttgaggtaaaggccactgctggggacactcacctgggtggggaggactttgacaacaggcttgtgagccacttcgtggaggagttcaagaggaaacacaaaaaggacatcagccagaacaagcgagccgtgaggcggctgcgcaccgcctgcgagagggccaagaggaccctgtcgtccagcacccaggccaacctagaaattgattcactttatgaaggcattgacttctatacatccatcaccagagctcgatttgaagagttgtgtgcagacctgtttaggggtaccctggagcctgtagaaaaagcgcttcgggatgccaagatggataaggctaaaatccatgacattgttttagtagggggctccacccgcatccccaaggtgcagcggctgcttcaggactacttcaatggacgtgatctcaacaagagcatcaaccctgatgaggccgtagcatatggggctgcggtacaagcagccatcctgatgggggacaagtctgagaaggtacaggacctgctgctgctggacgtggctcccctgtccctggggctggagacggctgggggcgtgatgactgccctgataaagcgcaactccaccatccccaccaagcagacacagattttcaccacctactctgacaaccaacccggggtgctgatccaggtgtatgagggcgagagggccatgacaaaggacaacaacctgctggggcggtttgacctgactggaatccctccagcacccaggggagttcctcagatcgaggtgacgtttgacattgatgccaatggtattctcaatgtcacagccatggacaagagcaccggcaaggtgaacaagatcaccatcaccaatgacaagggccgcctgagcaaggaggagattgagcgcatggttctggatgctgagaaatataaagctgaagatgtgtaaccctatcatcacaaaactctaccaaggaggatgcactgggcctgcctgcggaacagggtatgtgcctggaaggcctgccacaggccccacaattgaagaagtagattaattctttttagaactgaagcatcctaggatgcctctacatgtatttcattcccctcatcttcaaacatcattattattcttgaccagacctgaatctaagttaccatcccttggaaattctggagaa

SEQ ID NO: 1875 - DNA, 2019 bp, Homo sapiens
  source 1..2019: mol_type = genomic DNA
aaactcgacgcgccggtgcctgcagccgcacaggttcgctctgggaagccttgggacaacgggagtcactctcgaaaaaggcctcagagaaccatggctactgccaagggaatcgccataggcatcgacctgggcaccacctactcctgtgtgggggtgttccagcacggcaaggtggagatcatcgccaacgaccagggcaaccgcaccacccccagctacgtggccttcacagacaccgagcggctcattggggatgcggccaagaaccaggtagcaatgaatccccagaacactgtttttgatgctaaacgtctgatcggcaggaaatttaatgatcctgttgtacaagcagatatgaaactttggccttttcaagtgattaatgaaggaggcaagcccaaagtccttgtgtcctacaaaggggagaataaagctttctaccctgaggaaatctcttcgatggtattgactaagttgaaggagactgctgaggcctttttgggccaccctgtcaccaatgcagtgattaccgtgccagcctatttcaatgactctcaacgtcaggctactaaggatgcaggtgtgattgctggacttaatgtgctaagaatcatcaatgagcccacggctgctgccattgcctatggtttagataaaggaggtcaaggagaacgacatgtcctgatttttgatctgggtggaggcacatttgatgtgtcaattctgaccatagatgatgggatttttgaggtaaaggccactgctggggacactcacctgggtggggaggactttgacaacaggcttgtgagccacttcgtggaggagttcaagaggaaacacaaaaaggacatcagccagaacaagcgagccgtgaggcggctgcgcaccgcctgcgagagggccaagaggaccctgtcgtccagcacccaggccaacctagaaattgattcactttatgaaggcattgacttctatacatccatcaccagagctcgatttgaagagttgtgtgcagacctgtttaggggtaccctggagcctgtagaaaaagcgcttcgggatgccaagatggataaggctaaaatccatgacattgttttagtagggggctccacccgcatccccaaggtgcagcggctgcttcaggactacttcaatggacgtgatctcaacaagagcatcaaccctgatgaggccgtagcatatggggctgcggtacaagcagccatcctgatgggggacaagtctgagaaggtacaggacctgctgctgctggacgtggctcccctgtccctggggctggagacggctgggggcgtgatgactgccctgataaagcgcaactccaccatccccaccaagcagacacagattttcaccacctactctgacaaccaacccggggtgctgatccaggtgtatgagggcgagagggccatgacaaaggacaacaacctgctggggcggtttgacctgactggaatccctccagcacccaggggagttcctcagatcgaggtgacgtttgacattgatgccaatggtattctcaatgtcacagccatggacaagagcaccggcaaggtgaacaagatcaccatcaccaatgacaagggccgcctgagcaaggaggagattgagcgcatggttctggatgctgagaaatataaagctgaagatgaggtccagagggagaaaattgctgcaaagaatgccttagaatcctatgcttttaacatgaagagtgttgtgagtgatgaaggtttgaagggcaagattagtgagtctgataaaaataaaatattggataaatgcaacgagctcctttcgtggctggaggtcaatcaactggcagagaaagatgagtttgatcataagagaaaggaattgaagcagatgtgtaaccctatcatcacaaaactctaccaaggaggatgcactgggcctgcctgcggaacagggtatgtgcctggaaggcctgccacaggccccacaattgaagaagtagattaa

SEQ ID NO: 1876 - DNA, 696 bp, Homo sapiens
  source 1..696: mol_type = genomic DNA
gccaagggaatcgccataggcatcgacctgggcaccacctactcctgtgtgggggtgttccagcacggcaaggtggagatcatcgccaacgaccagggcaaccgcaccacccccagctacgtggccttcacagacaccgagcggctcattggggatgcaggtgtgattgctggacttaatgtgctaagaatcatcaatgagcccacggctgctgccattgcctatggtttagataaaggaggtcaaggagaacgacatgtcctgatttttgatctgggtggaggcacatttgatgtgtcaattctgaccatagatgatgggatttttgaggtaaaggccactgctggggacactcacctgggtggggaggactttgacaacaggcttgtgagccacttcgtggaggagttcaagaggaaacacaaaaaggacatcagccagaacaagcgagccgtgaggcggctgcgcaccgcctgcgagagggccaagaggaccctgtcgtccagcacccaggccaacctagaaattgattcactttatgaaggcattgacttctatacatccatcaccagagctcgatttgaagagttgtgtgcagacctgtttaggggtaccctggagcctgtagaaaaaggggctccacccgcatccccaaggtgcagcggctgcttcaggactacttcaatggacgtgatc

SEQ ID NO: 1877 - DNA, 3348 bp, Homo sapiens
  source 1..3348: mol_type = genomic DNA
gtgccgcggcaacggcgcatgcgtaggcgcgcggccgcggcggcggctggggagggttcttccggaaggttcgggaggcttctggaaaaagcgccgcgcgctgggcgggcccgtcgctatataaggcaggcgcgggggtggcgcgtcagttgcttcagcgtcccggtgtggctgtgccgttggtcctgtgcggtcacttagccaagatgcctgaggaaacccagacccaagaccaaccgatggaggaggaggaggttgagacgttcgcctttcaggcagaaattgcccagttgatgtcattgatcatcaatactttctactcgaacaaagagatctttctgagagagctcatttcaaattcatcagatgcattggacaaaatccggtatgaaagcttgacagatcccagtaaattagactctgggaaagagctgcatattaaccttataccgaacaaacaagatcgaactctcactattgtggatactggaattggaatgaccaaggctgacttgatcaataaccttggtactatcgccaagtctgggaccaaagcgttcatggaagctttgcaggctggtgcagatatctctatgattggccagttcggtgttggtttttattctgcttatttggttgctgagaaagtaactgtgatcaccaaacataacgatgatgagcagtacgcttgggagtcctcagcagggggatcattcacagtgaggacagacacaggtgaacctatgggtcgtggaacaaaagttatcctacacctgaaagaagaccaaactgagtacttggaggaacgaagaataaaggagattgtgaagaaacattctcagtttattggatatcccattactctttttgtggagaaggaacgtgataaagaagtaagcgatgatgaggctgaagaaaaggaagacaaagaagaagaaaaagaaaaagaagagaaagagtcggaagacaaacctgaaattgaagatgttggttctgatgaggaagaagaaaagaaggatggtgacaagaagaagaagaagaagattaaggaaaagtacatcgatcaagaagagctcaacaaaacaaagcccatctggaccagaaatcccgacgatattactaatgaggagtacggagaattctataagagcttgaccaatgactgggaagatcacttggcagtgaagcatttttcagttgaaggacagttggaattcagagcccttctatttgtcccacgacgtgctccttttgatctgtttgaaaacagaaagaaaaagaacaacatcaaattgtatgtacgcagagttttcatcatggataactgtgaggagctaatccctgaatatctgaacttcattagaggggtggtagactcggaggatctccctctaaacatatcccgtgagatgttgcaacaaagcaaaattttgaaagttatcaggaagaatttggtcaaaaaatgcttagaactctttactgaactggcggaagataaagagaactacaagaaattctatgagcagttctctaaaaacataaagcttggaatacacgaagactctcaaaatcggaagaagctttcagagctgttaaggtactacacatctgcctctggtgatgagatggtttctctcaaggactactgcaccagaatgaaggagaaccagaaacatatctattatatcacaggtgagaccaaggaccaggtagctaactcagcctttgtggaacgtcttcggaaacatggcttagaagtgatctatatgattgagcccattgatgagtactgtgtccaacagctgaaggaatttgaggggaagactttagtgtcagtcaccaaagaaggcctggaacttccagaggatgaagaagagaaaaagaagcaggaagagaaaaaaacaaagtttgagaacctctgcaaaatcatgaaagacatattggagaaaaaagttgaaaaggtggttgtgtcaaaccgattggtgacatctccatgctgtattgtcacaagcacatatggctggacagcaaacatggagagaatcatgaaagctcaagccctaagagacaactcaacaatgggttacatggcagcaaagaaacacctggagataaaccctgaccattccattattgagaccttaaggcaaaaggcagaggctgataagaacgacaagtctgtgaaggatctggtcatcttgctttatgaaactgcgctcctgtcttctggcttcagtctggaagatccccagacacatgctaacaggatctacaggatgatcaaacttggtctgggtattgatgaagatgaccctactgctgatgataccagtgctgctgtaactgaagaaatgccaccccttgaaggagatgacgacacatcacgcatggaagaagtagactaatctctggctgagggatgacttacctgttcagtactctacaattcctctgataatatattttcaaggatgtttttctttatttttgttaatattaaaaagtctgtatggcatgacaactactttaaggggaagataagatttctgtctactaagtgatgctgtgataccttaggcactaaagcagagctagtaatgctttttgagtttcatgttggtttattttcacagattggggtaacgtgcactgtaagacgtatgtaacatgatgttaactttgtggtctaaagtgtttagctgtcaagccggatgcctaagtagaccaaatcttgttattgaagtgttctgagctgtatcttgatgtttagaaaagtattcgttacatcttgtaggatctactttttgaacttttcattccctgtagttgacaattctgcatgtactagtcctctagaaataggttaaactgaagcaacttgatggaaggatctctccacagggcttgttttccaaagaaaagtattgtttggaggagcaaagttaaaagcctacctaagcatatcgtaaagctgttcaaaaataactcagacccagtcttgtggatggaaatgtagtgctcgagtcacattctgcttaaagttgtaacaaatacagatgagttaaaagatattgtgtgacagtgtcttatttagggggaaaggggagtatctggatgacagttagtgccaaaatgtaaaacatgaggcgctagcaggagatggttaaacactagctgctccaagggttgacatggtcttcccagcatgtactcagcaggtgtggggtggagcacacgtaggcacagaaaacaggaatgcagacaacatgcatcccctgcgtccatgagttacatgtgttctcttagtgtccacgttgttttgatgttattcatggaataccttctgtg

SEQ ID NO: 1878 - DNA, 3510 bp, Homo sapiens
  source 1..3510: mol_type = genomic DNA
gggtgtggcctccgggcggcatggctgcttcccaggtgatgccggcttcagctagtggggtctagttgaccgttccgcagccgccagggccagcggaaagccggtcagggggaaccgcggcggggctggtgtcatgagcctgaggtgaacttgagggtgcctcctcagcggtctcccgccctgccctgaggggcgccgggaccccaaagagcggaggaagagcgccaccccgacggccaccgcttcggagccagcacgcggggtaccctacggggagcgcggatgcccccgtgttcgggcggggacggctccacccctcctgggccctcccttcgggacagggactgtcccgcccagagtgctgaatacccgcgcgaccgtctggatccccgcccaggaagcccctctgaagcctcctcgccgccgtttctgagaagcagggcacctgttaactggtaccaagaaaaggcccaagtgtttctctggcatctgatggtgtctggatccaccactctactctgtctctggaaacagcccttccacgtctctgcattccctgtcaccgcgtcactggccttcagacagagccaaggtgcagggcaacacctctacaaggatctgcagccatttatattgcttaggctactgatgcctgaggaaacccagacccaagaccaaccgatggaggaggaggaggttgagacgttcgcctttcaggcagaaattgcccagttgatgtcattgatcatcaatactttctactcgaacaaagagatctttctgagagagctcatttcaaattcatcagatgcattggacaaaatccggtatgaaagcttgacagatcccagtaaattagactctgggaaagagctgcatattaaccttataccgaacaaacaagatcgaactctcactattgtggatactggaattggaatgaccaaggctgacttgatcaataaccttggtactatcgccaagtctgggaccaaagcgttcatggaagctttgcaggctggtgcagatatctctatgattggccagttcggtgttggtttttattctgcttatttggttgctgagaaagtaactgtgatcaccaaacataacgatgatgagcagtacgcttgggagtcctcagcagggggatcattcacagtgaggacagacacaggtgaacctatgggtcgtggaacaaaagttatcctacacctgaaagaagaccaaactgagtacttggaggaacgaagaataaaggagattgtgaagaaacattctcagtttattggatatcccattactctttttgtggagaaggaacgtgataaagaagtaagcgatgatgaggctgaagaaaaggaagacaaagaagaagaaaaagaaaaagaagagaaagagtcggaagacaaacctgaaattgaagatgttggttctgatgaggaagaagaaaagaaggatggtgacaagaagaagaagaagaagattaaggaaaagtacatcgatcaagaagagctcaacaaaacaaagcccatctggaccagaaatcccgacgatattactaatgaggagtacggagaattctataagagcttgaccaatgactgggaagatcacttggcagtgaagcatttttcagttgaaggacagttggaattcagagcccttctatttgtcccacgacgtgctccttttgatctgtttgaaaacagaaagaaaaagaacaacatcaaattgtatgtacgcagagttttcatcatggataactgtgaggagctaatccctgaatatctgaacttcattagaggggtggtagactcggaggatctccctctaaacatatcccgtgagatgttgcaacaaagcaaaattttgaaagttatcaggaagaatttggtcaaaaaatgcttagaactctttactgaactggcggaagataaagagaactacaagaaattctatgagcagttctctaaaaacataaagcttggaatacacgaagactctcaaaatcggaagaagctttcagagctgttaaggtactacacatctgcctctggtgatgagatggtttctctcaaggactactgcaccagaatgaaggagaaccagaaacatatctattatatcacaggtgagaccaaggaccaggtagctaactcagcctttgtggaacgtcttcggaaacatggcttagaagtgatctatatgattgagcccattgatgagtactgtgtccaacagctgaaggaatttgaggggaagactttagtgtcagtcaccaaagaaggcctggaacttccagaggatgaagaagagaaaaagaagcaggaagagaaaaaaacaaagtttgagaacctctgcaaaatcatgaaagacatattggagaaaaaagttgaaaaggtggttgtgtcaaaccgattggtgacatctccatgctgtattgtcacaagcacatatggctggacagcaaacatggagagaatcatgaaagctcaagccctaagagacaactcaacaatgggttacatggcagcaaagaaacacctggagataaaccctgaccattccattattgagaccttaaggcaaaaggcagaggctgataagaacgacaagtctgtgaaggatctggtcatcttgctttatgaaactgcgctcctgtcttctggcttcagtctggaagatccccagacacatgctaacaggatctacaggatgatcaaacttggtctgggtattgatgaagatgaccctactgctgatgataccagtgctgctgtaactgaagaaatgccaccccttgaaggagatgacgacacatcacgcatggaagaagtagactaatctctggctgagggatgacttacctgttcagtactctacaattcctctgataatatattttcaaggatgtttttctttatttttgttaatattaaaaagtctgtatggcatgacaactactttaaggggaagataagatttctgtctactaagtgatgctgtgataccttaggcactaaagcagagctagtaatgctttttgagtttcatgttggtttattttcacagattggggtaacgtgcactgtaagacgtatgtaacatgatgttaactttgtggtctaaagtgtttagctgtcaagccggatgcctaagtagaccaaatcttgttattgaagtgttctgagctgtatcttgatgtttagaaaagtattcgttacatcttgtaggatctactttttgaacttttcattccctgtagttgacaattctgcatgtactagtcctctagaaataggttaaactgaagcaacttgatggaaggatctctccacagggcttgttttccaaagaaaagtattgtttggaggagcaaagttaaaagcctacctaagcatatcgtaaagctgttcaaaaataactcagacccagtcttgtggatggaaatgtagtgctcgagtcacattctgcttaaagttgtaacaaatacagatgagttaaaag

SEQ ID NO: 1879 - DNA, 1710 bp, Homo sapiens
  source 1..1710: mol_type = genomic DNA
ggttgagacgttcgcctttcaggcagaaattgcccagttgatgtcattgatcatcaatactttctactcgaacaaagagatctttctgagagagctcatttcaaattcatcagatgtgaacctatgggtcgtggaacaaaagttatcctacacctgaaagaagaccaaactgagtacttggaggaacgaagaataaaggagattgtgaagaaacattctcagtttattggatatcccattactctttttgtggagaaggaacgtgataaagaagtaagcgatgatgaggctgaagaaaaggaagacaaagaagaagaaaaagaaaaagaagagaaagagtcggaagacaaacctgaaattgaagatgttggttctgatgaggaagaagaaaagaaggatggtgacaagaagaagaagaagaagattaaggaaaagtacatcgatcaagaagagctcaacaaaacaaagcccatctggaccagaaatcccgacgatattactaatgaggagtacggagaattctataagagcttgaccaatgactgggaagatcacttggcagtgaagcatttttcagttgaaggacagttggaattcagagcccttctatttgtcccacgacgtgctccttttgatctgtttgaaaacagaaagaaaaagaacaacatcaaattgtatgtacgcagagttttcatcatggataactgtgaggagctaatccctgaatatctgaacttcattagaggggtggtagactcggaggatctccctctaaacatatcccgtgagatgttgcaacaaagcaaaattttgaaagttatcaggaagaatttggtcaaaaaatgcttagaactctttactgaactggcggaagataaagagaactacaagaaattctatgagcagttctctaaaaacataaagcttggaatacacgaagactctcaaaatcggaagaagctttcagagctgttaaggtactacacatctgcctctggtgatgagatggtttctctcaaggactactgcaccagaatgaaggagaaccagaaacatatctattatatcacaggtgagaccaaggaccaggtagctaactcagcctttgtggaacgtcttcggaaacatggcttagaagtgatctatatgattgagcccattgatgagtactgtgtccaacagctgaaggaatttgaggggaagactttagtgtcagtcaccaaagaaggcctggaacttccagaggatgaagaagagaaaaagaagcaggaagagaaaaaaacaaagtttgagaacctctgcaaaatcatgaaagacatattggagaaaaaagttgaaaaggtatgtgaatacagcatttcctgatcattgatacttctaaggtgctttcaagcttagtcatacatagcccattttcgcatgttttcaacttaaaacagaaaactatgttgtgtgtggctgggcgcggtggctcacgcctgcaatcccagcactttgggaggctgaggcagcggatcacaaggtcaggagatcgagaccatcctggctaacacggtgaaactcagtctctactaaaaatagaaaaaaataaaccaggcgtggtggcacggcctgtaatcctagccacttgggaggctgaggcaggagaatcgcctgaacccaggaggcggaggttgcagtgagccaagatcgcaccactgcactccagcc

SEQ ID NO: 1880 - DNA, 2858 bp, Homo sapiens
  source 1..2858: mol_type = genomic DNA
gattggtgggttcatgtttcccgtcccccgcccgcgggaagtgggggtgaaaagcggcccgacctgcttgcggtgtagtgggcggaccgcgcggctggaggtgtgaggatccgaacccaggggtggggggtggaggcggctcctgcgatcgaaggggacttgagactcaccggccgcacgccatgagggccctgtgggtgctgggcctctgctgcgtcctgctgaccttcgggtcggtcagagctgacgatgaagttgatgtggatggtacagtagaagaggatctgggtaaaagtagagaaggatcaaggacggatgatgaagtagtacagagagaggaagaagctattcagttggatggattaaatgcatcacaaataagagaacttagagagaagtcggaaaagtttgccttccaagccgaagttaacagaatgatgaaacttatcatcaattcattgtataaaaataaagagattttcctgagagaactgatttcaaatgcttctgatgctttagataagataaggctaatatcactgactgatgaaaatgctctttctggaaatgaggaactaacagtcaaaattaagtgtgataaggagaagaacctgctgcatgtcacagacaccggtgtaggaatgaccagagaagagttggttaaaaaccttggtaccatagccaaatctgggacaagcgagtttttaaacaaaatgactgaagcacaggaagatggccagtcaacttctgaattgattggccagtttggtgtcggtttctattccgccttccttgtagcagataaggttattgtcacttcaaaacacaacaacgatacccagcacatctgggagtctgactccaatgaattttctgtaattgctgacccaagaggaaacactctaggacggggaacgacaattacccttgtcttaaaagaagaagcatctgattaccttgaattggatacaattaaaaatctcgtcaaaaaatattcacagttcataaactttcctatttatgtatggagcagcaagactgaaactgttgaggagcccatggaggaagaagaagcagccaaagaagagaaagaagaatctgatgatgaagctgcagtagaggaagaagaagaagaaaagaaaccaaagactaaaaaagttgaaaaaactgtctgggactgggaacttatgaatgatatcaaaccaatatggcagagaccatcaaaagaagtagaagaagatgaatacaaagctttctacaaatcattttcaaaggaaagtgatgaccccatggcttatattcactttactgctgaaggggaagttaccttcaaatcaattttatttgtacccacatctgctccacgtggtctgtttgacgaatatggatctaaaaagagcgattacattaagctctatgtgcgccgtgtattcatcacagacgacttccatgatatgatgcctaaatacctcaattttgtcaagggtgtggtggactcagatgatctccccttgaatgtttcccgcgagactcttcagcaacataaactgcttaaggtgattaggaagaagcttgttcgtaaaacgctggacatgatcaagaagattgctgatgataaatacaatgatactttttggaaagaatttggtaccaacatcaagcttggtgtgattgaagaccactcgaatcgaacacgtcttgctaaacttcttaggttccagtcttctcatcatccaactgacattactagcctagaccagtatgtggaaagaatgaaggaaaaacaagacaaaatctacttcatggctgggtccagcagaaaagaggctgaatcttctccatttgttgagcgacttctgaaaaagggctatgaagttatttacctcacagaacctgtggatgaatactgtattcaggcccttcccgaatttgatgggaagaggttccagaatgttgccaaggaaggagtgaagttcgatgaaagtgagaaaactaaggagagtcgtgaagcagttgagaaagaatttgagcctctgctgaattggatgaaagataaagcccttaaggacaagattgaaaaggctgtggtgtctcagcgcctgacagaatctccgtgtgctttggtggccagccagtacggatggtctggcaacatggagagaatcatgaaagcacaagcgtaccaaacgggcaaggacatctctacaaattactatgcgagtcagaagaaaacatttgaaattaatcccagacacccgctgatcagagacatgcttcgacgaattaaggaagatgaagatgataaaacagttttggatcttgctgtggttttgtttgaaacagcaacgcttcggtcagggtatcttttaccagacactaaagcatatggagatagaatagaaagaatgcttcgcctcagtttgaacattgaccctgatgcaaaggtggaagaagagcccgaagaagaacctgaagagacagcagaagacacaacagaagacacagagcaagacgaagatgaagaaatggatgtgggaacagatgaagaagaagaaacagcaaaggaatctacagctgaaaaagatgaattgtaaattatactctcaccatttggatcctgtgtggagagggaatgtgaaatttacatcatttctttttgggagagacttgttttggatgccccctaatccccttctcccctgcactgtaaaatgtgggattatgggtcacaggaaaaagtgggttttttagttgaattttttttaacattcctcatgaatgtaaatttgtactatttaactgactattcttgatgtaaaatcttgtcatgtgtataaaaataaaaaagatcccaaata

SEQ ID NO: 1881 - DNA, 2035 bp, Homo sapiens
  source 1..2035: mol_type = genomic DNA
gaaaagcggcccgacctgcttgcggtgtagtgggcggaccgcgcggctggaggtgtgaggatccgaacccaggggtggggggtggaggcggctcctgcgatcgaaggggacttgagactcaccggccgcacgccatgagggccctgtgggtgctgggcctctgctgcgtcctgctgaccttcgggtcggtcagagctgacgatgaagttgatgtggatggtacagtagaagaggatctgggtaaaagtagagaaggatcaaggacggatgatgaagcagccaaagaagagaaagaagaatctgatgatgaagctgcagtagaggaagaagaagaagaaaagaaaccaaagactaaaaaagttgaaaaaactgtctgggactgggaacttatgaatgatatcaaaccaatatggcagagaccatcaaaagaagtagaagaagatgaatacaaagctttctacaaatcattttcaaaggaaagtgatgaccccatggcttatattcactttactgctgaaggggaagttaccttcaaatcaattttatttgtacccacatctgctccacgtggtctgtttgacgaatatggatctaaaaagagcgattacattaagctctatgtgcgccgtgtattcatcacagacgacttccatgatatgatgcctaaatacctcaattttgtcaagggtgtggtggactcagatgatctccccttgaatgtttcccgcgagactcttcagcaacataaactgcttaaggtgattaggaagaagcttgttcgtaaaacgctggacatgatcaagaagattgctgatgataaatacaatgatactttttggaaagaatttggtaccaacatcaagcttggtgtgattgaagaccactcgaatcgaacacgtcttgctaaacttcttaggttccagtcttctcatcatccaactgacattactagcctagaccagtatgtggaaagaatgaaggaaaaacaagacaaaatctacttcatggctgggtccagcagaaaagaggctgaatcttctccatttgttgagcgacttctgaaaaagggctatgaagttatttacctcacagaacctgtggatgaatactgtattcaggcccttcccgaatttgatgggaagaggttccagaatgttgccaaggaaggagtgaagttcgatgaaagtgagaaaactaaggagagtcgtgaagcagttgagaaagaatttgagcctctgctgaattggatgaaagataaagcccttaaggacaagattgaaaaggctgtggtgtctcagcgcctgacagaatctccgtgtgctttggtggccagccagtacggatggtctggcaacatggagagaatcatgaaagcacaagcgtaccaaacgggcaaggacatctctacaaattactatgcgagtcagaagaaaacatttgaaattaatcccagacacccgctgatcagagacatgcttcgacgaattaaggaagatgaagatgataaaacagttttggatcttgctgtggttttgtttgaaacagcaacgcttcggtcagggtatcttttaccagacactaaagcatatggagatagaatagaaagaatgcttcgcctcagtttgaacattgaccctgatgcaaaggtggaagaagagcccgaagaagaacctgaagagacagcagaagacacaacagaagacacagagcaagacgaagatgaagaaatggatgtgggaacagatgaagaagaagaaacagcaaaggaatctacagctgaaaaagatgaattgtaaattatactctcaccatttggatcctgtgtggagagggaatgtgaaatttacatcatttctttttgggagagacttgttttggatgccccctaatccccttctcccctgcactgtaaaatgtgggattatgggtcacaggaaaaagtgggttttttagttgaattttttttaacattcctcatgaatgtaaatttgtactatttaactgactattcttgatgtaaaatcttgtcatgtgt

SEQ ID NO: 1882 - DNA, 1338 bp, Homo sapiens
  source 1..1338: mol_type = genomic DNA
gaggatccgaacccaggggtggggggtggaggcggctcctgcgatcgaaggggacttgagactcaccggccgcacgccatgagggccctgtgggtgctgggcctctgctgcgtcctgctgaccttcgggtcggtcagagctgacgatgaagttgatgtggatggtacagtagaagaggatctgggtaaaagtagagaaggatcaaggacggatgatgaagtagtacagagagaggaagaagctattcagttggatggattaaatgcatcacaaataagagaacttagagagaagtcggaaaagtttgccttccaagccgaagttaacagaatgatgaaacttatcatcaattcattgtataaaaataaagagattttcctgagagaactgatttcaaatgcttctgatgctttagataagataaggctaatatcactgactgatgaaaatgctctttctggaaatgaggaactaacagtcaaaattaagtgtgataaggagaagaacctgctgcatgtcacagacaccggtgtaggaatgaccagagaagagttggttaaaaaccttggtaccatagccaaatctgggacaagcgagtttttaaacaaaatgactgaagcacaggaagatggccagtcaacttctgaattgattggccagtttggtgtcggtttctattccgccttccttgtagcagataaggttattgtcacttcaaaacacaacaacgatacccagcacatctgggagtctgactccaatgaattttctgtaattgctgacccaagaggaaacactctaggacggggaacgacaattacccttgtcttaaaagaagaagcatctgattaccttgaattggatacaattaaaaatctcgtcaaaaaatattcacagttcataaactttcctatttatgtatggagcagcaagactgaaactgttgaggagcccatggaggaagaagaagcagccaaagaagagaaagaagaatctgatgatgaagctgcagcaagacgaagatgaagaaatggatgtgggaacagatgaagaagaagaaacagcaaaggaatctacagctgaaaaagatgaattgtaaattatactctcaccatttggatcctgtgtggagagggaatgtgaaatttacatcatttctttttgggagagacttgttttggatgccccctaatccccttctcccctgcactgtaaaatgtgggattatgggtcacaggaaaaagtgggttttttagttgaattttttttaacattcctcatgaatgtaaatttgtactatttaactgactattcttgatgtaaaatcttgtcatgtgt

SEQ ID NO: 1883 - DNA, 1822 bp, Homo sapiens
  source 1..1822: mol_type = genomic DNA
gtgtgtgtgtgtgtgtgtgtgtgtgtgtgtatgtgtgtgtgtgtgtgtgtgtgtgtgtgttttctctaaaagtcctatggccagactttgtttcccaagggtcatatgactgctcctctccaccccacactggcccggggcgggctgggcgcgggcccctgcgggtgttgcaacgcccggccagaaagtgggcatcagctgttccgcctggcccacgtgacccgccgagcataaatgtgaccggccgcggctccggcagtcaacgcctgcctcctctcgagcgtcctcagcgcagccgccgcccgcggagccagcacgaacgagcccagcaccggccggatggagcgtccgcaacccgacagcatgccccaggatttgtcagaggccctgaaggaggccaccaaggaggtgcacacccaggcagagaatgctgagttcatgaggaactttcagaagggccaggtgacccgagacggcttcaagctggtgatggcctccctgtaccacatctatgtggccctggaggaggagattgagcgcaacaaggagagcccagtcttcgcccctgtctacttcccagaagagctgcaccgcaaggctgccctggagcaggacctggccttctggtacgggccccgctggcaggaggtcatcccctacacaccagccatgcagcgctatgtgaagcggctccacgaggtggggcgcacagagcccgagctgctggtggcccacgcctacacccgctacctgggtgacctgtctgggggccaggtgctcaaaaagattgcccagaaagccctggacctgcccagctctggcgagggcctggccttcttcaccttccccaacattgccagtgccaccaagttcaagcagctctaccgctcccgcatgaactccctggagatgactcccgcagtcaggcagagggtgatagaagaggccaagactgcgttcctgctcaacatccagctctttgaggagttgcaggagctgctgacccatgacaccaaggaccagagcccctcacgggcaccagggcttcgccagcgggccagcaacaaagtgcaagattctgcccccgtggagactcccagagggaagcccccactcaacacccgctcccaggctccgcttctccgatgggtccttacactcagctttctggtggcgacagttgctgtagggctttatgccatgtgaatgcaggcatgctggctcccagggccatgaactttgtccggtggaaggccttctttctagagagggaattctcttggctggcttccttaccgtgggcactgaaggctttcagggcctccagccctctcactgtgtccctctctctggaaaggaggaaggagcctatggcatcttccccaacgaaaagcacatccaggcaatggcctaaacttcagagggggcgaagggatcagccctgcccttcagcatcctcagttcctgcagcagagcctggaagacaccctaatgtggcagctgtctcaaacctccaaaagccctgagtttcaagtatccttgttgacacggccatgaccactttccccgtgggccatggcaatttttacacaaacctgaaaagatgttgtgtcttgtgtttttgtcttatttttgttggagccactctgttcctggctcagcctcaaatgcagtatttttgttgtgttctgttgtttttatagcagggttggggtggtttttgagccatgcgtgggtggggagggaggtgtttaacggcactgtggccttggtctaacttttgtgtgaaataataaacaacattgtctgatagtagcttgaa

SEQ ID NO: 1884 - DNA, 921 bp, Homo sapiens
  source 1..921: mol_type = genomic DNA
cggggacttagtctcctccctgggtttggacactggcatcctgctttatgtgtgacaccactgcacccctctgagcctcggtttccccatctgtaaaatagaagcgatctaccctcacagggtcatatgactgctcctctccaccccacactggcccggggcgggctgggcgcgggcccctgcgggtgttgcaacgcccggccagaaagtgggcatcagctgttccgcctggcccacgtgacccgccgagcataaatgtgaccggccgcggctccggcagtcaacgcctgcctcctctcgagcgtcctcagcgcagccgccgcccgcggagccagcacgaacgagcccagcaccggccggatggagcgtccgcaacccgacagcatgccccaggatttgtcagaggccctgaaggaggccaccaaggaggtgcacacccaggcagagaatgctgagttcatgaggaactttcagaagggccaggtgacccgagacggcttcaagctggtgatggcctccctgtaccacatctatgtggccctggaggaggagattgagcgcaacaaggagagcccagtcttcgcccctgtctacttcccagaagagctgcaccgcaaggctgccctggagcaggacctggccttctggtacgggccccgctggcaggaggtcatcccctacacaccagccatgcagcgctatgtgaagcggctccacgaggtggggcgcacagagcccgagctgctggtggcccacgcctacacccgctacctgggtgacctgtctgggggccaggtgctcaaaaagattgcccagaaagccctggacctgcccagctctggcgagggcctggccttcttcaccttccccaacattgccagtgccaccaagttcaagcagctctaccgctcccgcatgaac

SEQ ID NO: 1885 - DNA, 2082 bp, Homo sapiens
  source 1..2082: mol_type = genomic DNA
ctcgggagcacatcagaggcttagaggcgagtgggaagggactcagacagtgcaggacgagaaacgcccgcggcaccaaagcccctcagagcgtcgcccccgcctctagttctagaaagtcagtttcccggcactggcaccccggaacctcaggggctgccgagctgggggggcgctcaagctgcgaggatccgggctgcccgcgagacgaggagcgggcgcccaggatggggtgcatgaagtccaagttcctccaggtcggaggcaatacattctcaaaaactgaaaccagcgccagcccacactgtcctgtgtacgtgccggatcccacatccaccatcaagccggggcctaatagccacaacagcaacacaccaggaatcagggaggcaggctctgaggacatcatcgtggttgccctgtatgattacgaggccattcaccacgaagacctcagcttccagaagggggaccagatggtggtcctagaggaatccggggagtggtggaaggctcgatccctggccacccggaaggagggctacatcccaagcaactatgtcgcccgcgttgactctctggagacagaggagtggtttttcaagggcatcagccggaaggacgcagagcgccaactgctggctcccggcaacatgctgggctccttcatgatccgggatagcgagaccactaaaggaagctactctttgtccgtgcgagactacgaccctcggcagggagataccgtgaaacattacaagatccggaccctggacaacgggggcttctacatatccccccgaagcaccttcagcactctgcaggagctggtggaccactacaagaaggggaacgacgggctctgccagaaactgtcggtgccctgcatgtcttccaagccccagaagccttgggagaaagatgcctgggagatccctcgggaatccctcaagctggagaagaaacttggagctgggcagtttggggaagtctggatggccacctacaacaagcacaccaaggtggcagtgaagacgatgaagccagggagcatgtcggtggaggccttcctggcagaggccaacgtgatgaaaactctgcagcatgacaagctggtcaaacttcatgcggtggtcaccaaggagcccatctacatcatcacggagttcatggccaaaggaagcttgctggactttctgaaaagtgatgagggcagcaagcagccattgccaaaactcattgacttctcagcccagattgcagaaggcatggccttcatcgagcagaggaactacatccaccgagacctccgagctgccaacatcttggtctctgcatccctggtgtgtaagattgctgactttggcctggcccgggtcattgaggacaacgagtacacggctcgggaaggggccaagttccccatcaagtggacagctcctgaagccatcaactttggctccttcaccatcaagtcagacgtctggtcctttggtatcctgctgatggagatcgtcacctacggccggatcccttacccagggatgtcaaaccctgaagtgatccgagctctggagcgtggataccggatgcctcgcccagagaactgcccagaggagctctacaacatcatgatgcgctgctggaaaaaccgtccggaggagcggccgaccttcgaatacatccagagtgtgctggatgacttctacacggccacagagagccagtaccaacagcagccatgatagggaggaccagggcagggccagggggtgcccaggtggtggctgcaaggtggctccagcaccatccgccagggcccacacccccttcctactcccagacacccaccctcgcttcagccacagtttcctcatctgtccagtgggtaggttggactggaaaatctctttttgactcttgcaatccacaatctgacattctcaggaagcccccaagttgatatttctatttcctggaatggttggattttagttacagctgtgatttggaagggaaactttcaaaatagtgaaatgaatatttaaataaaagatataaatgccaaagtctttaccaaaa

SEQ ID NO: 1886 - DNA, 1806 bp, Homo sapiens
  source 1..1806: mol_type = genomic DNA
ctcgctcagggcgcggctaaggcgcccagatggcctgcgggcgccaccacgtccctggtcccagctcgggagcacatcagaggcttagaggcgagtgggaagggactcagacagtgcaggacgagaaacgcccgcggcaccaaagcccctcagagcgtcgcccccgcctctagttctagaaagtcagtttcccggcactggcaccccggaacctcaggggctgccgagctgggggggcgctcaagctgcgaggatccgggctgcccgcgagacgaggagcgggcgcccaggatggggtgcatgaagtccaagttcctccaggtcggaggcaatacattctcaaaaactgaaaccagcgccagcccacactgtcctgtgtacgtgccggatcccacatccaccatcaagccggggcctaatagccacaacagcaacacaccaggaatcagggagggctctgaggacatcatcgtggttgccctgtatgattacgaggccattcaccacgaagacctcagcttccagaagggggaccagatggtggtcctagaggaatccggggagtggtggaaggctcgatccctggccacccggaaggagggctacatcccaagcaactatgtcgcccgcgttgactctctggagacagaggagtggtttttcaagggcatcagccggaaggacgcagagcgccaactgctggctcccggcaacatgctgggctccttcatgatccgggatagcgagaccactaaaggaagctactctttgtccgtgcgagactacgaccctcggcagggagataccgtgaaacattacaagatccggaccctggacaacgggggcttctacatatccccccgaagcaccttcagcactctgcaggagctggtggaccactacaagaaggggaacgacgggctctgccagaaactgtcggtgccctgcatgtcttccaagccccagaagccttgggagaaagatgcctgggagatccctcgggaatccctcaagctggagaagaaacttggagctgggcagtttggggaagtctggatggccacctacaacaagcacaccaaggtggcagtgaagacgatgaagccagggagcatgtcggtggaggccttcctggcagaggccaacgtgatgaaaactctgcagcatgacaagctggtcaaacttcatgcggtggtcaccaaggagcccatctacatcatcacggagttcatggccaaaggaagcttgctggactttctgaaaagtgatgagggcagcaagcagccattgccaaaactcattgacttctcagcccagattgcagaaggcatggccttcatcgagcagaggaactacatccaccgagacctccgagctgccaacatcttggtctctgcatccctggtgtgtaagattgctgactttggcctggcccgggtcattgaggacaacgagtacacggctcgggaaggggccaagttccccatcaagtggacagctcctgaagccatcaactttggctccttcaccatcaagtcagacgtctggtcctttggtatcctgctgatggagatcgtcacctacggccggatcccttacccagggatgtcaaaccctgaagtgatccgagctctggagcgtggataccggatgcctcgcccagagaactgcccagaggagctctacaacatcatgatgcgctgctggaaaaaccgtccggaggagcggccgaccttcgaatacatccagagtgtgctggatgacttctacacggccacagagagccagtaccaacagcagccatga

SEQ ID NO: 1887 - DNA, 1742 bp, Homo sapiens
  source 1..1742: mol_type = genomic DNA
ctcgggagcacatcagaggcttagaggcgagtgggaagggactcagacagtgcaggacgagaaacgcccgcggcaccaaagcccctcagagcgtcgcccccgcctctagttctagaaagtcagtttcccggcactggcaccccggaacctcaggggctgccgagctgggggggcgctcaagctgcgaggatccgggctgcccgcgagacgaggagcgggcgcccaggatggggtgcatgaagtccaagttcctccaggtcggaggcaatacattctcaaaaactgaaaccagcgccagcccacactgtcctgtgtacgtgccggatcccacatccaccatcaagccggggcctaatagccacaacagcaacacaccaggaatcagggagggctctgaggacatcatcgtggttgccctgtatgattacgaggccattcaccacgaagacctcagcttccagaagggggaccagatggtggtcctagaggaatccggggagtggtggaaggctcgatccctggccacccggaaggagggctacatcccaagcaactatgtcgcccgcgttgactctctggagacagaggagtggtttttcaagggcatcagccggaaggacgcagagcgccaactgctggctcccggcaacatgctgggctccttcatgatccgggatagcgagaccactaaaggaagctactctttgtccgtgcgagactacgaccctcggcagggagataccgtgaaacattacaagatccggaccctggacaacgggggcttctacatatccccccgaagcaccttcagcactctgcaggagctggtggaccactacaagaaggggaacgacgggctctgccagaaactgtcggtgccctgcatgtcttccaagccccagaagccttgggagaaagatgcctgggagatccctcgggaatccctcaagctggagaagaaacttggagctgggcagtttggggaagtctggatggccacctacaacaagcacaccaaggtggcagtgaagacgatgaagccagggagcatgtcggtggaggccttcctggcagaggccaacgtgatgaaaactctgcagcatgacaagctggtcaaacttcatgcggtggtcaccaaggagcccatctacatcatcacggagttcatggccaaaggaagcttgctggactttctgaaaagtgatgagggcagcaagcagccattgccaaaactcattgacttctcagcccagattgcagaaggcatggccttcatcgagcagaggaactacatccaccgagacctccgagctgccaacatcttggtctctgcatccctggtgtgtaagattgctgactttggcctggcccgggtcattgaggacaacgagtacacggctcgggaaggggccaagttccccatcaagtggacagctcctgaagccatcaactttggctccttcaccatcaagtcagacgtctggtcctttggtatcctgctgatggagatcgtcacctacggccggatcccttacccagggatgtcaaaccctgaagtgatccgagctctggagcgtggataccggatgcctcgcccagagaactgcccagaggagctctacaacatcatgatgcgctgctggaaaaaccgtccggaggagcggccgaccttcgaatacatccagagtgtgctggatgacttctacacggccacagagagccagtaccaacagcagccatga

SEQ ID NO: 1888 - DNA, 2101 bp, Homo sapiens
  source 1..2101: mol_type = genomic DNA
accacgtccctggtcccagctcgggagcacatcagaggcttagaggcgagtgggaagggactcagacagtgcaggacgagaaacgcccgcggcaccaaagcccctcagagcgtcgcccccgcctctagttctagaaagtcagtttcccggcactggcaccccggaacctcaggggctgccgagctgggggggcgctcaagctgcgaggatccgggctgcccgcgagacgaggagcgggcgcccaggatggggtgcatgaagtccaagttcctccaggtcggaggcaatacattctcaaaaactgaaaccagcgccagcccacactgtcctgtgtacgtgccggatcccacatccaccatcaagccggggcctaatagccacaacagcaacacaccaggaatcagggaggcaggctctgaggacatcatcgtggttgccctgtatgattacgaggccattcaccacgaagacctcagcttccagaagggggaccagatggtggtcctagaggaatccggggagtggtggaaggctcgatccctggccacccggaaggagggctacatcccaagcaactatgtcgcccgcgttgactctctggagacagaggagtggtttttcaagggcatcagccggaaggacgcagagcgccaactgctggctcccggcaacatgctgggctccttcatgatccgggatagcgagaccactaaaggaagctactctttgtccgtgcgagactacgaccctcggcagggagataccgtgaaacattacaagatccggaccctggacaacgggggcttctacatatccccccgaagcaccttcagcactctgcaggagctggtggaccactacaagaaggggaacgacgggctctgccagaaactgtcggtgccctgcatgtcttccaagccccagaagccttgggagaaagatgcctgggagatccctcgggaatccctcaagctggagaagaaacttggagctgggcagtttggggaagtctggatggccacctacaacaagcacaccaaggtggcagtgaagacgatgaagccagggagcatgtcggtggaggccttcctggcagaggccaacgtgatgaaaactctgcagcatgacaagctggtcaaacttcatgcggtggtcaccaaggagcccatctacatcatcacggagttcatggccaaaggaagcttgctggactttctgaaaagtgatgagggcagcaagcagccattgccaaaactcattgacttctcagcccagattgcagaaggcatggccttcatcgagcagaggaactacatccaccgagacctccgagctgccaacatcttggtctctgcatccctggtgtgtaagattgctgactttggcctggcccgggtcattgaggacaacgagtacacggctcgggaaggggccaagttccccatcaagtggacagctcctgaagccatcaactttggctccttcaccatcaagtcagacgtctggtcctttggtatcctgctgatggagatcgtcacctacggccggatcccttacccagggatgtcaaaccctgaagtgatccgagctctggagcgtggataccggatgcctcgcccagagaactgcccagaggagctctacaacatcatgatgcgctgctggaaaaaccgtccggaggagcggccgaccttcgaatacatccagagtgtgctggatgacttctacacggccacagagagccagtaccaacagcagccatgatagggaggaccagggcagggccagggggtgcccaggtggtggctgcaaggtggctccagcaccatccgccagggcccacacccccttcctactcccagacacccaccctcgcttcagccacagtttcctcatctgtccagtgggtaggttggactggaaaatctctttttgactcttgcaatccacaatctgacattctcaggaagcccccaagttgatatttctatttcctggaatggttggattttagttacagctgtgatttggaagggaaactttcaaaatagtgaaatgaatatttaaataaaagatataaatgccaaagtctttaccaaaa

SEQ ID NO: 1889 - DNA, 2217 bp, Homo sapiens
  source 1..2217: mol_type = genomic DNA
ggagttagcctcgctcagggcgcggctaaggcgcccagatggcctgcgggcgccaccacgtccctggtcccagctcgggagcacatcagaggcttagaggcgagtgggaagggactcagacagtgcaggacgagaaacgcccgcggcaccaaagcccctcagagcgtcgcccccgcctctagttctagaaagtcagtttcccggcactggcaccccggaacctcaggggctgccgagctgggggggcgctcaagctgcgaggatccgggctgcccgcgagacgaggagcgggcgcccaggggcaaccgctgtcatgagttacagtccttccaggatgtgcctctgaaaatggattgcatataaatgatggggtgcatgaagtccaagttcctccaggtcggaggcaatacattctcaaaaactgaaaccagcgccagcccacactgtcctgtgtacgtgccggatcccacatccaccatcaagccggggcctaatagccacaacagcaacacaccaggaatcagggaggcaggctctgaggacatcatcgtggttgccctgtatgattacgaggccattcaccacgaagacctcagcttccagaagggggaccagatggtggtcctagaggaatccggggagtggtggaaggctcgatccctggccacccggaaggagggctacatcccaagcaactatgtcgcccgcgttgactctctggagacagaggagtggtttttcaagggcatcagccggaaggacgcagagcgccaactgctggctcccggcaacatgctgggctccttcatgatccgggatagcgagaccactaaaggaagctactctttgtccgtgcgagactacgaccctcggcagggagataccgtgaaacattacaagatccggaccctggacaacgggggcttctacatatccccccgaagcaccttcagcactctgcaggagctggtggaccactacaagaaggggaacgacgggctctgccagaaactgtcggtgccctgcatgtcttccaagccccagaagccttgggagaaagatgcctgggagatccctcgggaatccctcaagctggagaagaaacttggagctgggcagtttggggaagtctggatggccacctacaacaagcacaccaaggtggcagtgaagacgatgaagccagggagcatgtcggtggaggccttcctggcagaggccaacgtgatgaaaactctgcagcatgacaagctggtcaaacttcatgcggtggtcaccaaggagcccatctacatcatcacggagttcatggccaaaggaagcttgctggactttctgaaaagtgatgagggcagcaagcagccattgccaaaactcattgacttctcagcccagattgcagaaggcatggccttcatcgagcagaggaactacatccaccgagacctccgagctgccaacatcttggtctctgcatccctggtgtgtaagattgctgactttggcctggcccgggtcattgaggacaacgagtacacggctcgggaaggggccaagttccccatcaagtggacagctcctgaagccatcaactttggctccttcaccatcaagtcagacgtctggtcctttggtatcctgctgatggagatcgtcacctacggccggatcccttacccagggatgtcaaaccctgaagtgatccgagctctggagcgtggataccggatgcctcgcccagagaactgcccagaggagctctacaacatcatgatgcgctgctggaaaaaccgtccggaggagcggccgaccttcgaatacatccagagtgtgctggatgacttctacacggccacagagagccagtaccaacagcagccatgatagggaggaccagggcagggccagggggtgcccaggtggtggctgcaaggtggctccagcaccatccgccagggcccacacccccttcctactcccagacacccaccctcgcttcagccacagtttcctcatctgtccagtgggtaggttggactggaaaatctctttttgactcttgcaatccacaatctgacattctcaggaagcccccaagttgatatttctatttcctggaatggttggattttagttacagctgtgatttggaagggaaactttcaaaatagtgaaatgaatatttaaataaaagatataaatgccaaagtctttacc

SEQ ID NO: 1890 - DNA, 2215 bp, Homo sapiens
  source 1..2215: mol_type = genomic DNA
ggagttagcctcgctcagggcgcggctaaggcgcccagatggcctgcgggcgccaccacgtccctggtcccagctcgggagcacatcagaggcttagaggcgagtgggaagggactcagacagtgcaggacgagaaacgcccgcggcaccaaagcccctcagagcgtcgcccccgcctctagttctagaaagtcagtttcccggcactggcaccccggaacctcaggggctgccgagctgggggggcgctcaagctgcgaggatccgggctgcccgcgagacgaggagcgggcgcccagacaaacaaagcaaaaccgctcaagtcttgaggtggcaaatctttcccagttcccaccagaagaggatggggtgcatgaagtccaagttcctccaggtcggaggcaatacattctcaaaaactgaaaccagcgccagcccacactgtcctgtgtacgtgccggatcccacatccaccatcaagccggggcctaatagccacaacagcaacacaccaggaatcagggaggcaggctctgaggacatcatcgtggttgccctgtatgattacgaggccattcaccacgaagacctcagcttccagaagggggaccagatggtggtcctagaggaatccggggagtggtggaaggctcgatccctggccacccggaaggagggctacatcccaagcaactatgtcgcccgcgttgactctctggagacagaggagtggtttttcaagggcatcagccggaaggacgcagagcgccaactgctggctcccggcaacatgctgggctccttcatgatccgggatagcgagaccactaaaggaagctactctttgtccgtgcgagactacgaccctcggcagggagataccgtgaaacattacaagatccggaccctggacaacgggggcttctacatatccccccgaagcaccttcagcactctgcaggagctggtggaccactacaagaaggggaacgacgggctctgccagaaactgtcggtgccctgcatgtcttccaagccccagaagccttgggagaaagatgcctgggagatccctcgggaatccctcaagctggagaagaaacttggagctgggcagtttggggaagtctggatggccacctacaacaagcacaccaaggtggcagtgaagacgatgaagccagggagcatgtcggtggaggccttcctggcagaggccaacgtgatgaaaactctgcagcatgacaagctggtcaaacttcatgcggtggtcaccaaggagcccatctacatcatcacggagttcatggccaaaggaagcttgctggactttctgaaaagtgatgagggcagcaagcagccattgccaaaactcattgacttctcagcccagattgcagaaggcatggccttcatcgagcagaggaactacatccaccgagacctccgagctgccaacatcttggtctctgcatccctggtgtgtaagattgctgactttggcctggcccgggtcattgaggacaacgagtacacggctcgggaaggggccaagttccccatcaagtggacagctcctgaagccatcaactttggctccttcaccatcaagtcagacgtctggtcctttggtatcctgctgatggagatcgtcacctacggccggatcccttacccagggatgtcaaaccctgaagtgatccgagctctggagcgtggataccggatgcctcgcccagagaactgcccagaggagctctacaacatcatgatgcgctgctggaaaaaccgtccggaggagcggccgaccttcgaatacatccagagtgtgctggatgacttctacacggccacagagagccagtaccaacagcagccatgatagggaggaccagggcagggccagggggtgcccaggtggtggctgcaaggtggctccagcaccatccgccagggcccacacccccttcctactcccagacacccaccctcgcttcagccacagtttcctcatctgtccagtgggtaggttggactggaaaatctctttttgactcttgcaatccacaatctgacattctcaggaagcccccaagttgatatttctatttcctggaatggttggattttagttacagctgtgatttggaagggaaactttcaaaatagtgaaatgaatatttaaataaaagatataaatgccaaagtctttacc

SEQ ID NO: 1891 - DNA, 4615 bp, Homo sapiens
  source 1..4615: mol_type = genomic DNA
aaggagaaaagggcgctggggctcggcgggaggaagtgctagagctctcgactctccgctgcgcggcagctggcggggggagcagccaggtgagcccaagatgctgctgcgctcgaagcctgcgctgccgccgccgctgatgctgctgctcctggggccgctgggtcccctctcccctggcgccctgccccgacctgcgcaagcacaggacgtcgtggacctggacttcttcacccaggagccgctgcacctggtgagcccctcgttcctgtccgtcaccattgacgccaacctggccacggacccgcggttcctcatcctcctgggttctccaaagcttcgtaccttggccagaggcttgtctcctgcgtacctgaggtttggtggcaccaagacagacttcctaattttcgatcccaagaaggaatcaacctttgaagagagaagttactggcaatctcaagtcaaccaggatatttgcaaatatggatccatccctcctgatgtggaggagaagttacggttggaatggccctaccaggagcaattgctactccgagaacactaccagaaaaagttcaagaacagcacctactcaagaagctctgtagatgtgctatacacttttgcaaactgctcaggactggacttgatctttggcctaaatgcgttattaagaacagcagatttgcagtggaacagttctaatgctcagttgctcctggactactgctcttccaaggggtataacatttcttgggaactaggcaatgaacctaacagtttccttaagaaggctgatattttcatcaatgggtcgcagttaggagaagattttattcaattgcataaacttctaagaaagtccaccttcaaaaatgcaaaactctatggtcctgatgttggtcagcctcgaagaaagacggctaagatgctgaagagcttcctgaaggctggtggagaagtgattgattcagttacatggcatcactactatttgaatggacggactgctaccaaggaagattttctaaaccctgatgtattggacatttttatttcatctgtgcaaaaagttttccaggtggttgagagcaccaggcctggcaagaaggtctggttaggagaaacaagctctgcatatggaggcggagcgcccttgctatccgacacctttgcagctggctttatgtggctggataaattgggcctgtcagcccgaatgggaatagaagtggtgatgaggcaagtattctttggagcaggaaactaccatttagtggatgaaaacttcgatcctttacctgattattggctatctcttctgttcaagaaattggtgggcaccaaggtgttaatggcaagcgtgcaaggttcaaagagaaggaagcttcgagtataccttcattgcacaaacactgacaatccaaggtataaagaaggagatttaactctgtatgccataaacctccataatgtcaccaagtacttgcggttaccctatcctttttctaacaagcaagtggataaataccttctaagacctttgggacctcatggattactttccaaatctgtccaactcaatggtctaactctaaagatggtggatgatcaaaccttgccacctttaatggaaaaacctctccggccaggaagttcactgggcttgccagctttctcatatagtttttttgtgataagaaatgccaaagttgctgcttgcatctgaaaataaaatatactagtcctgacactgaatttttcaagtatactaagagtaaagcaactcaagttataggaaaggaagcagataccttgcaaagcaactagtgggtgcttgagagacactgggacactgtcagtgctagatttagcacagtattttgatctcgctaggtagaacactgctaataataatagctaataataccttgttccaaatactgcttagcattttgcatgttttacttttatctaaagttttgttttgttttattatttatttatttatttattttgagacagaatctctctctgtcacccaggctggagtgccatggtgcgatcttggctcactgcaactttaagcaattctcctgcctcagcttcctgagtagctgggattataggcgtgtgccaccacgcccagctactttctatattttttgtagagatggagtttcgccatattggccaagctggtctcgaactcctgtcctcgaactcctgtcctcaagtgatccacccgcctcagcctctcaaagtgctgggattacaggtgtgagccaccacacccagcagtgttttatttttgagacagggtatcattctgttgcccaggcttgagtgcagtggtgcaatcatagatcactgcagccttttaactcctgggctcaagtcatcctcctgcttagcctcccaagtagctaggaccacagacacatgccatcacacttggctatttttaaaaaattttttgtagagatggggtctcgctatgttacccaaactggtcctgaactcctggactcaattgatcctcccaccttggccttccaggtgctgggatttctttgggagtacagcatggtacagcaggagatcatttgatgttacctctgtgcagtgttgctagtcagcgaaagactataatacctgtggggacagcgattagccaccacaaccagtctttatttaaagttattaaaaatggctgggcgcagtggctcacacctgtaatcctagcactttgggaggccgaggcagatggatcacctgacgtgaggaatttgataccagcctggccaacatggtgaaaccccatctctactaaaaaatacaaaaattagctgggtgtggtcctgtagtcccagctacttgggaggctggggcaggagaattacttgaacccaggaggcagaggttgcagtgagccgagattgtgccactgcactccagcctgggtgacagagagagattccatctcaaaaaaacaagttattaaaaatgtatatgaatgctcctaatatggtcaggaagcaaggaagcgaaggatatattatgagttttaagaaggtgcttagctgtatatttatctttcaaaatgtattagaagattttagaattctttccttcatgtgccatctctacaggcacccatcagaaaaagcatactgccgttaccgtgaaactggttgtaaaagagaaactatctatttgcaccttaaaagacagctagattttgctgattttcttctttcggttttctttgtcagcaataatatgtgagaggacagattgttagatatgatagtataaaaaatggttaatgacaattcagaggcgaggagattctgtaaacttaaaattactataaatgaaattgatttgtcaagaggataaattttagaaaacacccaataccttataactgtctgttaatgcttgctttttctctacctttcttccttgtttcagttgggaagcttttggctgcaagtaacagaaactcctaattcaaatggcttaagcaataaggaaatgtatattcccacataactagacgttcaaacaggccaggctccagcacttcagtacgtcaccagggatctgggttcttcccagctctctgctctgccatctttagcgctggcttcattctcagactctggtagcatgatggctgtagctgtttcatgggccccttcaaacctcatagcaaccagaggaagaaaatgagccattttttgagtctccttcatagacttgaataactctttttcagagcttctcacagcaaacctctcctcatgtctcctcatgtcttattgttcagaaatgggtaatgtggccatttcaccagtcactgccaacaacaacgaggttcctataattgtctctgagtaaccctttggaatggagagggtgttggtcagtctacaaactgaacactgcagttctgcgctttttaccagtgaaaaaatgtaattattttcccctcttaaggattaatattcttcaaatgtatgcctgttatggatatagtatctttaaaattttttattttaatagctttaggggtacacactttttgcttacaggggtgaattgtgtagtggtgaagactcggcttttaatgtacttgtcacctgagtgatgtacattgtacccaataggtaatttttcatccattaccctccttccgccctcttcccttctgagtctccaacatcccttataccactgtgtatgttcttgtgtacctacagctaagcttccacttataagtgagaacatgcagtatttggttttccattcctgagttacttcccttaggataacagcccccagttccgtccaagttgctgcaaaatacattattcttctttatggctgagtaatagtccatggtacatatataccacattttctttatccacttatcagttgatggacacttaggttaattccattcaatttcattcaatttaagtatatttgtaaggagctaaagctgaaaattaaattttagatctttcaatactcttaaattttatatgtaagtggtttttatattttcacatttgaaataaagtaatttttataatcttga

SEQ ID NO: 1892 - DNA, 4652 bp, Homo sapiens
  source 1..4652: mol_type = genomic DNA
ccagcgctgctccccgggcgctcctccccgggcgctcctccccaggcctcccgggcgcttggatcccggccatctccgcacccttcaagtgggtgtgggtgatttcctggcggggggagcagccaggtgagcccaagatgctgctgcgctcgaagcctgcgctgccgccgccgctgatgctgctgctcctggggccgctgggtcccctctcccctggcgccctgccccgacctgcgcaagcacaggacgtcgtggacctggacttcttcacccaggagccgctgcacctggtgagcccctcgttcctgtccgtcaccattgacgccaacctggccacggacccgcggttcctcatcctcctgggttctccaaagcttcgtaccttggccagaggcttgtctcctgcgtacctgaggtttggtggcaccaagacagacttcctaattttcgatcccaagaaggaatcaacctttgaagagagaagttactggcaatctcaagtcaaccaggatatttgcaaatatggatccatccctcctgatgtggaggagaagttacggttggaatggccctaccaggagcaattgctactccgagaacactaccagaaaaagttcaagaacagcacctactcaagaagctctgtagatgtgctatacacttttgcaaactgctcaggactggacttgatctttggcctaaatgcgttattaagaacagcagatttgcagtggaacagttctaatgctcagttgctcctggactactgctcttccaaggggtataacatttcttgggaactaggcaatgaacctaacagtttccttaagaaggctgatattttcatcaatgggtcgcagttaggagaagattttattcaattgcataaacttctaagaaagtccaccttcaaaaatgcaaaactctatggtcctgatgttggtcagcctcgaagaaagacggctaagatgctgaagagcttcctgaaggctggtggagaagtgattgattcagttacatggcatcactactatttgaatggacggactgctaccaaggaagattttctaaaccctgatgtattggacatttttatttcatctgtgcaaaaagttttccaggtggttgagagcaccaggcctggcaagaaggtctggttaggagaaacaagctctgcatatggaggcggagcgcccttgctatccgacacctttgcagctggctttatgtggctggataaattgggcctgtcagcccgaatgggaatagaagtggtgatgaggcaagtattctttggagcaggaaactaccatttagtggatgaaaacttcgatcctttacctgattattggctatctcttctgttcaagaaattggtgggcaccaaggtgttaatggcaagcgtgcaaggttcaaagagaaggaagcttcgagtataccttcattgcacaaacactgacaatccaaggtataaagaaggagatttaactctgtatgccataaacctccataatgtcaccaagtacttgcggttaccctatcctttttctaacaagcaagtggataaataccttctaagacctttgggacctcatggattactttccaaatctgtccaactcaatggtctaactctaaagatggtggatgatcaaaccttgccacctttaatggaaaaacctctccggccaggaagttcactgggcttgccagctttctcatatagtttttttgtgataagaaatgccaaagttgctgcttgcatctgaaaataaaatatactagtcctgacactgaatttttcaagtatactaagagtaaagcaactcaagttataggaaaggaagcagataccttgcaaagcaactagtgggtgcttgagagacactgggacactgtcagtgctagatttagcacagtattttgatctcgctaggtagaacactgctaataataatagctaataataccttgttccaaatactgcttagcattttgcatgttttacttttatctaaagttttgttttgttttattatttatttatttatttattttgagacagaatctctctctgtcacccaggctggagtgccatggtgcgatcttggctcactgcaactttaagcaattctcctgcctcagcttcctgagtagctgggattataggcgtgtgccaccacgcccagctactttctatattttttgtagagatggagtttcgccatattggccaagctggtctcgaactcctgtcctcgaactcctgtcctcaagtgatccacccgcctcagcctctcaaagtgctgggattacaggtgtgagccaccacacccagcagtgttttatttttgagacagggtatcattctgttgcccaggcttgagtgcagtggtgcaatcatagatcactgcagccttttaactcctgggctcaagtcatcctcctgcttagcctcccaagtagctaggaccacagacacatgccatcacacttggctatttttaaaaaattttttgtagagatggggtctcgctatgttacccaaactggtcctgaactcctggactcaattgatcctcccaccttggccttccaggtgctgggatttctttgggagtacagcatggtacagcaggagatcatttgatgttacctctgtgcagtgttgctagtcagcgaaagactataatacctgtggggacagcgattagccaccacaaccagtctttatttaaagttattaaaaatggctgggcgcagtggctcacacctgtaatcctagcactttgggaggccgaggcagatggatcacctgacgtgaggaatttgataccagcctggccaacatggtgaaaccccatctctactaaaaaatacaaaaattagctgggtgtggtcctgtagtcccagctacttgggaggctggggcaggagaattacttgaacccaggaggcagaggttgcagtgagccgagattgtgccactgcactccagcctgggtgacagagagagattccatctcaaaaaaacaagttattaaaaatgtatatgaatgctcctaatatggtcaggaagcaaggaagcgaaggatatattatgagttttaagaaggtgcttagctgtatatttatctttcaaaatgtattagaagattttagaattctttccttcatgtgccatctctacaggcacccatcagaaaaagcatactgccgttaccgtgaaactggttgtaaaagagaaactatctatttgcaccttaaaagacagctagattttgctgattttcttctttcggttttctttgtcagcaataatatgtgagaggacagattgttagatatgatagtataaaaaatggttaatgacaattcagaggcgaggagattctgtaaacttaaaattactataaatgaaattgatttgtcaagaggataaattttagaaaacacccaataccttataactgtctgttaatgcttgctttttctctacctttcttccttgtttcagttgggaagcttttggctgcaagtaacagaaactcctaattcaaatggcttaagcaataaggaaatgtatattcccacataactagacgttcaaacaggccaggctccagcacttcagtacgtcaccagggatctgggttcttcccagctctctgctctgccatctttagcgctggcttcattctcagactctggtagcatgatggctgtagctgtttcatgggccccttcaaacctcatagcaaccagaggaagaaaatgagccattttttgagtctccttcatagacttgaataactctttttcagagcttctcacagcaaacctctcctcatgtctcctcatgtcttattgttcagaaatgggtaatgtggccatttcaccagtcactgccaacaacaacgaggttcctataattgtctctgagtaaccctttggaatggagagggtgttggtcagtctacaaactgaacactgcagttctgcgctttttaccagtgaaaaaatgtaattattttcccctcttaaggattaatattcttcaaatgtatgcctgttatggatatagtatctttaaaattttttattttaatagctttaggggtacacactttttgcttacaggggtgaattgtgtagtggtgaagactcggcttttaatgtacttgtcacctgagtgatgtacattgtacccaataggtaatttttcatccattaccctccttccgccctcttcccttctgagtctccaacatcccttataccactgtgtatgttcttgtgtacctacagctaagcttccacttataagtgagaacatgcagtatttggttttccattcctgagttacttcccttaggataacagcccccagttccgtccaagttgctgcaaaatacattattcttctttatggctgagtaatagtccatggtacatatataccacattttctttatccacttatcagttgatggacacttaggttaattccattcaatttcattcaatttaagtatatttgtaaggagctaaagctgaaaattaaattttagatctttcaatactcttaaattttatatgtaagtggtttttatattttcacatttgaaataaagtaatttttataatcttga

SEQ ID NO: 1893 - DNA, 801 bp, Homo sapiens
  source 1..801: mol_type = genomic DNA
atgctgctgctcctggggccgctgggtcccctctcccctggcgccctgccccgacctgcgcaagcacaggacgtcgtggacctggacttcttcacccaggagccgctgcacctggtgagcccctcgttcctgtccgtcaccaggcctggcaagaaggtctggttaggagaaacaagctctgcatatggaggcggagcgcccttgctatccgacacctttgcagctggctttatgtggctggataaattgggcctgtcagcccgaatgggaatagaagtggtgatgaggcaagtattctttggagcaggaaactaccatttagtggatgaaaacttcgatcctttacctgattattggctatctcttctgttcaagaaattggtgggcaccaaggtgttaatggcaagcgtgcaaggttcaaagagaaggaagcttcgagtataccttcattgcacaaacactgacaatccaaggtataaagaaggagatttaactctgtatgccataaacctccataatgtcaccaagtacttgcggttaccctatcctttttctaacaagcaagtggataaataccttctaagacctttgggacctcatggattactttccaaatctgtccaactcaatggtctaactctaaagatggtggatgatcaaaccttgccacctttaatggaaaaacctctccggccaggaagttcactgggcttgccagctttctcatatagtttttttgtgataagaaatgccaaagttgctgcttgcatctgaaaataaaatatactagtcctgacactg

SEQ ID NO: 1894 - DNA, 1571 bp, Homo sapiens
  source 1..1571: mol_type = genomic DNA
ccagcgctgctccccgggcgctcctccccgggcgctcctccccaggcctcccgggcgcttggatcccggccatctccgcacccttcaagtgggtgtgggtgatttcctggcggggggagcagccaggtgagcccaagatgctgctgcgctcgaagcctgcgctgccgccgccgctgatgctgctgctcctggggccgctgggtcccctctcccctggcgccctgccccgacctgcgcaagcacaggacgtcgtggacctggacttcttcacccaggagccgctgcacctggtgagcccctcgttcctgtccgtcaccattgacgccaacctggccacggacccgcggttcctcatcctcctgggttctccaaagcttcgtaccttggccagaggcttgtctcctgcgtacctgaggtttggtggcaccaagacagacttcctaattttcgatcccaagaaggaatcaacctttgaagagagaagttactggcaatctcaagtcaaccaggatatttgcaaatatggatccatccctcctgatgtggaggagaagttacggttggaatggccctaccaggagcaattgctactccgagaacactaccagaaaaagttcaagaacagcacctactcaagaagctctgtagatgtgctatacacttttgcaaactgctcaggactggacttgatctttggcctaaatgcgttattaagaacagcagatttgcagtggaacagttctaatgctcagttgctcctggactactgctcttccaaggggtataacatttcttgggaactaggcaatgaacctaacagtttccttaagaaggctgatattttcatcaatgggtcgcagttaggagaagattttattcaattgcataaacttctaagaaagtccaccttcaaaaatgcaaaactctatggtcctgatgttggtcagcctcgaagaaagacggctaagatgctgaagagcttcctgaaggctggtggagaagtgattgattcagttacatggcatcactactatttgaatggacggactgctaccaaggaagattttctaaaccctgatgtattggacatttttatttcatctgtgcaaaaagttttccaggattattggctatctcttctgttcaagaaattggtgggcaccaaggtgttaatggcaagcgtgcaaggttcaaagagaaggaagcttcgagtataccttcattgcacaaacactgacaatccaaggtataaagaaggagatttaactctgtatgccataaacctccataatgtcaccaagtacttgcggttaccctatcctttttctaacaagcaagtggataaataccttctaagacctttgggacctcatggattactttccaaatctgtccaactcaatggtctaactctaaagatggtggatgatcaaaccttgccacctttaatggaaaaacctctccggccaggaagttcactgggcttgccagctttctcatatagtttttttgtgataagaaatgccaaagttgctgcttgcatctgaaaataaaatatactagtcctgaca

SEQ ID NO: 1895 - DNA, 1458 bp, Homo sapiens
  source 1..1458: mol_type = genomic DNA
atgctgctgcgctcgaagcctgcgctgccgccgccgctgatgctgctgctcctggggccgctgggtcccctctcccctggcgccctgccccgacctgcgcaagcacaggacgtcgtggacctggacttcttcacccaggagccgctgcacctggtgagcccctcgttcctgtccgtcaccattgacgccaacctggccacggacccgcggttcctcatcctcctgggttctccaaagcttcgtaccttggccagaggcttgtctcctgcgtacctgaggtttggtggcaccaagacagacttcctaattttcgatcccaagaaggaatcaacctttgaagagagaagttactggcaatctcaagtcaaccaggatatttgcaaatatggatccatccctcctgatgtggaggagaagttacggttggaatggccctaccaggagcaattgctactccgagaacactaccagaaaaagttcaagaacagcacctactcaaaacctaacagtttccttaagaaggctgatattttcatcaatgggtcgcagttaggagaagattttattcaattgcataaacttctaagaaagtccaccttcaaaaatgcaaaactctatggtcctgatgttggtcagcctcgaagaaagacggctaagatgctgaagagcttcctgaaggctggtggagaagtgattgattcagttacatggcatcactactatttgaatggacggactgctaccaaggaagattttctaaaccctgatgtattggacatttttatttcatctgtgcaaaaagttttccaggtggttgagagcaccaggcctggcaagaaggtctggttaggagaaacaagctctgcatatggaggcggagcgcccttgctatccgacacctttgcagctggctttatgtggctggataaattgggcctgtcagcccgaatgggaatagaagtggtgatgaggcaagtattctttggagcaggaaactaccatttagtggatgaaaacttcgatcctttacctgattattggctatctcttctgttcaagaaattggtgggcaccaaggtgttaatggcaagcgtgcaaggttcaaagagaaggaagcttcgagtataccttcattgcacaaacactgacaatccaaggtataaagaaggagatttaactctgtatgccataaacctccataatgtcaccaagtacttgcggttaccctatcctttttctaacaagcaagtggataaataccttctaagacctttgggacctcatggattactttccaaatctgtccaactcaatggtctaactctaaagatggtggatgatcaaaccttgccacctttaatggaaaaacctctccggccaggaagttcactgggcttgccagctttctcatatagtttttttgtgataagaaatgccaaagttgctgcttgcatctga

SEQ ID NO: 1896 - DNA, 3664 bp, Homo sapiens
  source 1..3664: mol_type = genomic DNA
agtagcagcagcgccgggtcccgtgcggaggtgctcctcgcagagttgtttctcgagcagcggcagttctcactacagcgccaggacgagtccggttcgtgttcgtccgcggagatctctctcatctcgctcggctgcgggaaatcgggctgaagcgactgagtccgcgatggagaaaactttagaaactgttcctttggagaggaaaaagagagaaaaggaacagttccgtaagctctttattggtggcttaagctttgaaaccacagaagaaagtttgaggaactactacgaacaatggggaaagcttacagactgtgtggtaatgagggatcctgcaagcaaaagatcaagaggatttggttttgtaactttttcatccatggctgaggttgatgctgccatggctgcaagacctcattcaattgatgggagagtagttgagccaaaacgtgctgtagcaagagaggaatctggaaaaccaggggctcatgtaactgtgaagaagctgtttgttggcggaattaaagaagatactgaggaacatcaccttagagattactttgaggaatatggaaaaattgataccattgagataattactgataggcagtctggaaagaaaagaggctttggctttgttacttttgatgaccatgatcctgtggataaaatcgtattgcagaaataccataccatcaatggtcataatgcagaagtaagaaaggctttgtctagacaagaaatgcaggaagttcagagttctaggagtggaagaggaggcaactttggctttggggattcacgtggtggcggtggaaatttcggaccaggaccaggaagtaactttagaggaggatctgatggatatggcagtggacgtggatttggggatggctataatgggtatggaggaggacctggaggtggcaattttggaggtagccccggttatggaggaggaagaggaggatatggtggtggaggacctggatatggcaaccagggtgggggctacggaggtggttatgacaactatggaggaggaaattatggaagtggaaattacaatgattttggaaattataaccagcaaccttctaactacggtccaatgaagagtggaaactttggtggtagcaggaacatggggggaccatatggtggaggaaactatggtccaggaggcagtggaggaagtgggggttatggtgggaggagccgatactgagcttcttcctatttgccatgggcttcactgtataaataggagaggatgagagcccagaggtaacagaacagcttcaggttatcgaaataacaatgttaaggaaactcttatctcagtcatgcataaatatgcagtgatatggcagaagacaccagagcagatgcagagagccattttgtgaatggattggattatttaataacattaccttactgtggaggaaggattgtaaaaaaaaatgcctttgagacagtttcttagctttttaattgttgtttctttctagtggtctttgtaagagtgtagaagcattccttctttgataatgttaaatttgtaagtttcaggtgacatgtgaaaccttttttaagatttttctcaaagttttgaaaagctattagccaggatcatggtgtaataagacataacgtttttcctttaaaaaaatttaagtgcgtgtgtagagttaagaagctgttgtacatttatgatttaataaaataattctaaaggaaattgtgtaattatagactttttattttaaataagttaaggagtgggtagtataattaaggtccgttgcaaagctgttgttatatttgtataagataaatgctggtcagatgtaagtgtgttgtctgcaattcatcaggattaaattatgtagataacttaagggatatctctgcaaggagaaacacctttttagatcttttagatgctgcttcttcaatgcaaggaaaggaaataaccccagcgaggtactcttcagggacacaggtctagtacaagagaactcttgacggctactaagttcagccagtcttaaaaaactgtgctgtttctacaaaactttaactacagtagtttataaggatgccaacgaaagctgagggtgtagagcaaaatagttctaagcttcagttaaacttctttaggtaagatcttatttacttttcctttcttaattttcctccctaaaagataaactaatactcttaaatggtctttcagtatagtggttcttacgtagtttaacatagctataaattgagtttaacaatttataaactcaagagaataatttttataaaccctgttttccaatctgtcatttacttaaattattttggttgtttttccctttttttccttcttttcccaccccctccccctccatgtgaagatttgggtgcttaacatatcatttttttccctgccggaattttagcattgatatgaaccatggacaagtatattctgctgccacaaagactgtaaagtgcttcatttcaacagctgaggcaagccaagtgatcattaataaagcttttcttggttccttcagtggtgttggtagtaaaatggtaggtaaaagttaggctgcaagttcaataaatcatgagatttcccatcgttacacccttgtgtattcacatttcttggatcaaacattttgagtgaactaggggtttttattaaagacatttgttgtatttatggttgtaactgtacatgcttatcaggatgagactgaaagaaggtagggcaaaaatggttgaatctattttcagatagtagttcatacttgagtgaagtgtcttgtctgcattatgaagcctggtatgtatccagtactaaataggtgggttaaatgtggtaattctagttcagtgtcttaccctgaagagaaagttgtaggttggctgttgaaattcattccttagatatgatcagtttgattgcccggctttattgcctttacaggaatgtgatactcagggcttactctatacaccaatgagtcttctttgatcctaagaccaccactgaagttgtttaggttcttttggacaaacatgataaacttcttcagatactttttttttcctttggcaggaaggtgtcttgctgcaggtaactaatgaagaagtggtcaaccacagagtcttcaagaaataagaaattctgtaccatctgaaagtagttcttgttggtgccttcatttaaaaagcactctttaaaataaaagggaaatgttttctgataaaacaaacatttagttgaggttcttgatataaaacaattacaaaatgagtgttgtttgtaaaacagtaacatcaaattggctagagagataaatgtatcatgttttaaattaggttttgtgagtagacagattacaattctattttaaatataaagtttataaaataaatactttttgtatccaaatacttggtgtaatgtttacacataaaatgtgtgaatcttgttctataaatatttggttgtctaaaagatcaccatcccctaaatttttaaaagcagtttcacaaagctatgcatattttaatattaacaggtaaatgagaagagcattgtggacattattggctgtccccaataaaatgctgttcattatgcactgta

SEQ ID NO: 1897 - DNA, 1711 bp, Homo sapiens
  source 1..1711: mol_type = genomic DNA
agtagcagcagcgccgggtcccgtgcggaggtgctcctcgcagagttgtttctcgagcagcggcagttctcactacagcgccaggacgagtccggttcgtgttcgtccgcggagatctctctcatctcgctcggctgcgggaaatcgggctgaagcgactgagtccgcgatggagagagaaaaggaacagttccgtaagctctttattggtggcttaagctttgaaaccacagaagaaagtttgaggaactactacgaacaatggggaaagcttacagactgtgtggtaatgagggatcctgcaagcaaaagatcaagaggatttggttttgtaactttttcatccatggctgaggttgatgctgccatggctgcaagacctcattcaattgatgggagagtagttgagccaaaacgtgctgtagcaagagaggaatctggaaaaccaggggctcatgtaactgtgaagaagctgtttgttggcggaattaaagaagatactgaggaacatcaccttagagattactttgaggaatatggaaaaattgataccattgagataattactgataggcagtctggaaagaaaagaggctttggctttgttacttttgatgaccatgatcctgtggataaaatcgtattgcagaaataccataccatcaatggtcataatgcagaagtaagaaaggctttgtctagacaagaaatgcaggaagttcagagttctaggagtggaagaggaggcaactttggctttggggattcacgtggtggcggtggaaatttcggaccaggaccaggaagtaactttagaggaggatctgatggatatggcagtggacgtggatttggggatggctataatgggtatggaggaggacctggaggtggcaattttggaggtagccccggttatggaggaggaagaggaggatatggtggtggaggacctggatatggcaaccagggtgggggctacggaggtggttatgacaactatggaggaggaaattatggaagtggaaattacaatgattttggaaattataaccagcaaccttctaactacggtccaatgaagagtggaaactttggtggtagcaggaacatggggggaccatatggtggaggaaactatggtccaggaggcagtggaggaagtgggggttatggtgggaggagccgatactgagcttcttcctatttgccatgggcttcactgtataaataggagaggatgagagcccagaggtaacagaacagcttcaggttatcgaaataacaatgttaaggaaactcttatctcagtcatgcataaatatgcagtgatatggcagaagacaccagagcagatgcagagagccattttgtgaatggattggattatttaataacattaccttactgtggaggaaggattgtaaaaaaaaatgcctttgagacagtttcttagctttttaattgttgtttctttctagtggtctttgtaagagtgtagaagcattccttctttgataatgttaaatttgtaagtttcaggtgacatgtgaaaccttttttaagatttttctcaaagttttgaaaagctattagccaggatcatggtgtaataagacataacgtttttcctttaaaaaaatttaagtgcgtgtgtagagttaagaagctgttgtacatttatgatttaataaaataattctaaaggaaa

SEQ ID NO: 1898 - DNA, 1724 bp, Homo sapiens
  source 1..1724: mol_type = genomic DNA
agtagcagcagcgccgggtcccgtgcggaggtgctcctcgcagagttgtttctcgagcagcggcagttctcactacagcgccaggacgagtccggttcgtgttcgtccgcggagatctctctcatctcgctcggctgcgggaaatcgggctgaagcgactgagtccgcgatggagaaaactttagaaactgttcctttggagaggaaaaagagagaaaaggaacagttccgtaagctctttattggtggcttaagctttgaaaccacagaagaaagtttgaggaactactacgaacaatggggaaagcttacagactgtgtggtaatgagggatcctgcaagcaaaagatcaagaggatttggttttgtaactttttcatccatggctgaggttgatgctgccatggctgcaagacctcattcaattgatgggagagtagttgagccaaaacgtgctgtagcaagagaggaatctggaaaaccaggggctcatgtaactgtgaagaagctgtttgttggcggaattaaagaagatactgaggaacatcaccttagagattactttgaggaatatggaaaaattgataccattgagataattactgataggcagtctggaaagaaaagaggctttggctttgttacttttgatgaccatgatcctgtggataaaatcgtattgcagaaataccataccatcaatggtcataatgcagaagtaagaaaggctttgtctagacaagaaatgcaggaagttcagagttctaggagtggaagaggaggcaactttggctttggggattcacgtggtggcggtggaaatttcggaccaggaccaggaagtaactttagaggaggatctgatggatatggcagtggacgtggatttggggatggctataatgggtatggaggaggacctggaggtggcaattttggaggtagccccggttatggaggaggaagaggaggatatggtggtggaggacctggatatggcaaccagggtgggggctacggaggtggttatgacaactatggaggaggaaattatggaagtggaaattacaatgattttggaaattataaccagcaaccttctaactacggtccaatgaagagtggaaactttggtggtagcaggaacatggggggaccatatggtggaggaaactatggtccaggaggcagtggaggaagtgggggttatggtgggaggagccgatactgagcttcttcctatttgccatggcattgatatgaaccatggacaagtatattctgctgccacaaagactgtaaagtgcttcatttcaacagctgaggcaagccaagtgatcattaataaagcttttcttggttccttcagtggtgttggtagtaaaatggaaggtgtcttgctgcaggtaactaatgaagaagtggtcaaccacagagtcttcaagaaataagaaattctgtaccatctgaaagtagttcttgttggtgccttcatttaaaaagcactctttaaaataaaagggaaatgttttctgataaaacaaacatttagttgaggttcttgatataaaacaattacaaaatgagtgttgtttgtaaaacagtaacatcaaattggctagagagataaatgtatcatgttttaaattaggttttgtgagtagacagattacaattctattttaaatataaagtttataaaataaatactttttgtatccaaa

SEQ ID NO: 1899 - DNA, 1523 bp, Homo sapiens
  source 1..1523: mol_type = genomic DNA
gtgcggaggtgctcctcgcagagttgtttctcgagcagcggcagttctcactacagcgccaggacgagtccggttcgtgttcgtccgcggagatctctctcatctcgctcggctgcgggaaatcgggctgaagcgactgagtccgcgatggagagagaaaaggaacagttccgtaagctctttattggtggcttaagctttgaaaccacagaagaaagtttgaggaactactacgaacaatggggaaagcttacagactgtgtggtaatgagggatcctgcaagcaaaagatcaagaggatttggttttgtaactttttcatccatggctgaggttgatgctgccatggctgcaagacctcattcaattgatgggagagtagttgagccaaaacgtgctgtagcaagagaggaatctggaaaaccaggggctcatgtaactgtgaagaagctgtttgttggcggaattaaagaagatactgaggaacatcaccttagagattactttgaggaatatggaaaaattgataccattgagataattactgataggcagtctggaaagaaaagaggctttggctttgttacttttgatgaccatgatcctgtggataaaatcgtattgcagaaataccataccatcaatggtcataatgcagaagtaagaaaggctttgtctagacaagaaatgcaggaggacctggaggtggcaattttggaggtagccccggttatggaggaggaagaggaggatatggtggtggaggacctggatatggcaaccagggtgggggctacggaggtggttatgacaactatggaggaggaaattatggaagtggaaattacaatgattttggaaattataaccagcaaccttctaactacggtccaatgaagagtggaaactttggtggtagcaggaacatggggggaccatatggtggaggaaactatggtccaggaggcagtggaggaagtgggggttatggtgggaggagccgatactgagcttcttcctatttgccatgggcttcactgtataaataggagaggatgagagcccagaggtaacagaacagcttcaggttatcgaaataacaatgttaaggaaactcttatctcagtcatgcataaatatgcagtgatatggcagaagacaccagagcagatgcagagagccattttgtgaatggattggattatttaataacattaccttactgtggaggaaggattgtaaaaaaaaatgcctttgagacagtttcttagctttttaattgttgtttctttctagtggtctttgtaagagtgtagaagcattccttctttgataatgttaaatttgtaagtttcaggtgacatgtgaaaccttttttaagatttttctcaaagttttgaaaagctattagccaggatcatggtgtaataagacataacgtttttcctttaaaaaaatttaagtgcgtgtgtagagttaagaagctgttgtacatttatgatttaataaaataattctaaagg

SEQ ID NO: 1900 - DNA, 1197 bp, Homo sapiens
  source 1..1197: mol_type = genomic DNA
atgtcggaggagcagttcggcggggacggggcggcgggcaacggcggcggtaggcgggcgggcgagcaggagggagccatggtggcggcgacacagggggcagcggcgcgggaagcggagccgggaccgggggcggaaccgcgtctggaggcaccgaagggggccgagtcggagggggcgaagattgacgccagtaagaacgaggaggatgaagggaaaatgtttataggaggccttagctgggacactacaaagaaagatctgaaggactacttttccaaatttggtgaagttgtagactgcactctgaagttagatcctatcacagggcgatcaaggggttttggctttgtgctatttaaagaatcggagagtgtagataaggtcatggatcaaaaagaacataaattgaatgggaaggtgattgatcctaaaagggccaaagccatgaaaacaaaagagccggttaaaaaaatttttgttggtggcctttctccagatacacctgaagagaaaataagggagtactttggtggttttggtgaggtggaatccatagagctccccatggacaacaagaccaataagaggcgtgggttctgctttattacctttaaggaagaagaaccagtgaagaagataatggaaaagaaataccacaatgttggtcttagtaaatgtgaaataaaagtagccatgtcgaaggaacaatatcagcaacagcaacagtggggatctagaggaggatttgcaggaagagctcgtggaagaggtggtgaccagcagagtggttatgggaaggtatccaggcgaggtggtcatcaaaatagctacaaaccatactaaattattccatttgcaacttatccccaacaggtggtgaagcagtattttccaatttgaagattcatttgaaggtggctcctgccacctgctaatagcagttcaaactaaattttttgtatcaagtccctgaatggaagtatgacgttgggtccctctgaagtttaattctgagttctcattaaaagaaatttgctttcattgttttatttcttaattgctatgcttcagaatcaatttgtgttttatgccctttcccccagtattgtagagcaagtcttgtgttaaaagcccagtgtgacagtgtcatgatgtagtagtgtcttactggttttttaataaatccttttgtat

SEQ ID NO: 1901 - DNA, 3033 bp, Homo sapiens
  source 1..3033: mol_type = genomic DNA
aaagcgaggaggaggcgagagcggccgccgctggtgcttattcttttttagtgcagcgggagagagcgggagtgtgcgccgcgcgagagtgggaggcgaagggggcaggccagggagaggcgcaggagcctttgcagccacgcgcgcgccttccctgtcttgtgtgcttcgcgaggtagagcgggcgcgcggcagcggcggggattactttgctgctagtttcggttcgcggcagcggcgggtgtagtctcggcggcagcggcggagacactagcactatgtcggaggagcagttcggcggggacggggcggcggcagcggcaacggcggcggtaggcggctcggcgggcgagcaggagggagccatggtggcggcgacacagggggcagcggcggcggcgggaagcggagccgggaccgggggcggaaccgcgtctggaggcaccgaagggggcagcgccgagtcggagggggcgaagattgacgccagtaagaacgaggaggatgaaggccattcaaactcctccccacgacactctgaagcagcgacggcacagcgggaagaatggaaaatgtttataggaggccttagctgggacactacaaagaaagatctgaaggactacttttccaaatttggtgaagttgtagactgcactctgaagttagatcctatcacagggcgatcaaggggttttggctttgtgctatttaaagaatcggagagtgtagataaggtcatggatcaaaaagaacataaattgaatgggaaggtgattgatcctaaaagggccaaagccatgaaaacaaaagagccggttaaaaaaatttttgttggtggcctttctccagatacacctgaagagaaaataagggagtactttggtggttttggtgaggtggaatccatagagctccccatggacaacaagaccaataagaggcgtgggttctgctttattacctttaaggaagaagaaccagtgaagaagataatggaaaagaaataccacaatgttggtcttagtaaatgtgaaataaaagtagccatgtcgaaggaacaatatcagcaacagcaacagtggggatctagaggaggatttgcaggaagagctcgtggaagaggtggtggccccagtcaaaactggaaccagggatatagtaactattggaatcaaggctatggcaactatggatataacagccaaggttacggtggttatggaggatatgactacactggttacaacaactactatggatatggtgattatagcaaccagcagagtggttatgggaaggtatccaggcgaggtggtcatcaaaatagctacaaaccatactaaattattccatttgcaacttatccccaacaggtggtgaagcagtattttccaatttgaagattcatttgaaggtggctcctgccacctgctaatagcagttcaaactaaattttttgtatcaagtccctgaatggaagtatgacgttgggtccctctgaagtttaattctgagttctcattaaaagaaatttgctttcattgttttatttcttaattgctatgcttcagaatcaatttgtgttttatgccctttcccccagtattgtagagcaagtcttgtgttaaaagcccagtgtgacagtgtcatgatgtagtagtgtcttactggttttttaataaatccttttgtataaaaatgtattggctcttttatcatcagaataggaaaaattgtcatggattcaagttattaaaagcataagtttggaagacaggcttgccgaaattgaggacatgattaaaattgcagtgaagtttgaaatgtttttagcaaaatctaatttttgccataatgtgtcctccctgtccaaattgggaatgacttaatgtcaatttgtttgttggttgttttaataatacttccttatgtagccattaagatttatatgaatattttcccaaatgcccagtttttgcttaatatgtattgtgctttttagaacaaatctggataaatgtgcaaaagtacccctttgcacagatagttaatgttttatgcttccattaaataaaaaggacttaaaatctgttaattataatagaaatgcggctagttcagagagatttttagagctgtggtggacttcatagatgaattcaagtgttgagggaggattaaagaaatatataccgtgtttatgtgtgtgtgcttatttgtttgaatgattttattttccatttctcaaaggttttatttttttggttagggccttaaaatttcaggactgtgattattagtatgtgtgcctaaggaactttttgagtcactcttaagaaagtgaaactgaagagtctaagtgataactataggattaagtcagaattgtttttcctgtcatttgttggaagcttcttgagttctgttattagcattcagggaattgatacccatcaacttgaatggaaaatcgtttgtaggtattacttaagtgaatgttaagagttccaccctgagtggtaatctaaggctgtgcagtcagttacttcagactgctcagaatagttcattagaaaggtaacaaatgagaaatgtattattatacagttctatagtagtgaagtgatggaatacctttcttacttttgtggagttacatctgatgctaagaatttgacctccaactaagcaaacattttaatgagcaaaagttagtgttattaaagtttttttatgatagatccaaattgaggacctgtgtcctgtttttataagattgcaacccagctatgctcatttgtttatgttttgtatatggctgcttttgtgttacagtggtagagtttagtagttaggacagagacctgcaaagcaaaataatttacagtctggccctttacagaaaagtttgctgactcatggtcaaaataaatgaaaattttttgtgttagggttgttaagctagggttctttttggtatcatatgcttattttatgtaaatctctcaataaaaaattatttttaagaga

SEQ ID NO: 1902 - DNA, 1667 bp, Homo sapiens
  source 1..1667: mol_type = genomic DNA
ttttaggtggtccgcggcggcgccattaaagcgaggaggaggcgagagcggccgccgctggtgcttattcttttttagtgcagcgggagagagcgggagtgtgcgccgcgcgagagtgggaggcgaagggggcaggccagggagaggcgcaggagcctttgcagccacgcgcgcgccttccctgtcttgtgtgcttcgcgaggtagagcgggcgcgcggcagcggcggggattactttgctgctagtttcggttcgcggcagcggcgggtgtagtctcggcggcagcggcggagacactagcactatgtcggaggagcagttcggcggggacggggcggcggcagcggcaacggcggcggtaggcggctcggcgggcgagcaggagggagccatggtggcggcgacacagggggcagcggcggcggcgggaagcggagccgggaccgggggcggaaccgcgtctggaggcaccgaagggggcagcgccgagtcggagggggcgaagattgacgccagtaagaacgaggaggatgaagggaaaatgtttataggaggccttagctgggacactacaaagaaagatctgaaggactacttttccaaatttggtgaagttgtagactgcactctgaagttagatcctatcacagggcgatcaaggggttttggctttgtgctatttaaagaatcggagagtgtagataaggtcatggatcaaaaagaacataaattgaatgggaaggtgattgatcctaaaagggccaaagccatgaaaacaaaagagccggttaaaaaaatttttgttggtggcctttctccagatacacctgaagagaaaataagggagtactttggtggttttggtgaggtggaatccatagagctccccatggacaacaagaccaataagaggcgtgggttctgctttattacctttaaggaagaagaaccagtgaagaagataatggaaaagaaataccacaatgttggtcttagtaaatgtgaaataaaagtagccatgtcgaaggaacaatatcagcaacagcaacagtggggatctagaggaggatttgcaggaagagctcgtggaagaggtggtggccccagtcaaaactggaaccagggatatagtaactattggaatcaaggctatggcaactatggatataacagccaaggttacggtggttatggaggatatgactacactggttacaacaactactatggatatggtgattatagcaaccagcagagtggttatgggaaggtatccaggcgaggtggtcatcaaaatagctacaaaccatactaaattattccatttgcaacttatccccaacaggtggtgaagcagtattttccaatttgaagattcatttgaaggtggctcctgccacctgctaatagcagttcaaactaaattttttgtatcaagtccctgaatggaagtatgacgttgggtccctctgaagtttaattctgagttctcattaaaagaaatttgctttcattgttttatttcttaattgctatgcttcagaatcaatttgtgttttatgccctttcccccagtattgtagagcaagtcttgtgttaaaagcccagtgtgacagtgtcatgatgtagtagtgtcttactggttttttaataaatccttttgtat

SEQ ID NO: 1903 - DNA, 1585 bp, Homo sapiens
  source 1..1585: mol_type = genomic DNA
ccattttaggtggtccgcggcggcgccattaaagcgaggaggaggcgagagcggccgccgctggtgcttattcttttttagtgcagcgggagagagcgggagtgtgcgccgcgcgagagtgggaggcgaagggggcaggccagggagaggcgcaggagcctttgcagccacgcgcgcgccttccctgtcttgtgtgcttcgcgaggtagagcgggcgcgcggcagcggcggggattactttgctgctagtttcggttcgcggcagcggcgggtgtagtctcggcggcagcggcggagacactagcactatgtcggaggagcagttcggcggggacggggcggcggcagcggcaacggcggcggtaggcggctcggcgggcgagcaggagggagccatggtggcggcgacacagggggcagcggcggcggcgggaagcggagccgggaccgggggcggaaccgcgtctggaggcaccgaagggggcagcgccgagtcggagggggcgaagattgacgccagtaagaacgaggaggatgaaggccattcaaactcctccccacgacactctgaagcagcgacggcacagcgggaagaatggaaaatgtttataggaggccttagctgggacactacaaagaaagatctgaaggactacttttccaaatttggtgaagttgtagactgcactctgaagttagatcctatcacagggcgatcaaggggttttggctttgtgctatttaaagaatcggagagtgtagataaggtcatggatcaaaaagaacataaattgaatgggaaggtgattgatcctaaaagggccaaagccatgaaaacaaaagagccggttaaaaaaatttttgttggtggcctttctccagatacacctgaagagaaaataagggagtactttggtggttttggtgaggtggaatccatagagctccccatggacaacaagaccaataagaggcgtgggttctgctttattacctttaaggaagaagaaccagtgaagaagataatggaaaagaaataccacaatgttggtcttagtaaatgtgaaataaaagtagccatgtcgaaggaacaatatcagcaacagcaacagtggggatctagaggaggatttgcaggaagagctcgtggaagaggtggtgaccagcagagtggttatgggaaggtatccaggcgaggtggtcatcaaaatagctacaaaccatactaaattattccatttgcaacttatccccaacaggtggtgaagcagtattttccaatttgaagattcatttgaaggtggctcctgccacctgctaatagcagttcaaactaaattttttgtatcaagtccctgaatggaagtatgacgttgggtccctctgaagtttaattctgagttctcattaaaagaaatttgctttcattgttttatttcttaattgctatgcttcagaatcaatttgtgttttatgccctttcccccagtattgtagagcaagtcttgtgttaaaagcccagtgtgacagtgtcatgatgtagtagtgtcttactggttttttaataaatccttttgtataaaaa

SEQ ID NO: 1904 - DNA, 607 bp, Homo sapiens
  source 1..607: mol_type = genomic DNA
ttaaaggcccccaaggctgtgcaacgcggagcgtgagaggaagagcgggcgcgcggcagcggcggggattactttgctgctagtttcggttcgcggcagcggcgggtgtagtctcggcggcagcggcggagacactagcactatgtcggaggagcagttcggcggggacggggcggcggcagcggcaacggcggcggtaggcggctcggcgggcgagcaggagggagccatggtggcggcgacacagggggcagcggcggcggcgggaagcggagccgggaccgggggcggaaccgcgtctggaggcaccgaagggggcagcgccgagtcggagggggcgaagattgacgccagtaagaacgaggaggatgaagggaaaatgtttataggaggccttagctgggacactacaaagaaagatctgaaggactacttttccaaatttggtgaagttgtagactgcactctgaagttagatcctatcacagggcgatcaaggggttttggctttgtgctatttaaagaatcggagagtgtagataaggtcatggatcaaaaagaacataaattgaatgggaaggtgattgatcctaaaagggccaaagcc

SEQ ID NO: 1905 - DNA, 748 bp, Homo sapiens
  source 1..748: mol_type = genomic DNA
tgtgcaacgcggagcgtgagaggaagtttcggttcgcggcagcggcgggtgtagtctcggcggcagcggcggagacactagcactatgtcggaggagcagttcggcggggacggggcggcggcagcggcaacggcggcggtaggcggctcggcgggcgagcaggagggagccatggtggcggcgacacagggggcagcggcggcggcgggaagcggagccgggaccgggggcggaaccgcgtctggaggcaccgaagggggcagcgccgagtcggagggggcgaagattgacgccagtaagaacgaggaggatgaaggccattcaaactcctccccacgacactctgaagcagcgacggcacagcgggaagaatggaaaatgtttataggaggccttagctgggacactacaaagaaagatctgaaggactacttttccaaatttggtgaagttgtagactgcactctgaagttagatcctatcacagggcgatcaaggggttttggctttgtgctatttaaagaatcggagagtgtagataaggtcatggatcaaaaagaacataaattgaatgggaaggtgattgatcctaaaagggccaaagccatgaaaacaaaagagccggttaaaaaaatttttgttggtggcctttctccagatacacctgaagagaaaataagggagtactttggtggttttggtgaggtggaatccatagagctccccatggacaacaagaccaataag

SEQ ID NO: 1906 - DNA, 1089 bp, Homo sapiens
  source 1..1089: mol_type = genomic DNA
gaaaatgtttataggaggccttagctgggacactacaaagaaagatctgaaggactacttttccaaatttggtgaagttgtagactgcactctgaagttagatcctatcacagggcgatcaaggggttttggctttgtgctatttaaagaatcggagagtgtagataaggtcatggatcaaaaagaacataaattgaatgggaaggtgattgatcctaaaagggccaaagccatgaaaacaaaagagccggttaaaaaaatttttgttggtggcctttctccagatacacctgaagagaaaataagggagtactttggtggttttggtgaggtggaatccatagagctccccatggacaacaagaccaataagaggcgtgggttctgctttattacctttaaggaagaagaaccagtgaagaagataatggaaaagaaataccacaatgttggtcttagtaaatgtgaaataaaagtagccatgtcgaaggaacaatatcagcaacagcaacagtggggatctagaggaggatttgcaggaagagctcgtggaagaggtggtgaccagcagagtggttatgggaaggtatccaggcgaggtggtcatcaaaatagctacaaaccatactaaattattccatttgcaacttatccccaacagcgggaacttcattgcaggccctgtgtcgcgctgacttcacgattctcacaggcccgctcaatgcggacagggtacgagatgctcacgctctcgaatgctgccgtttggtggtgaagcagtattttccaatttgaagattcatttgaaggtggctcctgccacctgctaatagcagttcaaactaaattttttgtatcaagtccctgaatggaagtatgacgttgggtccctctgaagtttaattctgagttctcattaaaagaaatttgctttcattgttttatttcttaattgctatgcttcagaatcaatttgtgttttatgccctttcccccagtattgtagagcaagtcttgtgttaaaagcccagtgtgacagtgtcatgatgtagtagtgtcttactggttttttaataaatccttttgtat

SEQ ID NO: 1907 - DNA, 1411 bp, Homo sapiens
  source 1..1411: mol_type = genomic DNA
gtcggccattttaggtggtccgcggcggcgccattaaagcgaggaggaggcgagagcggccgccgctggtgcttattcttttttagtgcagcgggagagagcgggagtgtgcgccgcgcgagagtgggaggcgaagggggcaggccagggagaggcgcaggagcctttgcagccacgcgcgcgccttccctgtcttgtgtgcttcgcgaggtagagcgggcgcgcggcagcggcggggattactttgctgctagtttcggttcgcggcagcggcgggtgtagtctcggcggcagcggcggagacactagcactatgtcggaggagcagttcggcggggacggggcggcggcagcggcaacggcggcggtaggcggctcggcgggcgagcaggagggagccatggtggcggcgacacagggggcagcggcggcggcgggaagcggagccgggaccgggggcggaaccgcgtctggaggcaccgaagggggcagcgccgagtcggagggggcgaagattgacgccagtaagaacgaggaggatgaagggtcatggatcaaaaagaacataaattgaatgggaaggtgattgatcctaaaagggccaaagccatgaaaacaaaagagccggttaaaaaaatttttgttggtggcctttctccagatacacctgaagagaaaataagggagtactttggtggttttggtgaggtggaatccatagagctccccatggacaacaagaccaataagaggcgtgggttctgctttattacctttaaggaagaagaaccagtgaagaagataatggaaaagaaataccacaatgttggtcttagtaaatgtgaaataaaagtagccatgtcgaaggaacaatatcagcaacagcaacagtggggatctagaggaggatttgcaggaagagctcgtggaagaggtggtggccccagtcaaaactggaaccagggatatagtaactattggaatcaaggctatggcaactatggatataacagccaaggttacggtggttatggaggatatgactacactggttacaacaactactatggatatggtgattatagcaaccagcagagtggttatgggaaggtatccaggcgaggtggtcatcaaaatagctacaaaccatactaaattattccatttgcaacttatccccaacaggtatgttctaaaaatagtttttttttgtcatttacaatagtagtttttataatctatattgttcataaaacaatgcttaatttaagagtttcacagcacccagaagtgcttaccatattataacatagtgactttcaaagatatgtaacacaggtgctcttaagcttttgcctttttgtcctattattaacaagtcagtaaagttaacaggtaaagtactgctaat

SEQ ID NO: 1908 - DNA, 1263 bp, Homo sapiens
  source 1..1263: mol_type = genomic DNA
atgtcggaggagcagttcggcggggacggggcggcggcagcggcaacggcggcggcgtctggaggcaccgaagggggcagcgccgagtcggagggggcgaagattgacgccagtaagaacgaggaggatgaagggaaaatgtttataggaggccttagctgggacactacaaagaaagatctgaaggactacttttccaaatttggtgaagttgtagactgcactctgaagttagatcctatcacagggcgatcaaggggttttggctttgtgctatttaaagaatcggagagtgtagataaggtcatggatcaaaaagaacataaattgaatgggaaggtgattgatcctaaaagggccaaagccatgaaaacaaaagagccggttaaaaaaatttttgttggtggcctttctccagatacacctgaagagaaaataagggagtactttggtggttttggtgaggtggaatccatagagctccccatggacaacaagaccaataagaggcgtgggttctgctttattacctttaaggaagaagaaccagtgaagaagataatggaaaagaaataccacaatgttggtcttagtaaatgtgaaataaaagtagccatgtcgaaggaacaatatcagcaacagcaacagtggggatctagaggaggatttgcaggaagagctcgtggaagaggtggtggccccagtcaaaactggaaccagggatatagtaactattggaatcaaggctatggcaactatggatataacagccaaggttacggtggttatggaggatatgactacactggttacaacaactactatggatatggtgattatagcaaccagcagagtggttatgggaaggtatccaggcgaggtggtcatcaaaatagctacaaaccatactaaattattccatttgcaacttatccccaacaggtggtgaagcagtattttccaatttgaagattcatttgaaggtggctcctgccacctgctaatagcagttcaaactaaattttttgtatcaagtccctgaatggaagtatgacgttgggtccctctgaagtttaattctgagttctcattaaaagaaatttgctttcattgttttatttcttaattgctatgcttcagaatcaatttgtgttttatgccctttcccccagtattgtagagcaagtcttgtgttaaaagcccagtgtgacagtgtcatgatgtagtagtgtcttactggttttttaataaatccttttgtat

SEQ ID NO: 1909 - DNA, 3913 bp, Homo sapiens
  source 1..3913: mol_type = genomic DNA
gttttacagttgagtaatctcagataaagacaggaacatggtgtttataagctgcccttaatggcagagaacacagacagaaacgagggaagagagagaaattggggaccctgaagaaagggggccagcagcaggtaggtgccatcagggacaagaacagcacctcccagggtgggagaccccaggcctttctggcagcaggtctggatggaaagtggacaggaggctcacccgtctgcatcccctgctcctgcccctgctcggctacaaaaaccaaagggacagcagctgaccacaccccggtagccactcctgcataaagctctcccctcctgtgaccagctgaggacctcaggctgcagcggagccatgcccagatacacggtgcacgtacgtggggaatggctggcagtgccctgccaggacgcgcagctcactgtgggctggctgggccgggaggccgtgaggcgctatatcaagaataagcccgacaatggtggcttcacctccgtggatgacgcgcacttccttgtgcgccggtgcaagggcctgggcctgctggacaacgaggaccggctcgaggtggccctagagaacaacgagttcgtggaagtggttatagagggtgatgccatgtctcctgacttcattccatctcaaccagaaggagtttatctatacagcaagtaccgggagcctgaaaagtacatcgagttagatggagaccgtctgaccacggaggatctggtcaacttgggaaagggacgctacaaaataaagctcaccccaacagctgagaagagggtgcagaaatccagggaggtcatagatagcatcataaaagagaaaacagttgtttacggtattactacaggttttgggaaatttgccagaactgtaattcctatcaataagctacaggagcttcaggtcaacttagtacgctcacattcttcaggtgttgggaaaccactaagtcctgagaggtgtcggatgctcttggctttaaggatcaatgtcttagccaaaggatacagtggcatttccctggagaccctcaaacaagtcatagaaatgtttaatgcctcctgcctgccctatgtcccagagaaaggaaccgttggtgccagtggagaccttgccccactctctcatcttgctcttgggctagttggagaagggaagatgtggtctccgaagagtggctgggctgatgctaaatacgtgctagaagcccatggattgaaaccagttattttaaaaccaaaagagggcctggcactcatcaatgggacgcagatgatcacatccctgggctgtgaagctgtagagcgagccagtgctattgcacggcaggctgacattgtggcagccctgacccttgaggtgctgaagggcaccaccaaagcctttgacactgacattcatgctcttcgacctcaccgtgggcaaattgaagttgcttttcggtttcggtcactcttggactcagatcaccacccatcagaaatagcagagagtcacaggttctgtgatcgcgtccaggatgcatacaccttgcgctgctgtccacaggtccatggtgtggtgaatgatacaatagcatttgtgaagaacatcattaccacagaactgaacagcgcaacagataatcctatggtctttgccaataggggagagacagtttctggaggaaacttccatggtgaatacccagccaaagccctagactacttggccattggcatccatgaacttgctgcaatcagtgagagaagaatcgagcggctctgcaatccctccctcagtgagctgcctgccttcctggtggctgaaggtggtctgaactctgggttcatgatagctcactgcacggcagcagcccttgtttctgagaacaaggctctgtgccatccctcgtctgttgactccctctccaccagcgcagccacggaggaccacgtctccatgggaggatgggcagcaaggaaagccctcagggtcatcgagcatgtggagcaagtgctggccatcgagctccttgcagcctgccagggcatagagtttctacgtcccctgaaaacaaccactccgctggagaaggtctatgacctggtgcgctctgttgtaaggccctggataaaagatcgcttcatggccccggacatcgaggcagcccacaggctgctcctggagcagaaggtttgggaagtagctgctccatacattgaaaaatacagaatggagcatattccagaatcaagacctctttctccaacagccttttcactgcaatttctgcacaagaaatccaccaaaatcccggagtctgaggacctttaatgggctttgtcatgaagtagcagatgagagggcagtcagtttagcacaaagcaatactaggctgaaggagagacctgagaactttcctaggtagatcaatccattgtatcattcagttcttctaaagcctacgttggttaggctgatggcagtattatagttgctaaattcagcactgtgttcctgttgtcgtggttcaagacccaccaggtattttcagattataaaacttttctttctttcttaacagtttcaacaggccactcactcttaagggtgagaagaataaccacaattgtatgtgcctgttttttactcttagcattagatgaattcaaatttggaaacagattgatagcaattttttctaaaaacattagacttttgttaacctttttttttttttttaaatttgcttcaacaagctctccaccagttgactttctttggctaattttactttgcatgatatgccttaatatgccttcataaataaccattttaagtcataatttgtccttaagctgcttttttcttctattaattggatcatagtaaagagtagtcaatagggtcttcagctattaattgtagaggtgattaaaaccaacaaggagtttcatgtgcaaaggagataaggaatgaatataaagattgctatttgggtggctcttattaaactgtgtattttgtacttatcactacacgtatcccccaaatgcttacatgggagtttgaggttagtattttcacttccttggtgttagtactctattcacattcttattgtaaccttcctcatttcacagataaggaatctttggggattaaccaacctcctttctgtaatggtaatcattaaaataagtcctattgataaaggtcagatggagccctagagtgtattactgcatctatttttttccccgagaagataaaggaccttcagggatggcttaagtgtatctgtccagatgaaggatgggtcacatgacctcttggcttcccaagtctaagctctgtgactttgcaccagtgtgtgcatatatgtgcaaggcccttcaagtggtctgaaaccgtggctctaaaaaccacagctggtggagaggaggacagacacacttgccaccttgcctacctaattgccatctaaaatgggccgaacagtggatttcacaatagagttttcaccctttagatttacaacctgtcaggtggaaactgaagtgaaaactgctgcacacagcaattcagggagcaaaaaatgtgctgaggagactgtttacctaaaggttgttcttggtgctattccttgtcaaaatgtgaacacacacaaatgaggtttgtgcattgtcatccgtgggctgccattgagccagtaacccccagtggtctcatggtgctcttcgctccagtttggggaatgctggattctttcagcccctgcagccctccaggtcaaaatgacactttgtcactgagttttctacacagctctattagtaactgacagcacacgccttcaagggaacttcaagggaaacatggaataaactaagtctcaattgcc

SEQ ID NO: 1910 - DNA, 2637 bp, Homo sapiens
  source 1..2637: mol_type = genomic DNA
agataaagacaggaacatggtgtttataagctgcccttaatggcagagaacacagacagaaacgagggaagagagagaaattggggaccctgaagaaagggggccagcagcaggtaggtgccatcagggacaagaacagcacctcccagggtgggagaccccaggcctttctggcagcaggtctggatggaaagtggacaggaggctcacccgtctgcatcccctgctcctgcccctgctcggctacaaaaaccaaagggacagcagctgaccacaccccggtagccactcctgcataaagctctcccctcctgtgaccagctgaggacctcaggctgcagcggagccatgcccagatacacggtgcacgtacgtggggaatggctggcagtgccctgccaggacgcgcagctcactgtgggctggctgggccgggaggccgtgaggcgctatatcaagaataagcccgacaatggtggcttcacctccgtggatgacgcgcacttccttgtgcgccggtgcaagggcctgggcctgctggacaacgaggaccggctcgaggtggccctagagaacaacgagttcgtggaagtggttatagagggtgatgccatgtctcctgacttcattccatctcaaccagaaggagtttatctatacagcaagtaccgggagcctgaaaagtacatcgagttagatggagaccgtctgaccacggaggatctggtcaacttgggaaagggacgctacaaaataaagctcaccccaacagctgagaagagggtgcagaaatccagggaggtcatagatagcatcataaaagagaaaacagttgtttacggtattactacaggttttgggaaatttgccagaactgtaattcctatcaataagctacaggagcttcaggtcaacttagtacgctcacattcttcaggtgttgggaaaccactaagtcctgagaggtgtcggatgctcttggctttaaggatcaatgtcttagccaaaggatacagtggcatttccctggagaccctcaaacaagtcatagaaatgtttaatgcctcctgcctgccctatgtcccagagaaaggaaccgttggtgccagtggagaccttgccccactctctcatcttgctcttgggctagttggagaagggaagatgtggtctccgaagagtggctgggctgatgctaaatacgtgctagaagcccatggattgaaaccagttattttaaaaccaaaagagggcctggcactcatcaatgggacgcagatgatcacatccctgggctgtgaagctgtagagcgagccagtgctattgcacggcaggctgacattgtggcagccctgacccttgaggtgctgaagggcaccaccaaagcctttgacactgacattcatgctcttcgacctcaccgtgggcaaattgaagttgcttttcggtttcggtcactcttggactcagatcaccacccatcagaaatagcagagagtcacaggttctgtgatcgcgtccaggatgcatacaccttgcgctgctgtccacaggtccatggtgtggtgaatgatacaatagcatttgtgaagaacatcattaccacagaactgaacagcgcaacagataatcctatggtctttgccaataggggagagacagtttctggaggaaacttccatggtgaatacccagccaaagccctagactacttggccattggcatccatgaacttgctgcaatcagtgagagaagaatcgagcggctctgcaatccctccctcagtgagctgcctgccttcctggtggctgaaggtggtctgaactctgggttcatgatagctcactgcacggcagcagcccttgtttctgagaacaaggctctgtgccatccctcgtctgttgactccctctccaccagcgcagccacggaggaccacgtctccatgggaggatgggcagcaaggaaagccctcagggtcatcgagcatgtggagcaagtgctggccatcgagctccttgcagcctgccagggcatagagtttctacgtcccctgaaaacaaccactccgctggagaaggtctatgacctggtgcgctctgttgtaaggtttgggaagtagctgctccatacattgaaaaatacagaatggagcatattccagaatcaagacctctttctccaacagccttttcactgcaatttctgcacaagaaatccaccaaaatcccggagtctgaggacctttaatgggctttgtcatgaagtagcagatgagagggcagtcagtttagcacaaagcaatactaggctgaaggagagacctgagaactttcctaggtagatcaatccattgtatcattcagttcttctaaagcctacgttggttaggctgatggcagtattatagttgctaaattcagcactgtgttcctgttgtcgtggttcaagacccaccaggtattttcagattataaaacttttctttctttcttaacagtttcaacaggccactcactcttaagggtgagaagaataaccacaattgtatgtgcctgttttttactcttagcattagatgaattcaaatttggaaacagattgatagcaattttttctaaaaacattagacttt

SEQ ID NO: 1911 - DNA, 2804 bp, Homo sapiens
  source 1..2804: mol_type = genomic DNA
agacagaaacgagggaagagagagaaattggggaccctgaagaaagggggccagcagcaggtaggtgccatcagggacaagaacagcacctcccagggtgggagaccccaggcctttctggcagcaggtctggatggaaagtggacaggaggctcacccgtctgcatcccctgctcctgcccctgctcggctacaaaaaccaaagggacagcagctgaccacaccccggtagccactcctgcataaagctctcccctcctgtgaccagctgaggacctcaggctgcagcggagccatgcccagatacacggtgcacgtacgtggggaatggctggcagtgccctgccaggacgcgcagctcactgtgggctggctgggccgggaggccgtgaggcgctatatcaagaataagcccgacaatggtggcttcacctccgtggatgacgcgcacttccttgtgcgccggtgcaagggcctgggcctgctggacaacgaggaccggctcgaggtggccctagagaacaacgagttcgtggaagtggttatagagggtgatgccatgtctcctgacttcattccatctcaaccagaaggagtttatctatacagcaagtaccgggagcctgaaaagtacatcgagttagatggagaccgtctgaccacggaggatctggtcaacttgggaaagggacgctacaaaataaagctcaccccaacagctgagaagagggtgcagaaatccagggaggtcatagatagcatcataaaagagaaaacagggagcttcaggtcaacttagtacgctcacattcttcaggtgttgggaaaccactaagtcctgagaggtgtcggatgctcttggctttaaggatcaatgtcttagccaaaggatacagtggcatttccctggagaccctcaaacaagtcatagaaatgtttaatgcctcctgcctgccctatgtcccagagaaaggaaccgttggtgccagtggagaccttgccccactctctcatcttgctcttgggctagttggagaagggaagatgtggtctccgaagagtggctgggctgatgctaaatacgtgctagaagcccatggattgaaaccagttattttaaaaccaaaagagggcctggcactcatcaatgggacgcagatgatcacatccctgggctgtgaagctgtagagcgagccagtgctattgcacggcaggctgacattgtggcagccctgacccttgaggtgctgaagggcaccaccaaagcctttgacactgacattcatgctcttcgacctcaccgtgggcaaattgaagttgcttttcggtttcggtcactcttggactcagatcaccacccatcagaaatagcagagagtcacaggttctgtgatcgcgtccaggatgcatacaccttgcgctgctgtccacaggtccatggtgtggtgaatgatacaatagcatttgtgaagaacatcattaccacagaactgaacagcgcaacagataatcctatggtctttgccaataggggagagacagtttctggaggaaacttccatggtgaatacccagccaaagccctagactacttggccattggcatccatgaacttgctgcaatcagtgagagaagaatcgagcggctctgcaatccctccctcagtgagctgcctgccttcctggtggctgaaggtggtctgaactctgggttcatgatagctcactgcacggcagcagcccttgtttctgagaacaaggctctgtgccatccctcgtctgttgactccctctccaccagcgcagccacggaggaccacgtctccatgggaggatgggcagcaaggaaagccctcagggtcatcgagcatgtggagcaagtgctggccatcgagctccttgcagcctgccagggcatagagtttctacgtcccctgaaaacaaccactccgctggagaaggtctatgacctggtgcgctctgttgtaaggccctggataaaagatcgcttcatggccccggacatcgaggcagcccacaggctgctcctggagcagaaggtttgggaagtagctgctccatacattgaaaaatacagaatggagcatattccagaatcaagacctctttctccaacagccttttcactgcaatttctgcacaagaaatccaccaaaatcccggagtctgaggacctttaatgggctttgtcatgaagtagcagatgagagggcagtcagtttagcacaaagcaatactaggctgaaggagagacctgagaactttcctaggtagatcaatccattgtatcattcagttcttctaaagcctacgttggttaggctgatggcagtattatagttgctaaattcagcactgtgttcctgttgtcgtggttcaagacccaccaggtattttcagattataaaacttttctttctttcttaacagtttcaacaggccactcactcttaagggtgagaagaataaccacaattgtatgtgcctgttttttactcttagcattagatgaattcaaatttggaaacagattgatagcaattttttctaaaaacattagacttttgttaacctttttttttttttttaaatttgcttcaacaagctctccaccagttgactttctttggctaattttactttgcatgatatgccttaatatgccttcataaataaccattttaagtcataatttgtccttaagctgcttttttcttctattaattggatcatagtaaagagtagtcaatagggtcttcagctattaattgtagaggtgatt

SEQ ID NO: 1912 - DNA, 1626 bp, Homo sapiens
  source 1..1626: mol_type = genomic DNA
cgtccttcctcagccgcgggtgatcgtagctcggaaatggcgggatttggtgctatggagaaatttttggtagaatataagagtgcagtggagaagaaactggcagagtacaaatgtaacaccaacacagcaattgaactaaaattagttcgttttcctgaagatcttgaaaatgacattagaactttctttcctgagtatacccatcaactctttggggatgatgaaactgcttttggttacaagggtctaaagatcctgttatactatattgctggtagcctgtcaacaatgttccgtgttgaatatgcatctaaagttgatgagaactttgactgtgtagaggcagatgatgttgagggcaaaattagacaaatcattccacctggattttgcacaaacacgaatgatttcctttctttactggaaaaggaagttgatttcaagccattcggaaccttacttcatacctactcagttctcagtccaacaggaggagaaaactttacctttcagatatataaggctgacatgacatgtagaggctttcgagaatatcatgaaaggcttcagacctttttgatgtggtttattgaaactgctagctttattgacgtggatgatgaaagatggcactactttctagtatttgagaagtataataaggatggagctacgctctttgcgaccgtaggctacatgacagtctataattactatgtgtacccagacaaaacccggccacgtgtaagtcagatgctgattttgactccatttcaaggtcaaggccatggtgctcaacttcttgaaacagttcatagatactacactgaatttcctacagttcttgatattacagcggaagatccatccaaaagctatgtgaaattacgagactttgtgcttgtgaagctttgtcaagatttgccctgtttttcccgggaaaaattaatgcaaggattcaatgaagatatggcgatagaggcacaacagaagttcaaaataaataagcaacacgctagaagggtttatgaaattcttcgactactggtaactgacatgagtgatgccgaacaatacagaagctacagactggatattaaaagaagactaattagcccatataagaaaaagcagagagatcttgctaagatgagaaaatgtctcagaccagaagaactgacaaaccagatgaaccaaatagaaataagcatgcaacatgaacagctggaagagagttttcaggaactagtggaagattaccggcgtgttattgaacgacttgctcaagagtaaagattatactgctctgtacaggaagcttgcaaattttctgtacaatgtgctgtgaaaaatctgatgactttaattttaaaatcttgtgacattttgcttatactaaaagttatctatctttagttgaatattttcttttggagagattgtatattttaaaatactgtttagagtttatgagcatatattgcatttaaagaaagataaagcttctgaaatactactgcaattgcttcccttcttaaacagtataataaatgcttagttgtgatatgttaatgtgtgatgatatgattcttaaatacttacaataaacctcattcttaaata

SEQ ID NO: 1913 - DNA, 1570 bp, Homo sapiens
  source 1..1570: mol_type = genomic DNA
gagcgcgcgggttgattcgtccttcctcagccgcgggtgatcgtagctcggaaatggcgggatttggtgctatggagaaatttttggtagaatataagagtgcagtggagaagaaactggcagagtacaaatgtaacaccaacacagcaattgaactaaaattagtgaaactgcttttggttacaagggtctaaagatcctgttatactatattgctggtagcctgtcaacaatgttccgtgttgaatatgcatctaaagttgatgagaactttgactgtgtagaggcagatgatgttgagggcaaaattagacaaatcattccacctggattttgcacaaacacgaatgatttcctttctttactggaaaaggaagttgatttcaagccattcggaaccttacttcatacctactcagttctcagtccaacaggaggagaaaactttacctttcagatatataaggctgacatgacatgtagaggctttcgagaatatcatgaaaggcttcagacctttttgatgtggtttattgaaactgctagctttattgacgtggatgatgaaagatggcactactttctagtatttgagaagtataataaggatggagctacgctctttgcgaccgtaggctacatgacagtctataattactatgtgtacccagacaaaacccggccacgtgtaagtcagatgctgattttgactccatttcaaggtcaaggccatggtgctcaacttcttgaaacagttcatagatactacactgaatttcctacagttcttgatattacagcggaagatccatccaaaagctatgtgaaattacgagactttgtgcttgtgaagctttgtcaagatttgccctgtttttcccgggaaaaattaatgcaaggattcaatgaagatatggcgatagaggcacaacagaagttcaaaataaataagcaacacgctagaagggtttatgaaattcttcgactactggtaactgacatgagtgatgccgaacaatacagaagctacagactggatattaaaagaagactaattagcccatataagaaaaagcagagagatcttgctaagatgagaaaatgtctcagaccagaagaactgacaaaccagatgaaccaaatagaaataagcatgcaacatgaacagctggaagagagttttcaggaactagtggaagattaccggcgtgttattgaacgacttgctcaagagtaaagattatactgctctgtacaggaagcttgcaaattttctgtacaatgtgctgtgaaaaatctgatgactttaattttaaaatcttgtgacattttgcttatactaaaagttatctatctttagttgaatattttcttttggagagattgtatattttaaaatactgtttagagtttatgagcatatattgcatttaaagaaagataaagcttctgaaatactactgcaattgcttcccttcttaaacagtataataaatgcttagttgtgatatgttaatgtgtgatgatatgattcttaaatacttacaataaacctcattcttaaatactt

SEQ ID NO: 1914 - DNA, 1787 bp, Homo sapiens
  source 1..1787: mol_type = genomic DNA
agatcgaggctgagaccaagaggggatcgcgtgggggaagcgtgaggggatgttggaaattactattatggacaaggccacccaatgaagcctcaccgaatccgcatgactcataatttgctgctcaactatggtctctaccgaaaaatggaaatctatcgccctcacaaagccaatgctgaggagatgaccaagtaccacagcgatgactacattaaattcttgcgctccatccgtccagataacatgtcggagtacagcaagcagatgcagagattcaacgttggtgaggactgtccagtattcgatggcctgtttgagttctgtcagttgtctactggtggttctgtggcaagtgctgtgaaacttaataagcagcagacggacatcgctgtgaattgggctgggggcctgcaccatgcaaagaagtccgaggcatctggcttctgttacgtcaatgatatcgtcttggccatcctggaactgctaaagtatcaccagagggtgctgtacattgacattgatattcaccatggtgacggcgtggaagaggccttctacaccacggaccgggtcatgactgtgtcctttcataagtatggagagtacttcccaggaactggggacctacgggatatcggggctggcaaaggcaagtattatgctgttaactacccgctccgagacgggattgatgacgagtcctatgaggccattttcaagccggtcatgtccaaagtaatggagatgttccagcctagtgcggtggtcttacagtgtggctcagactccctatctggggatcggttaggttgcttcaatctaactatcaaaggacacgccaagtgtgtggaatttgtcaagagctttaacctgcctatgctgatgctgggaggcggtggttacaccattcgtaacgttgcccggtgctggacatatgagacagctgtggccctggatacggagatccctaatgagcttccatacaatgactactttgaatactttggaccagatttcaagctccacatcagtccttccaatatgactaaccagaacacgaatgagtacctggagaagatcaaacagcgactgtttgagaaccttagaatgctgccgcacgcacctggggtccaaatgcaggcgattcctgaggacgccatccctgaggagagtggcgatgaggacgaagacgaccctgacaagcgcatctcgatctgctcctctgacaaacgaattgcctgtgaggaagagttctccgattctgaagaggagggagaggggggccgcaagaactcttccaacttcaaaaaagccaagagagtcaaaacagaggatgaaaaagagaaagacccagaggagaagaaagaagtcaccgaagaggagaaaaccaaggaggagaagccagaagccaaaggggtcaaggaggaggtcaagttggcctgaatggacctctccagctctggcttcctgctgagtccctcacgtttcttccccaacccctcagattttatattttctatttctctgtgtatttatataaaaatttattaaatataaatatccccagggacagaaaccaaggccccgagctcagggcagctgtgctgggtgagctcttccaggagccaccttgccacccattcttcccgttcttaactttgaaccataaagggtgccaggtctgggtgaaagggatacttttatgcaaccataagacaaactcctgaaatgccaagtgcctgcttagtagctttggaaaggtgcccttattgaacattctagaa

SEQ ID NO: 1915 - DNA, 2124 bp, Homo sapiens
  source 1..2124: mol_type = genomic DNA
ctcccccctgggtcggacgctgagcggagccgcgggcgggagggcggacggaccgactgacggtagggacgggaggcgagcaagatggcgcagacgcagggcacccggaggaaagtctgttactactacgacggggatgttggaaattactattatggacaaggccacccaatgaagcctcaccgaatccgcatgactcataatttgctgctcaactatggtctctaccgaaaaatggaaatctatcgccctcacaaagccaatgctgaggagatgaccaagtaccacagcgatgactacattaaattcttgcgctccatccgtccagataacatgtcggagtacagcaagcagatgcagagattcaacgttggtgaggactgtccagtattcgatggcctgtttgagttctgtcagttgtctactggtggttctgtggcaagtgctgtgaaacttaataagcagcagacggacatcgctgtgaattgggctgggggcctgcaccatgcaaagaagtccgaggcatctggcttctgttacgtcaatgatatcgtcttggccatcctggaactgctaaagtatcaccagagggtgctgtacattgacattgatattcaccatggtgacggcgtggaagaggccttctacaccacggaccgggtcatgactgtgtcctttcataagtatggagagtacttcccaggaactggggacctacgggatatcggggctggcaaaggcaagtattatgctgttaactacccgctccgagacgggattgatgacgagtcctatgaggccattttcaagccggtcatgtccaaagtaatggagatgttccagcctagtgcggtggtcttacagtgtggctcagactccctatctggggatcggttaggttgcttcaatctaactatcaaaggacacgccaagtgtgtggaatttgtcaagagctttaacctgcctatgctgatgctgggaggcggtggttacaccattcgtaacgttgcccggtgctggacatatgagacagctgtggccctggatacggagatccctaatgagcttccatacaatgactactttgaatactttggaccagatttcaagctccacatcagtccttccaatatgactaaccagaacacgaatgagtacctggagaagatcaaacagcgactgtttgagaaccttagaatgctgccgcacgcacctggggtccaaatgcaggcgattcctgaggacgccatccctgaggagagtggcgatgaggacgaagacgaccctgacaagcgcatctcgatctgctcctctgacaaacgaattgcctgtgaggaagagttctccgattctgaagaggagggagaggggggccgcaagaactcttccaacttcaaaaaagccaagagagtcaaaacagaggatgaaaaagagaaagacccagaggagaagaaagaagtcaccgaagaggagaaaaccaaggaggagaagccagaagccaaaggggtcaaggaggaggtcaagttggcctgaatggacctctccagctctggcttcctgctgagtccctcacgtttcttccccaacccctcagattttatattttctatttctctgtgtatttatataaaaatttattaaatataaatatccccagggacagaaaccaaggccccgagctcagggcagctgtgctgggtgagctcttccaggagccaccttgccacccattcttcccgttcttaactttgaaccataaagggtgccaggtctgggtgaaagggatacttttatgcaaccataagacaaactcctgaaatgccaagtgcctgcttagtagctttggaaaggtgcccttattgaacattctagaaggggtggctgggtcttcaaggatctcctgtttttttcaggctcctaaagtaacatcagccatttttagattggttctgttttcgtaccttcccactggcctcaagtgagccaagaaacactgcctgccctctgtctgtcttctcctaattctgcaggtggaggttgctagtctagtttcctttttgagatactattttcatttttgtgagcctctttgtaataaaatggtacatttctatatcctcctga

SEQ ID NO: 1916 - DNA, 664 bp, Homo sapiens
  source 1..664: mol_type = genomic DNA
gactgacggtagggacgggaggcgagcaagatggcgcagacgcagggcacccggaggaaagtctgttactactacgacggggatgttggaaattactattatggacaaggccacccaatgaagcctcaccgaatccgcatgactcataatttgctgctcaactatggtctctaccgaaaaatggaaatctatcgccctcacaaagccaatgctgaggagatgaccaagtaccacagcgatgactacattaaattcttgcgctccatccgtccagataacatgtcggagtacagcaagcagatgcagagatcaagtgctgtgaaacttaataagcagcagacggacatcgctgtgaattgggctgggggcctgcaccatgcaaagaagtccgaggcatctggcttctgttacgtcaatgatatcgtcttggccatcctggaactgctaaagtatcaccagagggtgctgtacattgacattgatattcaccatggtgacggcgtggaagaggccttctacaccacggaccgggtcatgactgtgtcctttcataagtatggagagtacttcccaggaactggggacctacgggatatcggggctggcaaaggcaagtattatgctgttaactacccgctccgagacgggattgatgacgagtcct

SEQ ID NO: 1917 - DNA, 2960 bp, Homo sapiens
  source 1..2960: mol_type = genomic DNA
ggccttcctgcgggcaggctctctgtgtcgcaacactggcggggcgggccaaatcggccagagctctgcccccagaggacgcggctaagcccgggggcgtgtcctgggctggccccacccgcgccccgccccgccccgcccggtcgcggagctgcggccagctttgggagggccggccccgggatgctacacacaacccagctgtaccagcatgtgccagagacacgctggccaatcgtgtactcgccgcgctacaacatcaccttcatgggcctggagaagctgcatccctttgatgccggaaaatggggcaaagtgatcaatttcctaaaagaagagaagcttctgtctgacagcatgctggtggaggcgcgggaggcctcggaggaggacctgctggtggtgcacacgaggcgctatcttaatgagctcaagtggtcctttgctgttgctaccatcacagaaatcccccccgttatcttcctccccaacttccttgtgcagaggaaggtgctgaggccccttcggacccagacaggaggaaccataatggcggggaagctggctgtggagcgaggctgggccatcaacgtggggggtggcttccaccactgctccagcgaccgtggcgggggcttctgtgcctatgcggacatcacgctcgccatcaagtttctgtttgagcgtgtggagggcatctccagggctaccatcattgatcttgatgcccatcagggcaatgggcatgagcgagacttcatggacgacaagcgtgtgtacatcatggatgtctacaaccgccacatctacccaggggaccgctttgccaagcaggccatcaggcggaaggtggagctggagtggggcacagaggatgatgagtacctggataaggtggagaggaacatcaagaaatccctccaggagcacctgcccgacgtggtggtatacaatgcaggcaccgacatcctcgagggggaccgccttggggggctgtccatcagcccagcgggcatcgtgaagcgggatgagctggtgttccggatggtccgtggccgccgggtgcccatccttatggtgacctcaggcgggtaccagaagcgcacagcccgcatcattgctgactccatacttaatctgtttggcctggggctcattgggcctgagtcacccagcgtctccgcacagaactcagacacaccgctgcttccccctgcagtgccctgacccttgctgccctgcctgtcacgtggccctgcctatccgccccttagtgctttttgttttctaacctcatggggtggtggaggcagccttcagtgagcatggaggggcagggccatccctggctggggcctggagctggcccttcctctacttttccctgctggaagccagaagggcttgaggcctctatgggtgggggcagaaggcagagcctgtgtcccagggggacccacacgaagtcaccagcccataggtccagggaggcaggcagttaactgagaattggagaggacaggctaggtcccaggcacagcgagggccctgggcttggggtgttctggttttgagaacggcagacccaggtcggagtgaggaagcttccacctccatcctgactaggcctgcatcctaactgggcctccctccctccccttggtcatgggatttgctgccctctttgccccagagctgaagagctataggcactggtgtggatggcccaggaggtgctggagctaggtctccaggtgggcctggttcccaggcagcaggtgggaaccctgggcctggatgtgaggggcggtcaggaaggggtacaggtgggttccctcatctggagttccccctcaataaagcaaggtctggacctgccttcccaggcccttctgtgggggtgaaggtggggaaggcctgcggcgcccagatcactgccttagcagtagtcttgcctgttcagtgcaaggggcaggttttggggggaggaattcttagcgcaaggacgggcctcagccctgtcgcctccagggggccgctgacccaggtggggagagggcagaagaagggtgggggacgtgggcaggccaggctcacaggtggaaatcagggatgcagggtggtgcccaagccaggtcctgcaggaacccaggcccagggagggacccagacactggtgaggcggggcaggggttcctggagagagggcagcgaggatctctatcctggcctggggattatgaacataggtagccggggcagggccctgggtgggactgtggcctccactggcctcaccaaagtgcctgggccccaatccttctccatgcccaggggccccaggtgggccagacctctggcctgttcctcagccctactcatggggacattcagggacctccaggaagtgggcgggggagcatccacccctgctagccggcagctgtggccctgatcaaatcaggggctggggagggaaagtgggtccattgaggtggccctgctccatcagccccctacgggacttgtgttcattacagtgagggggtgctcccactgtctcccggcctccctaatgctccctctgctgcagggagaagggttccaagatcacaaaatgtcaacaatgctggcctcctggaccagaccccgaggctctaacaatgcactctgagatccctacccttgccgttggtctctgtcgctgactcgaggcacctaacatccattcacacccaacacaggccagcgacttctggggctcagccacagacatggtttgtcactgttgagcttctgttcctagagaatcctagaggcttgattggcccaggctgctgtgtgtgctggaggcaaagaatccctacctcctaggggtgaaaggaaatgaaaatggaaagttcttgtagcgcaaggcctgacatgggtagctgctcaataaatgctagtgtgttatttca

SEQ ID NO: 1918 - DNA, 2043 bp, Homo sapiens
  source 1..2043: mol_type = genomic DNA
gcaggctctgagagcctacatgtcttcgccgggagtgcttgtcccggagctgctcgcagactgggccgggggtgggctcgggtcggagaggtcacggggctccttaggtcacaggcggcagggccagagaaactcccccgcccctacgtttaactcgcggaaacaagggcccagagagcccagacgccagcccaaggtcacacagcgaagccccggcacagcccgccgggaacctgtcgtttctaacccccagcctctcgccgtttctacccagcttgggaagcgcaggaacaggacatacggtggtcgcgccccttccgcgaggccggggtgaaacccgcttggccctcccgccagggggcggagcttccgaaccaggcgggattccaccgggctacacacaacccagctgtaccagcatgtgccagagacacgctggccaatcgtgtactcgccgcgctacaacatcaccttcatgggcctggagaagctgcatccctttgatgccggaaaatggggcaaagtgatcaatttcctaaaagaagagaagcttctgtctgacagcatgctggtggaggcgcgggaggcctcggaggaggacctgctggtggtgcacacgaggcgctatcttaatgagctcaagtggtcctttgctgttgctaccatcacagaaatcccccccgttatcttcctccccaacttccttgtgcagaggaaggtgctgaggccccttcggacccagacaggaggaaccataatgggggtggcttccaccactgctccagcgaccgtggcgggggcttctgtgcctatgcggacatcacgctcgccatcaagtttctgtttgagcgtgtggagggcatctccagggctaccatcattgatcttgatgcccatcagggcaatgggcatgagcgagacttcatggacgacaagcgtgtgtacatcatggatgtctacaaccgccacatctacccaggggaccgctttgccaagcaggccatcaggcggaaggtggagctggagtggggcacagaggatgatgagtacctggataaggtggagaggaacatcaagaaatccctccaggagcacctgcccgacgtggtggtatacaatgcaggcaccgacatcctcgagggggaccgccttggggggctgtccatcagcccagcgggcatcgtgaagcgggatgagctggtgttccggatggtccgtggccgccgggtgcccatccttatggtgacctcaggcgggtaccagaagcgcacagcccgcatcattgctgactccatacttaatctgtttggcctggggctcattgggcctgagtcacccagcgtctccgcacagaactcagacacaccgctgcttccccctgcagtgccctgacccttgctgccctgcctgtcacgtggccctgcctatccgccccttagtgctttttgttttctaacctcatggggtggtggaggcagccttcagtgagcatggaggggcagggccatccctggctggggcctggagctggcccttcctctacttttccctgctggaagccagaagggcttgaggcctctatgggtgggggcagaaggcagagcctgtgtcccagggggacccacacgaagtcaccagcccataggtccagggaggcaggcagttaactgagaattggagaggacaggctaggtcccaggcacagcgagggccctgggcttggggtgttctggttttgagaacggcagacccaggtcggagtgaggaagcttccacctccatcctgactaggcctgcatcctaactgggcctccctccctccccttggtcatgggatttgctgccctctttgccccagagctgaagagctataggcactggtgtggatggcccaggaggtgctggagctaggtctccaggtgggcctggttcccaggcagcaggtgggaaccctgggcctggatgtgaggggcggtcaggaaggggtacaggtgggttccctcatctggagttccccctcaataaagcaaggtctggacctgc

SEQ ID NO: 1919 - DNA, 2766 bp, Homo sapiens
  source 1..2766: mol_type = genomic DNA
gctacacacaacccagctgtaccagcatgtgccagagacacgctggccaatcgtgtactcgccgcgctacaacatcaccttcatgggcctggagaagctgcatccctttgatgccggaaaatggggcaaagtgatcaatttcctaaaagaagagaagcttctgtctgacagcatgctggtggaggcgcgggaggcctcggaggaggacctgctggtggtgcacacgaggcgctatcttaatgagctcaagtggtcctttgctgttgctaccatcacagaaatcccccccgttatcttcctccccaacttccttgtgcagaggaaggtgctgaggccccttcggacccagacaggaggaaccataatggcggggaagctggctgtggagcgaggctgggccatcaacgtggggggtggcttccaccactgctccagcgaccgtggcgggggcttctgtgcctatgcggacatcacgctcgccatcaagtttctgtttgagcgtgtggagggcatctccagggctaccatcattgatcttgatgcccatcagggcaatgggcatgagcgagacttcatggacgacaagcgtgtgtacatcatggatgtctacaaccgccacatctacccaggggaccgctttgccaagcaggccatcaggcggaaggtggagctggagtggggcacagaggatgatgagtacctggataaggtggagaggaacatcaagaaatccctccaggagcacctgcccgacgtggtggtatacaatgcaggcaccgacatcctcgagggggaccgccttggggggctgtccatcagcccagcgggcatcgtgaagcgggatgagctggtgttccggatggtccgtggccgccgggtgcccatccttatggtgacctcaggcgggtaccagaagcgcacagcccgcatcattgctgactccatacttaatctgtttggcctggggctcattgggcctgagtcacccagcgtctccgcacagaactcagacacaccgctgcttccccctgcagtgccctgacccttgctgccctgcctgtcacgtggccctgcctatccgccccttagtgctttttgttttctaacctcatggggtggtggaggcagccttcagtgagcatggaggggcagggccatccctggctggggcctggagctggcccttcctctacttttccctgctggaagccagaagggcttgaggcctctatgggtgggggcagaaggcagagcctgtgtcccagggggacccacacgaagtcaccagcccataggtccagggaggcaggcagttaactgagaattggagaggacaggctaggtcccaggcacagcgagggccctgggcttggggtgttctggttttgagaacggcagacccaggtcggagtgaggaagcttccacctccatcctgactaggcctgcatcctaactgggcctccctccctccccttggtcatgggatttgctgccctctttgccccagagctgaagagctataggcactggtgtggatggcccaggaggtgctggagctaggtctccaggtgggcctggttcccaggcagcaggtgggaaccctgggcctggatgtgaggggcggtcaggaaggggtacaggtgggttccctcatctggagttccccctcaataaagcaaggtctggacctgccttcccaggcccttctgtgggggtgaaggtggggaaggcctgcggcgcccagatcactgccttagcagtagtcttgcctgttcagtgcaaggggcaggttttggggggaggaattcttagcgcaaggacgggcctcagccctgtcgcctccagggggccgctgacccaggtggggagagggcagaagaagggtgggggacgtgggcaggccaggctcacaggtggaaatcagggatgcagggtggtgcccaagccaggtcctgcaggaacccaggcccagggagggacccagacactggtgaggcggggcaggggttcctggagagagggcagcgaggatctctatcctggcctggggattatgaacataggtagccggggcagggccctgggtgggactgtggcctccactggcctcaccaaagtgcctgggccccaatccttctccatgcccaggggccccaggtgggccagacctctggcctgttcctcagccctactcatggggacattcagggacctccaggaagtgggcgggggagcatccacccctgctagccggcagctgtggccctgatcaaatcaggggctggggagggaaagtgggtccattgaggtggccctgctccatcagccccctacgggacttgtgttcattacagtgagggggtgctcccactgtctcccggcctccctaatgctccctctgctgcagggagaagggttccaagatcacaaaatgtcaacaatgctggcctcctggaccagaccccgaggctctaacaatgcactctgagatccctacccttgccgttggtctctgtcgctgactcgaggcacctaacatccattcacacccaacacaggccagcgacttctggggctcagccacagacatggtttgtcactgttgagcttctgttcctagagaatcctagaggcttgattggcccaggctgctgtgtgtgctggaggcaaagaatccctacctcctaggggtgaaaggaaatgaaaatggaaagttcttgtagcgcaaggcctgacatgggtagctgctcaataaatgctagtgt

SEQ ID NO: 1920 - DNA, 1021 bp, Homo sapiens
  source 1..1021: mol_type = genomic DNA
ggtcgcggagctgcggccagctttgggagggccggccccgggatgctacacacaacccagctgtaccagcatgtgccagagacacgctggccaatcgtgtactcgccgcgctacaacatcaccttcatgggcctggagaagctgcatccctttgatgccggaaaatggggcaaagtgatcaatttcctaaaagtttctgtttgagcgtgtggagggcatctccagggctaccatcattgatcttgatgcccatcagggcaatgggcatgagcgagacttcatggacgacaagcgtgtgtacatcatggatgtctacaaccgccacatctacccaggggaccgctttgccaagcaggccatcaggcggaaggtggagctggagtggggcacagaggatgatgagtacctggataaggtggagaggaacatcaagaaatccctccaggagcacctgcccgacgtggtggtatacaatgcaggcaccgacatcctcgagggggaccgccttggggggctgtccatcagcccagcgggcatcgtgaagcgggatgagctggtgttccggatggtccgtggccgccgggtgcccatccttatggtgacctcaggcgggtaccagaagcgcacagcccgcatcattgctgactccatacttaatctgtttggcctggggctcattgggcctgagtcacccagcgtctccgcacagaactcagacacaccgctgcttccccctgcagtgccctgacccttgctgccctgcctgtcacgtggccctgcctatccgccccttagtgctttttgttttctaacctcatggggtggtggaggcagccttcagtgagcatggaggggcagggccatccctggctggggcctggagctggcccttcctctacttttccctgctggaagccagaagggcttgaggcctctatgggtgggggcagaaggcagagcctgtgtcccagggggacccacacgaagtcaccagcccataggtccagggaggcaggcagtt

SEQ ID NO: 1921 - DNA, 1559 bp, Homo sapiens
  source 1..1559: mol_type = genomic DNA
agggcgagggcggggacggccgggcgggcgcgccaggctacacacaacccagctgtaccagcatgtgccagagacacgctggccaatcgtgtactcgccgcgctacaacatcaccttcatgggcctggagaagctgcatccctttgatgccggaaaatggggcaaagtgatcaatttcctaaaagaagagaagcttctgtctgacagcatgctggtggaggcgcgggaggcctcggaggaggacctgctggtggtgcacacgaggcgctatcttaatgagctcaagaggaaggtgctgaggccccttcggacccagacaggaggaaccataatggcggggaagctggctgtggagcgaggctgggccatcaacgtggggggtggcttccaccactgctccagcgaccgtggcgggggcttctgtgcctatgcggacatcacgctcgccatcaagtttctgtttgagcgtgtggagggcatctccagggctaccatcattgatcttgatgcccatcagggcaatgggcatgagcgagacttcatggacgacaagcgtgtgtacatcatggatgtctacaaccgccacatctacccaggggaccgctttgccaagcaggccatcaggcggaaggtggagctggagtggggcacagaggatgatgagtacctggataaggtggagaggaacatcaagaaatccctccaggagcacctgcccgacgtggtggtatacaatgcaggcaccgacatcctcgagggggaccgccttggggggctgtccatcagcccagcgggcatcgtgaagcgggatgagctggtgttccggatggtccgtggccgccgggtgcccatccttatggtgacctcaggcgggtaccagaagcgcacagcccgcatcattgctgactccatacttaatctgtttggcctggggctcattgggcctgagtcacccagcgtctccgcacagaactcagacacaccgctgcttccccctgcagtgccctgacccttgctgccctgcctgtcacgtggccctgcctatccgccccttagtgctttttgttttctaacctcatggggtggtggaggcagccttcagtgagcatggaggggcagggccatccctggctggggcctggagctggcccttcctctacttttccctgctggaagccagaagggcttgaggcctctatgggtgggggcagaaggcagagcctgtgtcccagggggacccacacgaagtcaccagcccataggtccagggaggcaggcagttaactgagaattggagaggacaggctaggtcccaggcacagcgagggccctgggcttggggtgttctggttttgagaacggcagacccaggtcggagtgaggaagcttccacctccatcctgactaggcctgcatcctaactgggcctccctccctccccttggtcatgggatttgctgccctctttgccccagagctgaagagctataggcactggtgtggatggcccaggaggtgctggagctaggtctccaggtgggcctggttcccaggcagca

SEQ ID NO: 1922 - DNA, 2084 bp, Homo sapiens
  source 1..2084: mol_type = genomic DNA
tttggtggccccctcctcgcgagttggtgccgctgccacctccgattccgagctttcggcacctctgccgggtggtaccgagccttcccggcgccccctcctctcctcccaccggcctgcccttccccgcgggactatcgcccccacgtttccctcagcccttttctctcccggccgagccgcggcggcagcagcagcagcagcagcagcaggaggaggagcccggtggcggcggtggccggggagcccatggcgtacagtcaaggaggcggcaaaaaaaaagtctgctactactacgacgccttcaccctgccatttctagtgaatctgtgatattggaaattattattatggacagggtcatcccatgaagcctcatagaatccgcatgacccataacttgctgttaaattatggcttatacagaaaaatggaaatatataggccccataaagccactgccgaagaaatgacaaaatatcacagtgatgagtatatcaaatttctacggtcaataagaccagataacatgtctgagtatagtaagcagatgcagagatttaatgttggagaagattgtccagtgtttgatggactctttgagttttgtcagctctcaactggcggttcagttgctggagctgtgaagttaaaccgacaacagactgatatggctgttaattgggctggaggattacatcatgctaagaaatcagaagcatcaggattctgttacgttaatgatattgtgcttgccatccttgaattactaaagtatcatcagagagtcttatatattgatatagatattcatcatggtgatggtgttgaagaagctttttatacaacagatcgtgtaatgacggtatcattccataaatatggggaatactttcctggcacaggagacttgagggatattggtgctggaaaaggcaaatactatgctgtcaattttccaatgagagatggtatagatgatgagtcatatgggcagatatttaagcctattatctcaaaggtgatggagatgtatcaacctagtgctgtggtattacagtgtggtgcagactcattatctggtgatagactgggttgtttcaatctaacagtcaaaggtcatgctaaatgtgtagaagttgtaaaaacttttaacttaccattactgatgcttggaggaggtggctacacaatccgtaatgttgctcgatgttggacatatgagactgcagttgcccttgattgtgagattcccaatgagttgccatataatgattactttgagtattttggaccagacttcaaactgcatattagtccttcaaacatgacaaaccagaacactccagaatatatggaaaagataaaacagcgtttgtttgaaaatttgcgcatgttacctcatgcacctggtgtccagatgcaagctattccagaagatgctgttcatgaagacagtggagatgaagatggagaagatccagacaagagaatttctattcgagcatcagacaagcggatagcttgtgatgaagaattctcagattctgaggatgaaggagaaggaggtcgaagaaatgtggctgatcataagaaaggagcaaagaaagctagaattgaagaagataagaaagaaacagaggacaaaaaaacagacgttaaggaagaagataaatccaaggacaacagtggtgaaaaaacagataccaaaggaaccaaatcagaacagctcagcaacccctgaatttgacagtctcaccaatttcagaaaatcattaaaaagaaaatattgaaaggaaaatgttttctttttgaagacttctggcttcattttatactactttggcatggactgtatttattttcaaatggctttttcgtttttgtttttcttggcaagttttattgtgagtttttctaattatgaagcaaaatttcttttctccaccatgctttatgtgatagtatttaaaattgatgtgagttattatgtcaaaaaaactgatctattaaagaagtaattggcctttctgagctgatttttccatcttttgtaattatctttattaaaaaattgtacttgg

SEQ ID NO: 1923 - DNA, 6656 bp, Homo sapiens
  source 1..6656: mol_type = genomic DNA
agtggatgcgctcacctccctgcggcctcctgaggtggtttggtggccccctcctcgcgagttggtgccgctgccacctccgattccgagctttcggcacctctgccgggtggtaccgagccttcccggcgccccctcctctcctcccaccggcctgcccttccccgcgggactatcgcccccacgtttccctcagcccttttctctcccggccgagccgcggcggcagcagcagcagcagcagcagcaggaggaggagcccggtggcggcggtggccggggagcccatggcgtacagtcaaggaggcggcaaaaaaaaagtctgctactactacgacggtgatattggaaattattattatggacagggtcatcccatgaagcctcatagaatccgcatgacccataacttgctgttaaattatggcttatacagaaaaatggaaatatataggccccataaagccactgccgaagaaatgacaaaatatcacagtgatgagtatatcaaatttctacggtcaataagaccagataacatgtctgagtatagtaagcagatgcagagatttaatgttggagaagattgtccagtgtttgatggactctttgagttttgtcagctctcaactggcggttcagttgctggagctgtgaagttaaaccgacaacagactgatatggctgttaattgggctggaggattacatcatgctaagaaatcagaagcatcaggattctgttacgttaatgatattgtgcttgccatccttgaattactaaagtatcatcagagagtcttatatattgatatagatattcatcatggtgatggtgttgaagaagctttttatacaacagatcgtgtaatgacggtatcattccataaatatggggaatactttcctggcacaggagacttgagggatattggtgctggaaaaggcaaatactatgctgtcaattttccaatgagagatggtatagatgatgagtcatatgggcagatatttaagcctattatctcaaaggtgatggagatgtatcaacctagtgctgtggtattacagtgtggtgcagactcattatctggtgatagactgggttgtttcaatctaacagtcaaaggtcatgctaaatgtgtagaagttgtaaaaacttttaacttaccattactgatgcttggaggaggtggctacacaatccgtaatgttgctcgatgttggacatatgagactgcagttgcccttgattgtgagattcccaatgagttgccatataatgattactttgagtattttggaccagacttcaaactgcatattagtccttcaaacatgacaaaccagaacactccagaatatatggaaaagataaaacagcgtttgtttgaaaatttgcgcatgttacctcatgcacctggtgtccagatgcaagctattccagaagatgctgttcatgaagacagtggagatgaagatggagaagatccagacaagagaatttctattcgagcatcagacaagcggatagcttgtgatgaagaattctcagattctgaggatgaaggagaaggaggtcgaagaaatgtggctgatcataagaaaggagcaaagaaagctagaattgaagaagataagaaagaaacagaggacaaaaaaacagacgttaaggaagaagataaatccaaggacaacagtggtgaaaaaacagataccaaaggaaccaaatcagaacagctcagcaacccctgaatttgacagtctcaccaatttcagaaaatcattaaaaagaaaatattgaaaggaaaatgttttctttttgaagacttctggcttcattttatactactttggcatggactgtatttattttcaaatggctttttcgtttttgtttttcttggcaagttttattgtgagtttttctaattatgaagcaaaatttcttttctccaccatgctttatgtgatagtatttaaaattgatgtgagttattatgtcaaaaaaactgatctattaaagaagtaattggcctttctgagctgatttttccatcttttgtaattatctttattaaaaaattgtacttggattatcttttgtctgtttattactacaatatgaagtcttgtttcagtggctaatgacatcatttctgtagacttacaatacactctaggtgaaagataatgattacagcttgaaagataactatttgctgtttctttgggaagagtatttatagtaattattacttatctttgcaatagaaattctaccaccttgccctctatagcttagccagttagtatcagtgaagattaacatcccattacaatttatgaaataatacagactctgcaattgagatgtaggagttctttgagttgacccaaagattctcaaaattgaaatggaaattctgaattgaaagaagaaactgaccagaacttgtattgaccagacttgcctatagtatattgctggtttaaaatggaacctgcagacaaaacctgtttcttttactgcatttacatggcatccaggttccattattatttacgtgacatccaggtttctaactcaaggaaataaacacaactgatttatcattcagcaactacttattgtgtgtctgcccattttaagactgtaggagtgtaactgaatataatggaaaaatgctttcactcagagcttacactcagagcttacattctagtagcaggaagcagacaaatgggggtaactcctgctactaagatgtgcaaagaagacaaaacattttaggaacttgccaaaatcagtgaaatctccctttttgtcaggcccacattgattcttttgagattaaaaattacagaatgccagaagataattcagtcaaaagtatttctcttcagtgcagtaaaatattaaaagaaaaaatatttctctacaagcctcttaaatgtttcagacattcacaatagcacctagacttttgtaatgaacagctgtgcacccaccccgacttaacaaatattttacttttgctatatttgcttcggtgtttttttcttaaaatacaccgaaattgaagctctctttgtgtactttgtcgtttgtaatcctccctccctcccagccttaagaagtaatcaccattgtgattattttatccatgtttttgtgaatattttacccatgtttttgtacttttgctacatatttgttatcaatctgtaaacctttatgacattaggaactaagaaacttagtcccttcgttagggggataatgaaatgtatttagtgtttgtgaaacatagatggtatgtatttggacaattctgtaactttgctttttttatttttatttttccatagcttattggggaacaggtggtgtttggttacatgattaagttctttagtggtgatttgtgggattttggtggacccatcacccaagcagtgtacactgcaccctatttgtaatcttttatccctcgcccccctcccaccatgcctcccgtctaccatgatgatcctgttttaaataagaaaataccatttcgcaggctccagatgttctggcatcctccctgtggatttcccagtgcctgcagctcacaggacaacaggggctgtggtagagtcacctatgagatcctggagtagtggatggaggagatggaacagtgaagacggaaactgagctcagtatccgggtgccaggagacaaaggccctttgctttttttcatttaatattctgatctacccctgttgacacatgttaagtatagttcattttgactgctatgtattatgttccattgtgtgaacatactgaaattgtacacttcaatactatactggatctccttgggtgtatttaagaggttttgtttttctaagtagttggttatatacaactaaaacctcaagagaactatctaaagcaatttcagcaaggtgatttggtacagcattaataaacagaaatcagtaacacttagtgaccaagtctgttggaagaacaaagacccccatttgtaataacaaaatttttagaaataatatgtaaagaagctatggttcttgtgtctagtaaggtcaatgtaacatagtaagatgtcagaataccctaatactttaaaaaattcatataggataaaaatgatatttgaaattggcaaggaaagacattattttgtaagtggaattgggacaacaactggtaaccaaatggaaaacccagttttctgccctccactagaagatttaaataggaaaagataaaactaccaaaaacctaaactcttaaagcaaatggattgaagaaggcctaagtgtgacaccaaactcaactataaaagatatatttgataacaaaaaaaaaattagttcagtggaccaacaaaaacttagaagacaagtcaagaaaaatgacaaaagacagagtgggaggcagatttgtaactcatccaggtcaaaaggctcatatctaaagatagtagaggaacaaaatgtataaggatgtgaactgggaaacaaatacatataaatagtttgtaaatatgaaaagatctttaacctcagtaaataaaaagctatagagagacttattttttaacttagttttttaaacctattatgtttatttattttttctttttttgagacggagtctcgctgttgcccaggctggtgtgcaatggcgcaatctcggctcactgcaacctccgcctcccaggttgaagccattctcctgcctcagcctcctgagtagctgggattacaggcgcctgtcaccacgcccagctaattgttcgcatttttagtagagacggggtttcactatgttggccaggctggcctcgaactcctgacctcatgatccacccaccttggccttccaaagtgctgggattacaggtgtgagctgccgcacctggctgtttatctcttttttttagagaaaggatctcggtcacccaggatggagtgtggtagcctgatcatatctcactacatcttagaacttctaggcttagggtattctcccacctcagcctcccaagtagctgggactacaagtgtgcaccatcacacctagctgatttttacatttttattttggagagatggtgtctccctgtgttgcccaggctggtcacaaactcctaggctcaagcgattctcctgactcaggcatgagccaccgtacccggcctaaacctatcatgttacagacttagaaagcaactattgtcaagtgtttgaggaaactcaggtcaggtttggtaaactaagatattaactcaagtaaagctctttaattcatttaatgaaggtgccacattgtctcagttctctatggcatgggtgaatgctgttctaagtcagcattggtactctaagctagttacatcatatctaagctttgcccttctaccagagctgctagcattctgtcaatgggcaattatttgaagttcttacattgaagttagtcacctacatcttctgttttttatggttttgatgtagtaatactgctgaagtttttttgataactgcgattcataatatttgttattcatattgtgatataaatgataagggcttttgaaaacaagtagtaatcatttcaatagcttaggatctccaccataatcttaggaaaattactaacctctgtgcctcagttgcttcatcatttaaaatgaggaaaataatagtccctacttaataggtttgttgtgaggattgagttaataacatagttaatgctcagtaagggttagctgctatttttttttcttttttttttgaaagagtctcactctgttgcccaggttggagtgcagtggcatgatcttggctcactgcatcctctgcttcctaggttcaggtgattctcatgcttcagcctcccaagcagctgggagtacaggtgtgcaccaccacacctggctaatttttgtatatttagtagagacgggttctcaccatattgtccaggctggtcttgaactccttacctcaaatgatccacccgcctgggcctcccaaagtgctgggattacaagcatgagccaccgcgcctggcttgctattgttatgaggtaaaggtagatagatgggtgagagtggtgccaggggaagtgttaaatttttgagtgttcctttagatgccagatgggttgtatctgagccttttattgcagtttgatgcctactagtgtgaagactactaggtcatagtggatagagaagcaatcttttggagacctgattttagcaaggatacgaataatatttgacaactttggggggatcttgatgcctctgtaatttactcaaggataatctcaagaaaaatggcattaagtagattacagaaaaaatagaactatcatattgttattattggctatttacatgagcaatgcggagaaatgtttaggattacagcatttagaagcttctcaattgctgcatttcctcactgtaccacaagatggcagatactgcatttaaaatttttttttctgtgtgttttctcttatagtcacttggtggccatgtaacaagcagagcaacatgtattaacagattctttttgaatgcaatattggattaaaaactttgaattaaactacaa

SEQ ID NO: 1924 - DNA, 9874 bp, Homo sapiens
  source 1..9874: mol_type = genomic DNA
gcaggttgttcaccctaacagggcctctaacctcgagcccgaaacggcctccttctccagccgtgccccttcctcccccgtggaggccgcagtggatgcgctcacctccctgcggcctcctgaggtggtttggtggccccctcctcgcgagttggtgccgctgccacctccgattccgagctttcggcacctctgccgggtggtaccgagccttcccggcgccccctcctctcctcccaccggcctgcccttccccgcgggactatcgcccccacgtttccctcagcccttttctctcccggccgagccgcggcggcagcagcagcagcagcagcagcaggaggaggagcccggtggcggcggtggccggggagcccatggcgtacagtcaaggaggcggcaaaaaaaaagtctgctactactacgacggtgatattggaaattattattatggacagggtcatcccatgaagcctcatagaatccgcatgacccataacttgctgttaaattatggcttatacagaaaaatggaaatatataggccccataaagccactgccgaagaaatgacaaaatatcacagtgatgagtatatcaaatttctacggtcaataagaccagataacatgtctgagtatagtaagcagatgcagagatttaatgttggagaagattgtccagtgtttgatggactctttgagttttgtcagctctcaactggcggttcagttgctggagctgtgaagttaaaccgacaacagactgatatggctgttaattgggctggaggattacatcatgctaagaaatcagaagcatcaggattctgttacgttaatgatattgtgcttgccatccttgaattactaaagtatcatcagagagtcttatatattgatatagatattcatcatggtgatggtgttgaagaagctttttatacaacagatcgtgtaatgacggtatcattccataaatatggggaatactttcctggcacaggagacttgagggatattggtgctggaaaaggcaaatactatgctgtcaattttccaatgagagatggtatagatgatgagtcatatgggcagatatttaagcctattatctcaaaggtgatggagatgtatcaacctagtgctgtggtattacagtgtggtgcagactcattatctggtgatagactgggttgtttcaatctaacagtcaaaggtcatgctaaatgtgtagaagttgtaaaaacttttaacttaccattactgatgcttggaggaggtggctacacaatccgtaatgttgctcgatgttggacatatgagactgcagttgcccttgattgtgagattcccaatgagttgccatataatgattactttgagtattttggaccagacttcaaactgcatattagtccttcaaacatgacaaaccagaacactccagaatatatggaaaagataaaacagcgtttgtttgaaaatttgcgcatgttacctcatgcacctggtgtccagatgcaagctattccagaagatgctgttcatgaagacagtggagatgaagatggagaagatccagacaagagaatttctattcgagcatcagacaagcggatagcttgtgatgaagaattctcagattctgaggatgaaggagaaggaggtcgaagaaatgtggctgatcataagaaaggagcaaagaaagctagaattgaagaagataagaaagaaacagaggacaaaaaaacagacgttaaggaagaagataaatccaaggacaacagtggtgaaaaaacagataccaaaggaaccaaatcagaacagctcagcaacccctgaatttgacagtctcaccaatttcagaaaatcattaaaaagaaaatattgaaaggaaaatgttttctttttgaagacttctggcttcattttatactactttggcatggactgtatttattttcaaatggctttttcgtttttgtttttcttggcaagttttattgtgagtttttctaattatgaagcaaaatttcttttctccaccatgctttatgtgatagtatttaaaattgatgtgagttattatgtcaaaaaaactgatctattaaagaagtaattggcctttctgagctgatttttccatcttttgtaattatctttattaaaaaattgtacttggattatcttttgtctgtttattactacaatatgaagtcttgtttcagtggctaatgacatcatttctgtagacttacaatacactctaggtgaaagataatgattacagcttgaaagataactatttgctgtttctttgggaagagtatttatagtaattattacttatctttgcaatagaaattctaccaccttgccctctatagcttagccagttagtatcagtgaagattaacatcccattacaatttatgaaataatacagactctgcaattgagatgtaggagttctttgagttgacccaaagattctcaaaattgaaatggaaattctgaattgaaagaagaaactgaccagaacttgtattgaccagacttgcctatagtatattgctggtttaaaatggaacctgcagacaaaacctgtttcttttactgcatttacatggcatccaggttccattattatttacgtgacatccaggtttctaactcaaggaaataaacacaactgatttatcattcagcaactacttattgtgtgtctgcccattttaagactgtaggagtgtaactgaatataatggaaaaatgctttcactcagagcttacactcagagcttacattctagtagcaggaagcagacaaatgggggtaactcctgctactaagatgtgcaaagaagacaaaacattttaggaacttgccaaaatcagtgaaatctccctttttgtcaggcccacattgattcttttgagattaaaaattacagaatgccagaagataattcagtcaaaagtatttctcttcagtgcagtaaaatattaaaagaaaaaatatttctctacaagcctcttaaatgtttcagacattcacaatagcacctagacttttgtaatgaacagctgtgcacccaccccgacttaacaaatattttacttttgctatatttgcttcggtgtttttttcttaaaatacaccgaaattgaagctctctttgtgtactttgtcgtttgtaatcctccctccctcccagccttaagaagtaatcaccattgtgattattttatccatgtttttgtgaatattttacccatgtttttgtacttttgctacatatttgttatcaatctgtaaacctttatgacattaggaactaagaaacttagtcccttcgttagggggataatgaaatgtatttagtgtttgtgaaacatagatggtatgtatttggacaattctgtaactttgctttttttatttttatttttccatagcttattggggaacaggtggtgtttggttacatgattaagttctttagtggtgatttgtgggattttggtggacccatcacccaagcagtgtacactgcaccctatttgtaatcttttatccctcgcccccctcccaccatgcctcccgtctaccatgatgatcctgttttaaataagaaaataccatttcgcaggctccagatgttctggcatcctccctgtggatttcccagtgcctgcagctcacaggacaacaggggctgtggtagagtcacctatgagatcctggagtagtggatggaggagatggaacagtgaagacggaaactgagctcagtatccgggtgccaggagacaaaggccctttgctttttttcatttaatattctgatctacccctgttgacacatgttaagtatagttcattttgactgctatgtattatgttccattgtgtgaacatactgaaattgtacacttcaatactatactggatctccttgggtgtatttaagaggttttgtttttctaagtagttggttatatacaactaaaacctcaagagaactatctaaagcaatttcagcaaggtgatttggtacagcattaataaacagaaatcagtaacacttagtgaccaagtctgttggaagaacaaagacccccatttgtaataacaaaatttttagaaataatatgtaaagaagctatggttcttgtgtctagtaaggtcaatgtaacatagtaagatgtcagaataccctaatactttaaaaaattcatataggataaaaatgatatttgaaattggcaaggaaagacattattttgtaagtggaattgggacaacaactggtaaccaaatggaaaacccagttttctgccctccactagaagatttaaataggaaaagataaaactaccaaaaacctaaactcttaaagcaaatggattgaagaaggcctaagtgtgacaccaaactcaactataaaagatatatttgataacaaaaaaaaaattagttcagtggaccaacaaaaacttagaagacaagtcaagaaaaatgacaaaagacagagtgggaggcagatttgtaactcatccaggtcaaaaggctcatatctaaagatagtagaggaacaaaatgtataaggatgtgaactgggaaacaaatacatataaatagtttgtaaatatgaaaagatctttaacctcagtaaataaaaagctatagagagacttattttttaacttagttttttaaacctattatgtttatttattttttctttttttgagacggagtctcgctgttgcccaggctggtgtgcaatggcgcaatctcggctcactgcaacctccgcctcccaggttgaagccattctcctgcctcagcctcctgagtagctgggattacaggcgcctgtcaccacgcccagctaattgttcgcatttttagtagagacggggtttcactatgttggccaggctggcctcgaactcctgacctcatgatccacccaccttggccttccaaagtgctgggattacaggtgtgagctgccgcacctggctgtttatctcttttttttagagaaaggatctcggtcacccaggatggagtgtggtagcctgatcatatctcactacatcttagaacttctaggcttagggtattctcccacctcagcctcccaagtagctgggactacaagtgtgcaccatcacacctagctgatttttacatttttattttggagagatggtgtctccctgtgttgcccaggctggtcacaaactcctaggctcaagcgattctcctgactcaggcatgagccaccgtacccggcctaaacctatcatgttacagacttagaaagcaactattgtcaagtgtttgaggaaactcaggtcaggtttggtaaactaagatattaactcaagtaaagctctttaattcatttaatgaaggtgccacattgtctcagttctctatggcatgggtgaatgctgttctaagtcagcattggtactctaagctagttacatcatatctaagctttgcccttctaccagagctgctagcattctgtcaatgggcaattatttgaagttcttacattgaagttagtcacctacatcttctgttttttatggttttgatgtagtaatactgctgaagtttttttgataactgcgattcataatatttgttattcatattgtgatataaatgataagggcttttgaaaacaagtagtaatcatttcaatagcttaggatctccaccataatcttaggaaaattactaacctctgtgcctcagttgcttcatcatttaaaatgaggaaaataatagtccctacttaataggtttgttgtgaggattgagttaataacatagttaatgctcagtaagggttagctgctatttttttttcttttttttttgaaagagtctcactctgttgcccaggttggagtgcagtggcatgatcttggctcactgcatcctctgcttcctaggttcaggtgattctcatgcttcagcctcccaagcagctgggagtacaggtgtgcaccaccacacctggctaatttttgtatatttagtagagacgggttctcaccatattgtccaggctggtcttgaactccttacctcaaatgatccacccgcctgggcctcccaaagtgctgggattacaagcatgagccaccgcgcctggcttgctattgttatgaggtaaaggtagatagatgggtgagagtggtgccaggggaagtgttaaatttttgagtgttcctttagatgccagatgggttgtatctgagccttttattgcagtttgatgcctactagtgtgaagactactaggtcatagtggatagagaagcaatcttttggagacctgattttagcaaggatacgaataatatttgacaactttggggggatcttgatgcctctgtaatttactcaaggataatctcaagaaaaatggcattaagtagattacagaaaaaatagaactatcatattgttattattggctatttacatgagcaatgcggagaaatgtttaggattacagcatttagaagcttctcaattgctgcatttcctcactgtaccacaagatggcagatactgcatttaaaatttttttttctgtgtgttttctcttatagtcacttggtggccatgtaacaagcagagcaacatgtattaacagattctttttgaatgcaatattggattaaaaactttgaattaaactacaattaagtttactgatttaggttttcctataagaattataacactaatttctaagttttacatctgcaaaacacagtagagtgtatctggtagtcattgactaattgtgactttgctagtcagacaaaatggaactgaatattagagccagaataattttctgttttgactggtggtaagaatcagttagtatacagaatgggaaagaattgaaatttatttctaggaattatagttatagtgaagttaatattcaggggcattgggtgcttgttccacgacttttgtttactgaactaagtacctaacccctttggtctttgaacactgcagagttatgattaggattattaatgaaaaattcttttttagtagaacaaacagttaaggacagaagacaccttgattagattctgttatttgctctttttattaagattgtttttactctaaatgttaaagaaatgtataattatttctaaggtaaaatgagtagcaggattctgaataggagattttttttggccagacccattttgcagccagtggtttgtatttaggagtgagttgaacaaagaagactctaatctgtttttgtgttgtggattttttattctattgataaatcagtagcttccagcttctcttgtatcctctactagtcatcttttttgtttcttcagaaataaacatccagggtcacttccctgcccttgccatatacttactaggatgatgtacaggtaaaacttttaaaggaaagtacggacaggcaattcctaaagtaaaagagagcacattatcaaaactggctgtacttaacaaataccaacaaaaagtcattacacttctggcaacaaataatgtttgatttaaaaagacaagaatttccccttttgctcttattttttaaatatgctatgtccttaagtgagaaatgcacttcaaaaattttcttattctgaagtctagccggaaagtttgaacttgtgttgcctttggctagactaggtgaaattaaggggcttaagagggcactgttgtgtggccctgtggtagataatagccctccaagcatgaggatgggagatctaccattcaccagtatttccaaagttatattcttaaaaaggctagatttctaatttccgtagaatctaggtatgttcttttcaactcagcatctgataagaaagtttgggcaagtaggtgcgaaaaatttactctagataccattttccaggaaaaaatataattcaagtccaacgtattactagctgtcaccttccccaacaatcaaataagcattgttattgtcaaacacatttacttgtatagttcagtgttatatgtaatggacttaggtataattcctgtgctattcccttttgatgccaaacacccttttgtaagctgttttgtttgaaatccaaatttatatgtcttaaagtaaatggcagcattgggctttcttaatgtaatgactcttctgccatcctatttctagagttaggcagaaaattctgtaaatctatcttatttccagtctgtttgtgactatggtgggcaataaatctgatttcccagaaaaacacatctggacccctataggtaaggtaaacaagcctcatcttaaattgtttgtacttccgacctgacctcaaaacaccatcatcatctagagcagcaacaagtaaagaacaatgcactggaaatcacatatatgggtctagcaccagcctttacattacacaactttgctttgggcaagtcatttaaatttctgtgcttcagtttactaaatctatgaaactgactaggtaacagctgacatgcttttccagcactccgtcttttacctgtctgatgtcacaaattgatcattcctttctggccttgagatgcgtatcaacccagatagtcattaacccagatagttggcattcaggataaaatgtttttgcctttcctgtcctgcaagctctttaaagtccaaaatatgcctttatatctttatgtgtaataggtatgaaatctatttcttggttgttgaataggataggcttattagacattctaaagtcaacttttttctcatatttaaacatttacccgtagaaattcagttttttaaagttttaagtcagttgattgtaccaaacattactattaaaaaaaaatcaaagtcagagaccagagtttccctgcatcagcgttcagtcaggagacaggaactatactaatttgaacatgtaaagttaaatataatccttaataataacaggattggaataagggataaaagaaagagaattccttctatatatatgtatacacacacatatatatatatacatgtgtatatatgtgtgtgtatgtatattatataatatacatacacacacacaaagaatgtcagacaaggagcagccaccattctgcttactttcactggattaagagtttcataagggcaagggttttgtttgtcttacactccactggggattaatctccagtgtctagaacagtgcctaacacataaataaagcctcaattattatttgtggaatggaatggaatttgagtgaaatggaatgggaatagaatggactggaatggaaatagaagtgggaaggggaatggaaggggatagaagaggattgaagaggacagaaggagatgggataagatgggatgggataggatcgaatctcaggtccaggagtcagaataactgaatcctattccagttctgccatcaacaagtcctgtgaaatttggaaagtcacttaaccctctggccttgtagaatatctcagtgggcatgtctgatgtttcttcatggttagatataggttgcatgttttgggcaagaatatcacaggaatgatgctgtgttctcagtgcacccagtcaggtaatgcatgatttcaatttctctcattactgatgatgttaactttaatcacttagtgaatgagaacatgagcatcattttgaaagcaaactgcaaagttttgatgtcaacattttagcaattacgtataatttcccccaaggatactggctttgagataatgtaaatatacatgggaaagacaaagctcaaataaaggaaaaagaccca

SEQ ID NO: 1925 - DNA, 2000 bp, Homo sapiens
  source 1..2000: mol_type = genomic DNA
gttcccggcccggcacagttagaacgagaccctcttcctggcgcagcccccgcggttcctgcgggcgggaatcagggggcccgcccgtcttgtctcctgcctctcccccttcggccgtgcagtccgcagcctcgaaggtggccgccgctggggacggcgccggcctaccccgccttggtggtggcggcggcgaagggggcggcccattctctcccttctcccgcccaccattcgtggcaacgcaggtgatattggaaattattattatggacagggtcatcccatgaagcctcatagaatccgcatgacccataacttgctgttaaattatggcttatacagaaaaatggaaatatataggccccataaagccactgccgaagaaatgacaaaatatcacagtgatgagtatatcaaatttctacggtcaataagaccagataacatgtctgagtatagtaagcagatgcagagatttaatgttggagaagattgtccagtgtttgatggactctttgagttttgtcagctctcaactggcggttcagttgctggagctgtgaagttaaaccgacaacagactgatatggctgttaattgggctggaggattacatcatgctaagaaatcagaagcatcaggattctgttacgttaatgatattgtgcttgccatccttgaattactaaagtatcatcagagagtcttatatattgatatagatattcatcatggtgatggtgttgaagaagctttttatacaacagatcgtgtaatgacggtatcattccataaatatggggaatactttcctggcacaggagacttgagggatattggtgctggaaaaggcaaatactatgctgtcaattttccaatgagagatggtatagatgatgagtcatatgggcagatatttaagcctattatctcaaaggtgatggagatgtatcaacctagtgctgtggtattacagtgtggtgcagactcattatctggtgatagactgggttgtttcaatctaacagtcaaaggtcatgctaaatgtgtagaagttgtaaaaacttttaacttaccattactgatgcttggaggaggtggctacacaatccgtaatgttgctcgatgttggacatatgagactgcagttgcccttgattgtgagattcccaatgagttgccatataatgattactttgagtattttggaccagacttcaaactgcatattagtccttcaaacatgacaaaccagaacactccagaatatatggaaaagataaaacagcgtttgtttgaaaatttgcgcatgttacctcatgcacctggtgtccagatgcaagctattccagaagatgctgttcatgaagacagtggagatgaagatggagaagatccagacaagagaatttctattcgagcatcagacaagcggatagcttgtgatgaagaattctcagattctgaggatgaaggagaaggaggtcgaagaaatgtggctgatcataagaaaggagcaaagaaagctagaattgaagaagataagaaagaaacagaggacaaaaaaacagacgttaaggaagaagataaatccaaggacaacagtggtgaaaaaacagataccaaaggaaccaaatcagaacagctcagcaacccctgaatttgacagtctcaccaatttcagaaaatcattaaaaagaaaatattgaaaggaaaatgttttctttttgaagacttctggcttcattttatactactttggcatggactgtatttattttcaaatggctttttcgtttttgtttttcttggcaagttttattgtgagtttttctaattatgaagcaaaatttcttttctccaccatgctttatgtgatagtatttaaaattgatgtgagttattatgtcaaaaaaactgatctattaaagaagtaattggcctttctgagctgatttttccatcttttgtaattatctttattaaaaaattgtacttgg

SEQ ID NO: 1926 - DNA, 1959 bp, Homo sapiens
  source 1..1959: mol_type = genomic DNA
agcacgcacggccggggaggggctggcggcggccgcgggcggcgggcggcggaggtgcggggcctgctcccgccggcaccatggccaagaccgtggcctatttctacgaccccgacgtgggcaacttccactacggagctggacaccctatgaagccccatcgcctggcattgacccatagcctggtcctgcattacggtctctataagaagatgatcgtcttcaagccataccaggcctcccaacatgacatgtgccgcttccactccgaggactacattgacttcctgcagagagtcagccccaccaatatgcaaggcttcaccaagagtcttaatgccttcaacgtaggcgatgactgcccagtgtttcccgggctctttgagttctgctcgcgttacacaggcgcatctctgcaaggagcaacccagctgaacaacaagatctgtgatattgccattaactgggctggtggtctgcaccatgccaagaagtttgaggcctctggcttctgctatgtcaacgacattgtgattggcatcctggagctgctcaagtaccaccctcgggtgctctacattgacattgacatccaccatggtgacggggttcaagaagctttctacctcactgaccgggtcatgacggtgtccttccacaaatacggaaattacttcttccctggcacaggtgacatgtatgaagtcggggcagagagtggccgctactactgtctgaacgtgcccctgcgggatggcattgatgaccagagttacaagcaccttttccagccggttatcaaccaggtagtggacttctaccaacccacgtgcattgtgctccagtgtggagctgactctctgggctgtgatcgattgggctgctttaacctcagcatccgagggcatggggaatgcgttgaatatgtcaagagcttcaatatccctctactcgtgctgggtggtggtggttatactgtccgaaatgttgcccgctgctggacatatgagacatcgctgctggtagaagaggccattagtgaggagcttccctatagtgaatacttcgagtactttgccccagacttcacacttcatccagatgtcagcacccgcatcgagaatcagaactcacgccagtatctggaccagatccgccagacaatctttgaaaacctgaagatgctgaaccatgcacctagtgtccagattcatgacgtgcctgcagacctcctgacctatgacaggactgatgaggctgatgcagaggagaggggtcctgaggagaactatagcaggccagaggcacccaatgagttctatgatggagaccatgacaatgacaaggaaagcgatgtggagatttaagagtggcttgggatgctgtgtcccaaggaatttcttttcacctcttggttgggctggagggaaaaggagtggctcctagagtcctgggggtcaccccagggcttttgctgactctgggaaagagtctggagaccacatttggttctcgaaccatctacctgcttttcctctctctcccaaggcctgacaatggtacctattagggatgagatacagacaaggatagctatctgggacattattggcagtgggccctggaggccagtccctagccccccttgccccttatttcttccctgcttccctcgaacccagagatttttgagggatgaacgggtagacaaggactgagattgcctctgacttcctcctcccctgggttctgacttcttcctccccttgcttccagggaagatgaagagagagagatttggaaggggctctggctccctaacacctgaatcccagatgatgggaagtatgttttcaagtgtggggaggatatgaaaatgttctgttctcacttttggctttatgtccattttaccactgtttttatccaataaactaagtcggtattttttgtaccttt

SEQ ID NO: 1927 - DNA, 8976 bp, Homo sapiens
  source 1..8976: mol_type = genomic DNA
ggaggttgtggggccgccgccgcggagcaccgtccccgccgccgcccgagcccgagcccgagcccgcgcacccgcccgcgccgccgccgccgccgcccgaacagcctcccagcctgggcccccggcggcgccgtggccgcgtcccggctgtcgccgcccgagcccgagcccgcgcgccggcgggtggcggcgcaggctgaggagatgcggcgcggagcgccggagcagggctagagccggccgccgccgcccgccgcggtaagcgcagccccggcccggcgcccgcgggccattgtccgccgcccgccccgcgccccgcgcagcctgcaggccttggagcccgcggcaggtggacgccgccggtccacacccgccccgcgcgcggccgtgggaggcgggggccagcgctggccgcgcgccgtgggacccgccggtccccagggccgcccggccccttctggacctttccacccgcgccgcgaggcggcttcgcccgccggggcgggggcgcgggggtgggcacggcaggcagcggcgccgtctcccggtgcggggcccgcgccccccgagcaggttcatctgcagaagccagcggacgcctctgttcaacttgtgggttacctggctcatgagaccttgccggcgaggctcggcgcttgaacgtctgtgacccagccctcaccgtcccggtacttgtatgtgttggtgggagtttggagctcgttggagctatcgtttccgtggaaattttgagccatttcgaatcacttaaaggagtggacattgctagcaatgagctcccaaagccatccagatggactttctggccgagaccagccagtggagctgctgaatcctgcccgcgtgaaccacatgcccagcacggtggatgtggccacggcgctgcctctgcaagtggccccctcggcagtgcccatggacctgcgcctggaccaccagttctcactgcctgtggcagagccggccctgcgggagcagcagctgcagcaggagctcctggcgctcaagcagaagcagcagatccagaggcagatcctcatcgctgagttccagaggcagcacgagcagctctcccggcagcacgaggcgcagctccacgagcacatcaagcaacaacaggagatgctggccatgaagcaccagcaggagctgctggaacaccagcggaagctggagaggcaccgccaggagcaggagctggagaagcagcaccgggagcagaagctgcagcagctcaagaacaaggagaagggcaaagagagtgccgtggccagcacagaagtgaagatgaagttacaagaatttgtcctcaataaaaagaaggcgctggcccaccggaatctgaaccactgcatttccagcgaccctcgctactggtacgggaaaacgcagcacagttcccttgaccagagttctccaccccagagcggagtgtcgacctcctataaccacccggtcctgggaatgtacgacgccaaagatgacttccctcttaggaaaacagcttctgaaccgaatctgaaattacggtccaggctaaagcagaaagtggccgaaagacggagcagccccctgttacgcaggaaagacgggccagtggtcactgctctaaaaaagcgtccgttggatgtcacagactccgcgtgcagcagcgccccaggctccggacccagctcacccaacaacagctccgggagcgtcagcgcggagaacggtatcgcgcccgccgtccccagcatcccggcggagacgagtttggcgcacagacttgtggcacgagaaggctcggccgctccacttcccctctacacatcgccatccttgcccaacatcacgctgggcctgcctgccaccggcccctctgcgggcacggcgggccagcaggacgccgagagactcacccttcccgccctccagcagaggctctcccttttccccggcacccacctcactccctacctgagcacctcgcccttggagcgggacggaggggcagcgcacagccctcttctgcagcacatggtcttactggagcagccgccggcacaagcacccctcgtcacaggcctgggagcactgcccctccacgcacagtccttggttggtgcagaccgggtgtccccctccatccacaagctgcggcagcaccgcccactggggcggacccagtcggccccgctgccccagaacgcccaggctctgcagcacctggtcatccagcagcagcatcagcagtttctggagaaacacaagcagcagttccagcagcagcaactgcagatgaacaagatcatccccaagccaagcgagccagcccggcagccggagagccacccggaggagacggaggaggagctccgtgagcaccaggctctgctggacgagccctacctggaccggctgccggggcagaaggaggcgcacgcacaggccggcgtgcaggtgaagcaggagcccattgagagcgatgaggaagaggcagagcccccacgggaggtggagccgggccagcgccagcccagtgagcaggagctgctcttcagacagcaagccctcctgctggagcagcagcggatccaccagctgaggaactaccaggcgtccatggaggccgccggcatccccgtgtccttcggcggccacaggcctctgtcccgggcgcagtcctcacccgcgtctgccaccttccccgtgtctgtgcaggagccccccaccaagccgaggttcacgacaggcctcgtgtatgacacgctgatgctgaagcaccagtgcacctgcgggagtagcagcagccaccccgagcacgccgggaggatccagagcatctggtcccgcctgcaggagacgggcctccggggcaaatgcgagtgcatccgcggacgcaaggccaccctggaggagctacagacggtgcactcggaagcccacaccctcctgtatggcacgaaccccctcaaccggcagaaactggacagtaagaaacttctaggctcgctcgcctccgtgttcgtccggctcccttgcggtggtgttggggtggacagtgacaccatatggaacgaggtgcactcggcgggggcagcccgcctggctgtgggctgcgtggtagagctggtcttcaaggtggccacaggggagctgaagaatggctttgctgtggtccgcccccctggacaccatgcggaggagagcacgcccatgggcttttgctacttcaactccgtggccgtggcagccaagcttctgcagcagaggttgagcgtgagcaagatcctcatcgtggactgggacgtgcaccatggaaacgggacccagcaggctttctacagcgaccccagcgtcctgtacatgtccctccaccgctacgacgatgggaacttcttcccaggcagcggggctcctgatgaggtgggcacagggcccggcgtgggtttcaacgtcaacatggctttcaccggcggcctggacccccccatgggagacgctgagtacttggcggccttcagaacggtggtcatgccgatcgccagcgagtttgccccggatgtggtgctggtgtcatcaggcttcgatgccgtggagggccaccccacccctcttgggggctacaacctctccgccagatgcttcgggtacctgacgaagcagctgatgggcctggctggcggccggattgtcctggccctcgagggaggccacgacctgaccgccatttgcgacgcctcggaagcatgtgtttctgccttgctgggaaacgagcttgatcctctcccagaaaaggttttacagcaaagacccaatgcaaacgctgtccgttccatggagaaagtcatggagatccacagcaagtactggcgctgcctgcagcgcacaacctccacagcggggcgttctctgatcgaggctcagacttgcgagaacgaagaagccgagacggtcaccgccatggcctcgctgtccgtgggcgtgaagcccgccgaaaagagaccagatgaggagcccatggaagaggagccgcccctgtagcactccctcgaagctgctgttctcttgtctgtctgtctctgtcttgaagctcagccaagaaactttcccgtgtcacgcctgcgtcccaccgtggggctctcttggagcacccagggacacccagcgtgcaacagccacgggaagcctttctgccgcccaggcccacaggtctcgagacgcacatgcacgcctgggcgtggcagcctcacagggaacacgggacagacgccggcgacgcgcagacacacggacacgcggaagccaagcacactctggcgggtcccgcaagggacgccgtggaagaaaggagcctgtggcaacaggcggccgagctgccgaattcagttgacacgaggcacagaaaacaaatatcaaagatctaataatacaaaacaaacttgattaaaactggtgcttaaagtttattacccacaactccacagtctctgtgtaaaccactcgactcatcttgtagcttatttttttttaaagaggacgttttctacggctgtggcccgcctctgtgaaccatagcggtgtgcggcggggggtctgcacccgggtgggggacagagggacctttaaagaaaacaaaactggacagaaacaggaatgtgagctgggggagctggcttgagtttctcaaaagccatcggaagatgcgagtttgtgcctttttttttattgctctggtggatttttgtggctgggttttctgaagtctgaggaacaatgccttaagaaaaaacaaacagcaggaatcggtgggacagtttcctgtggccagccgagcctggcagtgctggcaccgcgagctggcctgacgcctcaagcacgggcaccagccgtcatctccggggccaggggctgcagcccggcggtccctgttttgctttattgctgtttaagaaaaatggaggtagttccaaaaaagtggcaaatcccgttggaggttttgaagtccaacaaattttaaacgaatccaaagtgttctcacacgtcacatacgattgagcatctccatctggtcgtgaagcatgtggtaggcacacttgcagtgttacgatcggaatgctttttattaaaagcaagtagcatgaagtattgcttaaattttaggtataaataaatatatatatgtataatatatattccaatgtattccaagctaagaaacttacttgattcttatgaaatcttgataaaatatttataatgcatttatagaaaaagtatatatatatatataaaatgaatgcagattgcgaaggtccctgcaaatggatggcttgtgaatttgctctcaaggtgcttatggaaagggatcctgattgattgaaattcatgttttctcaagctccagattggctagatttcagatcgccaacacattcgccactgggcaactaccctacaagtttgtactttcattttaattattttctaacagaaccgctcccgtctccaagccttcatgcacatatgtacctaatgagtttttatagcaaagaatataaatttgctgttgatttttgtatgaattttttcacaaaaagatcctgaataagcattgttttatgaattttacatttttcctcaccatttagcaattttctgaatggtaataatgtctaaatctttttcctttctgaattcttgcttgtacatttttttttacctttcaaaggtttttaattatttttgtttttatttttgtacgatgagttttctgcagcgtacagaattgttgctgtcagattctattttcagaaagtgagaggagggaccgtaggtcttttcggagtgacaccaacgattgtgtctttcctggtctgtcctaggagctgtataaagaagcccaggggctctttttaactttcaacactagtagtattacgaggggtggtgtgtttttcccctccgtggcaagggcagggagggttgcttaggatgcccggccaccctgggaggcttgccagatgccgggggcagtcagcattaatgaaactcatgtttaaacttctctgaccacatcgtcaggatagaattctaacttgagttttccaaagaccttttgagcatgtcagcaatgcatggggcacacgtggggctctttacccacttgggtttttccactgcagccacgtggccagccctggattttggagcctgtggctgcaaggaacccagggacccttgttgcctggtgaacctgcagggagggtatgattgcctgaccaggacagccagtctttactctttttctcttcaacagtaactgacagtcacgttttactggtaacttattttccagcacatgaagccaccagtttcattccaaagtgtatattgggttcagacttgggggcagaagttcagacacaccgtgctcaggagggacccagagccgagtttcggagtttggtaaagtttacagggtagcttctgaaattaactcaaacttttgaccaaatgagtgcagattcttggattcacttggtcactgggctgctgatggtcagctctgagacagtggtttgagagcaggcagaacggtcttgggacttgtttgactttcccctccctggtggccactctttgctctgaagcccagattggcaagaggagctggtccattccccattcatggcacagagcagtggcagggcccagctagcaggctcttctggcctccttggcctcattctctgcatagccctctggggatcctgccacctgccctcttaccccgccgtggcttatggggaggaatgcatcatctcactttttttttttaagcagatgatgggataacatggactgctcagtggccaggttatcagtggggggacttaattctaatctcattcaaatggagacgccctctgcaaaggcctggcagggggaggcacgtttcatctgtcagctcactccagcttcacaaatgtgctgagagcattactgtgtagccttttctttgaagacacactcggctcttctccacagcaagcgtccagggcagatggcagaggatctgcctcggcgtctgcaggcgggaccacgtcagggagggttccttcatgtgttctccctgtgggtccttggacctttagcctttttcttcctttgcaaaggccttgggggcactggctgggagtcagcaagcgagcactttatatccctttgagggaaaccctgatgacgccactgggcctcttggcgtctgccctgccctcgcggcttcccgccgtgccgcagcgtgcccacgtgcccacgccccaccagcaggcggctgtcccggaggccgtggcccgctgggactggccgcccctccccagcgtcccagggctctggttctggagggccactttgtcaaggtgtttcagtttttctttacttcttttgaaaatctgtttgcaaggggaaggaccatttcgtaatggtctgacacaaaagcaagtttgatttttgcagcactagcaatggactttgttgtttttctttttgatcagaacattccttctttactggtcacagccacgtgctcattccattcttctttttgtagactttgggcccacgtgttttatgggcattgatacatatataaatatatagatataaatatatatgaatatatttttttaagtttcctacacctggaggttgcatggactgtacgaccggcatgactttatattgtatacagattttgcacgccaaactcggcagctttggggaagaagaaaaatgcctttctgttcccctctcatgacatttgcagatacaaaagatggaaatttttctgtaaaacaaaaccttgaaggagaggagggcggggaagtttgcgtcttattgaacttattcttaagaaattgtactttttattgtaagaaaaataaaaaggactacttaaacatttgtcatattaagaaaaaaagtttatctagcacttgtgacataccaataatagagtttattgtatttatgtggaaacagtgttttagggaaactactcagaattcacagtgaactgcctgtctctctcgagttgatttggaggaattttgttttgttttgttttgtttgtttccttttatctccttccacgggccaggcgagcgccgcccgccctcactggccttgtgacggtttattctgattgagaactgggcggactcgaaagagtccccttttccgcacagctgtgttgactttttaattacttttaggtgatgtatggctaagatttcactttaagcagtcgtgaactgtgcgagcactgtggtttacaattatactttgcatcgaaaggaaaccatttcttcattgtaacgaagctgagcgtgttcttagctcggcctcactttgtctctggcattgattaaaagtctgctattgaaagaaaaagaaagcgaacagtttttgtttgttttttttgccgtgtgtgctccatagtggaggcgctattttccaattgatgagaatgacaaacatatataatctatctatctatctatctatctatctatctatacagggggcttgaaccttactcacccaagagcttcttacggaatgtggtagaaaaccaagttgtaacgacactgtaacctacctgatgcctgttcgcgcccgccgtgagctgcgcactggccgtggccaccattcacctctgtaatttaatccgtttctcttggattgtctggacgtgcccgatggttctttcttttgctcagtggagttggaggttttgtgtttggttttctcattcttgtcttgttttgtgtgggtggattttcaccgaccaatgatatcctcttctgacggtcaccttctttccacttcactggagtccagtattctgtaccacatcacgcaacgtgttatcttgtggtgtaaataaagactgcgttacttgccctccca

SEQ ID NO: 1928 - DNA, 2631 bp, Homo sapiens
  source 1..2631: mol_type = genomic DNA
aaagtcctgtttttcgaagcctgaatttggtattccagtgacgcacctgccctccagaagccaactgagggttcccatggagaataagtacctattcacgatgctaggatgtggggcaggagtgaagaagagtgaaatggccatcttcccttgtggttccagcattttccgagcatgccgagggcagagggtccctgtgtcttctttgaagatcaagaaacaggcctgacgtctcagcttgtgctatgaacagggagtgttgaaatccagtttgtcctgatggctttcactttgcaggctttgctctacagcaacaacaggagatgctggccatgaagcaccagcaggagctgctggaacaccagcggaagctggagaggcaccgccaggagcaggagctggagaagcagcaccgggagcagaagctgcagcagctcaagaacaaggagaagggcaaagagagtgccgtggccagcacagaagtgaagatgaagttacaagaatttgtcctcaataaaaagaaggcgctggcccaccggaatctgaaccactgcatttccagcgaccctcgctactggtacgggaaaacgcagcacagttcccttgaccagagttctccaccccagagcggagtgtcgacctcctataaccacccggtcctgggaatgtacgacgccaaagatgacttccctcttaggaaaacagcttctgaaccgaatctgaaattacggtccaggctaaagcagaaagtggccgaaagacggagcagccccctgttacgcaggaaagacgggccagtggtcactgctctaaaaaagcgtccgttggatgtcacagactccgcgtgcagcagcgccccaggctccggacccagctcacccaacaacagctccgggagcgtcagcgcggagaacggtatcgcgcccgccgtccccagcatcccggcggagacgagtttggcgcacagacttgtggcacgagaaggctcggccgctccacttcccctctacacatcgccatccttgcccaacatcacgctgggcctgcctgccaccggcccctctgcgggcacggcgggccagcaggacgccgagagactcacccttcccgccctccagcagaggctctcccttttccccggcacccacctcactccctacctgagcacctcgcccttggagcgggacggaggggcagcgcacagccctcttctgcagcacatggtcttactggagcagccgccggcacaagcacccctcgtcacaggcctgggagcactgcccctccacgcacagtccttggttggtgcagaccgggtgtccccctccatccacaagctgcggcagcaccgcccactggggcggacccagtcggccccgctgccccagaacgcccaggctctgcagcacctggtcatccagcagcagcatcagcagtttctggagaaacacaagcagcagttccagcagcagcaactgcagatgaacaagatcatccccaagccaagcgagccagcccggcagccggagagccacccggaggagacggaggaggagctccgtgagcaccaggctctgctggacgagccctacctggaccggctgccggggcagaaggaggcgcacgcacaggccggcgtgcaggtgaagcaggagcccattgagagcgatgaggaagaggcagagcccccacgggaggtggagccgggccagcgccagcccagtgagcaggagctgctcttcagacagcaagccctcctgctggagcagcagcggatccaccagctgaggaactaccaggcgtccatggaggccgccggcatccccgtgtccttcggcggccacaggcctctgtcccgggcgcagtcctcacccgcgtctgccaccttccccgtgtctgtgcaggagccccccaccaagccgaggttcacgacaggcctcgtgtatgacacgctgatgctgaagcaccagtgcacctgcgggagtagcagcagccaccccgagcacgccgggaggatccagagcatctggtcccgcctgcaggagacgggcctccggggcaaatgcgagtgcatccgcggacgcaaggccaccctggaggagctacagacggtgcactcggaagcccacaccctcctgtatggcacgaaccccctcaaccggcagaaactggacagtaagaaacttctaggctcgctcgcctccgtgttcgtccggctcccttgcggtggtgttggggtaagtgttcctttaatgtgtaaataatgtcctgtttcttctcgagtcccagtggtcacagaaatcgcagccttgcttccctcaaagtgaataattgctgccaggtgttttccatacgcaggggctgcccatgtgcggcttcaaaggccgtgtgagccgagagcgttttgatcgccgactcgggcacctttctctggggaaggttgtctggcgcaggtggctggggctctggggtgcagtggctctcgctttaagaaacaggatcctgtatgcagccagcatctcatccccttcgaagtctgtggcagtaatctgctcacatcaggccacgagtatggtgcgggtaggatgcgtgcttctgtattctgtacctagtttccacccgaagctacag

SEQ ID NO: 1929 - DNA, 3745 bp, Homo sapiens
  source 1..3745: mol_type = genomic DNA
ccgcctggctcgacgctggagtggggagaagcatcatggttcaacgttcatctgcagaagccagcggacgcctctgttcaacttgtgggttacctggctcatgagaccttgccggcgaggctcggcgcttgaacgtctgtgacccagccctcaccgtcccggtacttgtatgtgttggtgggagtttggagctcgttggagctatcgtttccgtggaaattttgagccatttcgaatcacttaaaggagtggacattgctagcaatgagctcccaaagccatccagatggactttctggccgagaccagccagtggagctgctgaatcctgcccgcgtgaaccacatgcccagcacgaggcgcagctccacgagcacatcaagcaacaacaggagatgctggccatgaagcaccagcaggagctgctggaacaccagcggaagctggagaggcaccgccaggagcaggagctggagaagcagcaccgggagcagaagctgcagcagctcaagaacaaggagaagggcaaagagagtgccgtggccagcacagaagtgaagatgaagttacaagaatttgtcctcaataaaaagaaggcgctggcccaccggaatctgaaccactgcatttccagcgaccctcgctactggtacgggaaaacgcagcacagttcccttgaccagagttctccaccccagagcggagtgtcgacctcctataaccacccggtcctgggaatgtacgacgccaaagatgacttccctcttaggaaaacagcttctgaaccgaatctgaaattacggtccaggctaaagcagaaagtggccgaaagacggagcagccccctgttacgcaggaaagacgggccagtggtcactgctctaaaaaagcgtccgttggatgtcacagactccgcgtgcagcagcgccccaggctccggacccagctcacccaacaacagctccgggagcgtcagcgcggagaacggtatcgcgcccgccgtccccagcatcccggcggagacgagtttggcgcacagacttgtggcacgagaaggctcggccgctccacttcccctctacacatcgccatccttgcccaacatcacgctgggcctgcctgccaccggcccctctgcgggcacggcgggccagcaggacgccgagagactcacccttcccgccctccagcagaggctctcccttttccccggcacccacctcactccctacctgagcacctcgcccttggagcgggacggaggggcagcgcacagccctcttctgcagcacatggtcttactggagcagccgccggcacaagcacccctcgtcacagactggtatctttcaggcctgggagcactgcccctccacgcacagtccttggttggtgcagaccgggtgtccccctccatccacaagctgcggcagcaccgcccactggggcggacccagtcggccccgctgccccagaacgcccaggctctgcagcacctggtcatccagcagcagcatcagcagtttctggagaaacacaagcagcagttccagcagcagcaactgcagatgaacaagatcatccccaagccaagcgagccagcccggcagccggagagccacccggaggagacggaggaggagctccgtgagcaccaggctctgctggacgagccctacctggaccggctgccggggcagaaggaggcgcacgcacaggccggcgtgcaggtgaagcaggagcccattgagagcgatgaggaagaggcagagcccccacgggaggtggagccgggccagcgccagcccagtgagcaggagctgctcttcagacagcaagccctcctgctggagcagcagcggatccaccagctgaggaactaccaggcgtccatggaggccgccggcatccccgtgtccttcggcggccacaggcctctgtcccgggcgcagtcctcacccgcgtctgccaccttccccgtgtctgtgcaggagccccccaccaagccgaggttcacgacaggcctcgtgtatgacacgctgatgctgaagcaccagtgcacctgcgggagtagcagcagccaccccgagcacgccgggaggatccagagcatctggtcccgcctgcaggagacgggcctccggggcaaatgcgagtgcatccgcggacgcaaggccaccctggaggagctacagacggtgcactcggaagcccacaccctcctgtatggcacgaaccccctcaaccggcagaaactggacagtaagaaacttctaggctcgctcgcctccgtgttcgtccggctcccttgcggtggtgttggggtggacagtgacaccatatggaacgaggtgcactcggcgggggcagcccgcctggctgtgggctgcgtggtagagctggtcttcaaggtggccacaggggagctgaagaatggctttgctgtggtccgcccccctggacaccatgcggaggagagcacgcccatgggcttttgctacttcaactccgtggccgtggcagccaagcttctgcagcagaggttgagcgtgagcaagatcctcatcgtggactgggacgtgcaccatggaaacgggacccagcaggctttctacagcgaccccagcgtcctgtacatgtccctccaccgctacgacgatgggaacttcttcccaggcagcggggctcctgatgaggtgggcacagggcccggcgtgggtttcaacgtcaacatggctttcaccggcggcctggacccccccatgggagacgctgagtacttggcggccttcagaacggtggtcatgccgatcgccagcgagtttgccccggatgtggtgctggtgtcatcaggcttcgatgccgtggagggccaccccacccctcttgggggctacaacctctccgccagatgcttcgggtacctgacgaagcagctgatgggcctggctggcggccggattgtcctggccctcgagggaggccacgacctgaccgccatttgcgacgcctcggaagcatgtgtttctgccttgctgggaaacgagcttgatcctctcccagaaaaggttttacagcaaagacccaatgcaaacgctgtccgttccatggagaaagtcatggagatccacagcaagtactggcgctgcctgcagcgcacaacctccacagcggggcgttctctgatcgaggctcagacttgcgagaacgaagaagccgagacggtcaccgccatggcctcgctgtccgtgggcgtgaagcccgccgaaaagagaccagatgaggagcccatggaagaggagccgcccctgtagcactccctcgaagctgctgttctcttgtctgtctgtctctgtcttgaagctcagccaagaaactttcccgtgtcacgcctgcgtcccaccgtggggctctcttggagcacccagggacacccagcgtgcaacagccacgggaagcctttctgccgcccaggcccacaggtctcgagacgcacatgcacgcctgggcgtggcagcctcacagggaacacgggacagacgccggcgacgcgcagacacacggacacgcggaagccaagcacactctggcgggtcccgcaagggacgccgtggaagaaaggagcctgtggcaacaggcggccgagctgccgaattcagttgacacgaggcacagaaaacaaatatcaaagatctaataatacaaaacaaacttgattaaaactggtgcttaaagtttattaccc

SEQ ID NO: 1930 - DNA, 2775 bp, Homo sapiens
  source 1..2775: mol_type = genomic DNA
agttttcggcagagtcgcgtgtctgagaagtgacgctgggatgtccctgggctgtgccaggagcagtgctggctcagatggatgtggccacggcgctgcctctgcaagtggccccctcggcagtgcccatggacctgcgcctggaccaccagttctcactgcctgtggcagagccggccctgcgggagcagcagctgcagcaggagctcctggcgctcaagcagaagcagcagatccagaggcagatcctcatcgctgagttccagaggcagcacgagcagctctcccggcagcacgaggcgcagctccacgagcacatcaagcaacaacaggagatgctggccatgaagcaccagcaggagctgctggaacaccagcggaagctggagaggcaccgccaggagcaggagctggagaagcagcaccgggagcagaagctgcagcagctcaagaacaaggagaagggcaaagagagtgccgtggccagcacagaagtgaagatgaagttacaagaatttgtcctcaataaaaagaaggcgctggcccaccggaatctgaaccactgcatttccagcgaccctcgctactggtacgggaaaacgcagcacagttcccttgaccagagttctccaccccagagcggagtgtcgacctcctataaccacccggtcctgggaatgtacgacgccaaagatgacttccctcttaggaaaacagcttctgaaccgaatctgaaattacggtccaggctaaagcagaaagtggccgaaagacggagcagccccctgttacgcaggaaagacgggccagtggtcactgctctaaaaaagcgtccgttggatgtcacagactccgcgtgcagcagcgccccaggctccggacccagctcacccaacaacagctccgggagcgtcagcgcggagaacggtatcgcgcccgccgtccccagcatcccggcggagacgagtttggcgcacagacttgtggcacgagaaggctcggccgctccacttcccctctacacatcgccatccttgcccaacatcacgctgggcctgcctgccaccggcccctctgcgggcacggcgggccagcaggacgccgagagactcacccttcccgccctccagcagaggctctcccttttccccggcacccacctcactccctacctgagcacctcgcccttggagcgggacggaggggcagcgcacagccctcttctgcagcacatggtcttactggagcagccgccggcacaagcacccctcgtcacagactggtatctttcaggcctgggagcactgcccctccacgcacagtccttggttggtgcagaccgggtgtccccctccatccacaagctgcggcagcaccgcccactggggcggacccagtcggccccgctgccccagaacgcccaggctctgcagcacctggtcatccagcagcagcatcagcagtttctggagaaacacaagcagcagttccagcagcagcaactgcagatgaacaagatcatccccaagccaagcgagccagcccggcagccggagagccacccggaggagacggaggaggagctccgtgagcaccaggctctgctggacgagccctacctggaccggctgccggggcagaaggaggcgcacgcacaggccggcgtgcaggtgaagcaggagcccattgagagcgatgaggaagaggcagagcccccacgggaggtggagccgggccagcgccagcccagtgagcaggagctgctcttcagacagcaagccctcctgctggagcagcagcggatccaccagctgaggaactaccaggcgtccatggaggccgccggcatccccgtgtccttcggcggccacaggcctctgtcccgggcgcagtcctcacccgcgtctgccaccttccccgtgtctgtgcaggagccccccaccaagccgaggttcacgacaggcctcgtgtatgacacgctgatgctgaagcaccagtgcacctgcgggagtagcagcagccaccccgagcacgccgggaggatccagagcatctggtcccgcctgcaggagacgggcctccggggcaaatgcgagtgcatccgcggacgcaaggccaccctggaggagctacagacggtgcactcggaagcccacaccctcctgtatggcacgaaccccctcaaccggcagaaactggacagtaagaaacttctaggctcgctcgcctccgtgttcgtccggctcccttgcggtggtgttggggtaagtgttcctttaatgtgtaaataatgtcctgtttcttctcgagtcccagtggtcacagaaatcgcagccttgcttccctcaaagtgaataattgctgccaggtgttttccatacgcaggggctgcccatgtgcggcttcaaaggccgtgtgagccgagagcgttttgatcgccgactcgggcacctttctctggggaaggttgtctggcgcaggtggctggggctctggggtgcagtggctctcgctttaagaaacaggatcctgtatgcagccagcatctcatccccttcgaagtctgtggcagtaatctgctcacatcaggccacgagtatggtgcgggtaggatgcgtgcttctgtattctgtacctagtttccacccgaagctacaggtggggctcccagtgcagtgaccgtgatactcatgggccacgtggagtctgtagggctactcgctgggctgtgctggcttctgtgagctgatgatatggacctggcctgggcatatg

SEQ ID NO: 1931 - DNA, 2707 bp, Homo sapiens
  source 1..2707: mol_type = genomic DNA
atatcaggccagctgtgaccctagaggagtaggccatatcagccagccacatccctggagccgtgggctgtattggtccagctgtgaccctagagcttctgaaccgaatctgaaattacggtccaggctaaagcagaaagtggccgaaagacggagcagccccctgttacgcaggaaagacgggccagtggtcactgctctaaaaaagcgtccgttggatgtcacagactccgcgtgcagcagcgccccaggctccggacccagctcacccaacaacagctccgggagcgtcagcgcggagaacggtatcgcgcccgccgtccccagcatcccggcggagacgagtttggcgcacagacttgtggcacgagaaggctcggccgctccacttcccctctacacatcgccatccttgcccaacatcacgctgggcctgcctgccaccggcccctctgcgggcacggcgggccagcaggacgccgagagactcacccttcccgccctccagcagaggctctcccttttccccggcacccacctcactccctacctgagcacctcgcccttggagcgggacggaggggcagcgcacagccctcttctgcagcacatggtcttactggagcagccgccggcacaagcacccctcgtcacaggcctgggagcactgcccctccacgcacagtccttggttggtgcagaccgggtgtccccctccatccacaagctgcggcagcaccgcccactggggcggacccagtcggccccgctgccccagaacgcccaggctctgcagcacctggtcatccagcagcagcatcagcagtttctggagaaacacaagcagcagttccagcagcagcaactgcagatgaacaagatcatccccaagccaagcgagccagcccggcagccggagagccacccggaggagacggaggaggagctccgtgagcaccaggctctgctggacgagccctacctggaccggctgccggggcagaaggaggcgcacgcacaggccggcgtgcaggtgaagcaggagcccattgagagcgatgaggaagaggcagagcccccacgggaggtggagccgggccagcgccagcccagtgagcaggagctgctcttcagacagcaagccctcctgctggagcagcagcggatccaccagctgaggaactaccaggcgtccatggaggccgccggcatccccgtgtccttcggcggccacaggcctctgtcccgggcgcagtcctcacccgcgtctgccaccttccccgtgtctgtgcaggagccccccaccaagccgaggttcacgacaggcctcgtgtatgacacgctgatgctgaagcaccagtgcacctgcgggagtagcagcagccaccccgagcacgccgggaggatccagagcatctggtcccgcctgcaggagacgggcctccggggcaaatgcgagtgcatccgcggacgcaaggccaccctggaggagctacagacggtgcactcggaagcccacaccctcctgtatggcacgaaccccctcaaccggcagaaactggacagtaagaaacttctaggctcgctcgcctccgtgttcgtccggctcccttgcggtggtgttggggtggacagtgacaccatatggaacgaggtgcactcggcgggggcagcccgcctggctgtgggctgcgtggtagagctggtcttcaaggtggccacaggggagctgaagaatggctttgctgtggtccgcccccctggacaccatgcggaggagagcacgcccatgggcttttgctacttcaactccgtggccgtggcagccaagcttctgcagcagaggttgagcgtgagcaagatcctcatcgtggactgggacgtgcaccatggaaacgggacccagcaggctttctacagcgaccccagcgtcctgtacatgtccctccaccgctacgacgatgggaacttcttcccaggcagcggggctcctgatgaggtgggcacagggcccggcgtgggtttcaacgtcaacatggctttcaccggcggcctggacccccccatgggagacgctgagtacttggcggccttcagaacggtggtcatgccgatcgccagcgagtttgccccggatgtggtgctggtgtcatcaggcttcgatgccgtggagggccaccccacccctcttgggggctacaacctctccgccagatgcttcgggtacctgacgaagcagctgatgggcctggctggcggccggattgtcctggccctcgagggaggccacgacctgaccgccatttgcgacgcctcggaagcatgtgtttctgccttgctgggaaacgagcttgatcctctcccagaaaaggttttacagcaaagacccaatgcaaacgctgtccgttccatggagaaagtcatggagatccacagcaagtactggcgctgcctgcagcgcacaacctccacagcggggcgttctctgatcgaggctcagacttgcgagaacgaagaagccgagacggtcaccgccatggcctcgctgtccgtgggcgtgaagcccgccgaaaagagaccagatgaggagcccatggaagaggagccgcccctgtagcactccctcgaagctgctgttctcttgtctgtctgtctctgtcttgaagctcagccaagaaactttcccgtgtcacgcctgcgtcccacc

SEQ ID NO: 1932 - DNA, 342 bp, Homo sapiens
  source 1..342: mol_type = genomic DNA
gacgctggagtggggagaagcatcatggttcaacgttcatctgcagaagccagcggacgcctctgttcaacttgtgggttacctggctcatgagaccttgccggcgaggctcggcgcttgaacgtctgtgacccagccctcaccgtcccggtacttgtatgtgttggtgggagtttggagctcgttggagctatcgtttccgtggaaattttgagccatttcgaatcacttaaaggagtggacattgctagcaatgagctcccaaagccatccagatggactttctggccgagaccagccagtggagctgctgaatcctgcccgcgtgaaccacatgcccag

SEQ ID NO: 1933 - DNA, 4190 bp, Homo sapiens
  source 1..4190: mol_type = genomic DNA
gaaggcggctagggactggctgaagagggttagcgaaacgttagcggtcgggtctgggcagggggtggagctggttgaaggaacggggcagtcccctgaggagcggggctggttgaaacgctaggggcgggatctggcggagtggaagaaccgcggcaggggccaagcctcctcaactatgacctcaaccggccaggattccaccacaaccaggcagcgaagaagtaggcagaacccccagtcgccccctcaggactccagtgtcacttcgaagcgaaatattaaaaagggagccgttccccgctctatccccaatctagcggaggtaaagaagaaaggcaaaatgaagaagctcggccaagcaatggaagaagacctaatcgtgggactgcaagggatggatctgaaccttgaggctgaagcactggctggcactggcttggtgttggatgagcagttaaatgaattccattgcctctgggatgacagcttcccggaaggccctgagcggctccatgccatcaaggagcaactgatccaggagggcctcctagatcgctgcgtgtcctttcaggcccggtttgctgaaaaggaagagctgatgttggttcacagcctagaatatattgatctgatggaaacaacccagtacatgaatgagggagaactccgtgtcctagcagacacctacgactcagtttatctgcatccgaactcatactcctgtgcctgcctggcctcaggctctgtcctcaggctggtggatgcggtcctgggggctgagatccggaatggcatggccatcattaggcctcctggacatcacgcccagcacagtcttatggatggctattgcatgttcaaccacgtggctgtggcagcccgctatgctcaacagaaacaccgcatccggagggtccttatcgtagattgggatgtgcaccacggtcaaggaacacagttcaccttcgaccaggaccccagtgtcctctatttctccatccaccgctacgagcagggtaggttctggccccacctgaaggcctctaactggtccaccacaggtttcggccaaggccaaggatataccatcaatgtgccttggaaccaggtggggatgcgggatgctgactacattgctgctttcctgcacgtcctgctgccagtcgccctcgagttccagcctcagctggtcctggtggctgctggatttgatgccctgcaaggggaccccaagggtgagatggccgccactccggcagggttcgcccagctaacccacctgctcatgggtctggcaggaggcaagctgatcctgtctctggagggtggctacaacctccgcgccctggctgaaggcgtcagtgcttcgctccacacccttctgggagacccttgccccatgctggagtcacctggtgccccctgccggagtgcccaggcttcagtttcctgtgctctggaagcccttgagcccttctgggaggttcttgtgagatcaactgagaccgtggagagggacaacatggaggaggacaatgtagaggagagcgaggaggaaggaccctgggagccccctgtgctcccaatcctgacatggccagtgctacagtctcgcacagggctggtctatgaccaaaatatgatgaatcactgcaacttgtgggacagccaccaccctgaggtaccccagcgcatcttgcggatcatgtgccgtctggaggagctgggccttgccgggcgctgcctcaccctgacaccgcgccctgccacagaggctgagctgctcacctgtcacagtgctgagtacgtgggtcatctccgggccacagagaaaatgaaaacccgggagctgcaccgtgagagttccaactttgactccatctatatctgccccagtaccttcgcctgtgcacagcttgccactggcgctgcctgccgcctggtggaggctgtgctctcaggagaggttctgaatggtgctgctgtggtgcgtcccccaggacaccacgcagagcaggatgcagcttgcggtttttgctttttcaactctgtggctgtggctgctcgccatgcccagactatcagtgggcatgccctacggatcctgattgtggattgggatgtccaccacggtaatggaactcagcacatgtttgaggatgaccccagtgtgctatatgtgtccctgcaccgctatgatcatggcaccttcttccccatgggggatgagggtgccagcagccagatcggccgggctgcgggcacaggcttcaccgtcaacgtggcatggaacgggccccgcatgggtgatgctgactacctagctgcctggcatcgcctggtgcttcccattgcctacgagtttaacccagaactggtgctggtctcagctggctttgatgctgcacggggggatccgctggggggctgccaggtgtcacctgagggttatgcccacctcacccacctgctgatgggccttgccagtggccgcattatccttatcctagagggtggctataacctgacatccatctcagagtccatggctgcctgcactcgctccctccttggagacccaccacccctgctgaccctgccacggcccccactatcaggggccctggcctcaatcactgagaccatccaagtccatcgcagatactggcgcagcttacgggtcatgaaggtagaagacagagaaggaccctccagttctaagttggtcaccaagaaggcaccccaaccagccaaacctaggttagctgagcggatgaccacacgagaaaagaaggttctggaagcaggcatggggaaagtcacctcggcatcatttggggaagagtccactccaggccagactaactcagagacagctgtggtggccctcactcaggaccagccctcagaggcagccacagggggagccactctggcccagaccatttctgaggcagccattgggggagccatgctgggccagaccacctcagaggaggctgtcgggggagccactccggaccagaccacctcagaggagactgtgggaggagccattctggaccagaccacctcagaggatgctgttgggggagccacgctgggccagactacctcagaggaggctgtaggaggagctacactggcccagaccacctcggaggcagccatggagggagccacactggaccagactacgtcagaggaggctccagggggcaccgagctgatccaaactcctctagcctcgagcacagaccaccagacccccccaacctcacctgtgcagggaactacaccccagatatctcccagtacactgattgggagtctcaggaccttggagctaggcagcgaatctcagggggcctcagaatctcaggccccaggagaggagaacctactaggagaggcagctggaggtcaggacatggctgattcgatgctgatgcagggatctaggggcctcactgatcaggccatattttatgctgtgacaccactgccctggtgtccccatttggtggcagtatgccccatacctgcagcaggcctagacgtgacccaaccttgtggggactgtggaacaatccaagagaattgggtgtgtctctcttgctatcaggtctactgtggtcgttacatcaatggccacatgctccaacaccatggaaattctggacacccgctggtcctcagctacatcgacctgtcagcctggtgttactactgtcaggcctatgtccaccaccaggctctcctagatgtgaagaacatcgcccaccagaacaagtttggggaggatatgccccacccacactaagccccagaatacggtccctcttcaccttctgaggcccacgatagaccagctgtagctcattccagcctgtaccttggatgaggggtagcctcccactgcatcccatcctgaatatcctttgcaactccccaagagtgcttatttaagtgttaatacttttaagagaactgcgacgattaattgtggatctccccctgcccattgcctgcttgaggggcaccactactccagcccagaaggaaaggggggcagctcagtggccccaagagggagctgatatcatgaggataacattggcgggaggggagttaactggcaggcatggcaaggttgcatatgtaataaagtacaagctgttaaaaaa

SEQ ID NO: 1934 - DNA, 736 bp, Homo sapiens
  source 1..736: mol_type = genomic DNA
gtacagcgcgtcgacggcggaggcgggaagggggcggaggccgaccgaaggcggctagggactggctgaagaggaaccgcggcaggggccaagcctcctcaactatgacctcaaccggccaggattccaccacaaccaggcagcgaagaagtaggcagaacccccagtcgccccctcaggactccagtgtcacttcgaagcgaaatattaaaaagggagccgttccccgctctatccccaatctagcggaggtaaagaagaaaggcaaaatgaagaagctcggccaagcaatggaagaagacctaatcgtgggactgcaagggatggatctgaaccttgaggctgaagcactggctggcactggcttggtgttggatgagcagttaaatgaattccattgcctctgggatgacagcttcccggaaggccctgagcggctccatgccatcaaggagcaactgatccaggagggcctcctagatcgctgcgtgtcctttcaggcccggtttgctgaaaaggaagagctgatgttggttcacagcctagaatatattgatctgatggaaacaacccagtacatgaatgagggagaactccgtgtcctagcagacacctacgactcagtttatctgcatccgaactcatactcctgtgcctgcctggcctcaggctctgtcctcaggctggtggatgcggtcctgggggctgagatccggaatggcatggccatcattag

SEQ ID NO: 1935 - DNA, 4179 bp, Homo sapiens
  source 1..4179: mol_type = genomic DNA
gttagcggtcgggtctgggcagggggtggagctggttgaaggaacggggcagtcccctgaggagcggggctggttgaaacgctaggggcgggatctggcggagtggaaggtaccggtccggcccgataaggggtggaaaccgcggcaggggccaagcctcctcaactatgacctcaaccggccaggattccaccacaaccaggcagcgaagaagtaggcagaacccccagtcgccccctcaggactccagtgtcacttcgaagcgaaatattaaaaagggagccgttccccgctctatccccaatctagcggaggtaaagaagaaaggcaaaatgaagaagctcggccaagcaatggaagaagacctaatcgtgggactgcaagggatggatctgaaccttgaggctgaagcactggctggcactggcttggtgttggatgagcagttaaatgaattccattgcctctgggatgacagcttcccggaaggccctgagcggctccatgccatcaaggagcaactgatccaggagggcctcctagatcgctgcgtgtcctttcaggcccggtttgctgaaaaggaagagctgatgttggttcacagcctagaatatattgatctgatggaaacaacccagtacatgaatgagggagaactccgtgtcctagcagacacctacgactcagtttatctgcatccgaactcatactcctgtgcctgcctggcctcaggctctgtcctcaggctggtggatgcggtcctgggggctgagatccggaatggcatggccatcattaggcctcctggacatcacgcccagcacagtcttatggatggctattgcatgttcaaccacgtggctgtggcagcccgctatgctcaacagaaacaccgcatccggagggtccttatcgtagattgggatgtgcaccacggtcaaggaacacagttcaccttcgaccaggaccccagtgtcctctatttctccatccaccgctacgagcagggtaggttctggccccacctgaaggcctctaactggtccaccacaggtttcggccaaggccaaggatataccatcaatgtgccttggaaccaggtggggatgcgggatgctgactacattgctgctttcctgcacgtcctgctgccagtcgccctcgagttccagcctcagctggtcctggtggctgctggatttgatgccctgcaaggggaccccaagggtgagatggccgccactccggcagggttcgcccagctaacccacctgctcatgggtctggcaggaggcaagctgatcctgtctctggagggtggctacaacctccgcgccctggctgaaggcgtcagtgcttcgctccacacccttctgggagacccttgccccatgctggagtcacctggtgccccctgccggagtgcccaggcttcagtttcctgtgctctggaagcccttgagcccttctgggaggttcttgtgagatcaactgagaccgtggagagggacaacatggaggaggacaatgtagaggagagcgaggaggaaggaccctgggagccccctgtgctcccaatcctgacatggccagtgctacagtctcgcacagggctggtctatgaccaaaatatgatgaatcactgcaacttgtgggacagccaccaccctgaggtaccccagcgcatcttgcggatcatgtgccgtctggaggagctgggccttgccgggcgctgcctcaccctgacaccgcgccctgccacagaggctgagctgctcacctgtcacagtgctgagtacgtgggtcatctccgggccacagagaaaatgaaaacccgggagctgcaccgtgagagttccaactttgactccatctatatctgccccagtaccttcgcctgtgcacagcttgccactggcgctgcctgccgcctggtggaggctgtgctctcaggagaggttctgaatggtgctgctgtggtgcgtcccccaggacaccacgcagagcaggatgcagcttgcggtttttgctttttcaactctgtggctgtggctgctcgccatgcccagactatcagtgggcatgccctacggatcctgattgtggattgggatgtccaccacggtaatggaactcagcacatgtttgaggatgaccccagtgtgctatatgtgtccctgcaccgctatgatcatggcaccttcttccccatgggggatgagggtgccagcagccagatcggccgggctgcgggcacaggcttcaccgtcaacgtggcatggaacgggccccgcatgggtgatgctgactacctagctgcctggcatcgcctggtgcttcccattgcctacgagtttaacccagaactggtgctggtctcagctggctttgatgctgcacggggggatccgctggggggctgccaggtgtcacctgagggttatgcccacctcacccacctgctgatgggccttgccagtggccgcattatccttatcctagagggtggctataacctgacatccatctcagagtccatggctgcctgcactcgctccctccttggagacccaccacccctgctgaccctgccacggcccccactatcaggggccctggcctcaatcactgagaccatccaagtccatcgcagatactggcgcagcttacgggtcatgaaggtagaagacagagaaggaccctccagttctaagttggtcaccaagaaggcaccccaaccagccaaacctaggttagctgagcggatgaccacacgagaaaagaaggttctggaagcaggcatggggaaagtcacctcggcatcatttggggaagagtccactccaggccagactaactcagagacagctgtggtggccctcactcaggaccagccctcagaggcagccacagggggagccactctggcccagaccatttctgaggcagccattgggggagccatgctgggccagaccacctcagaggaggctgtcgggggagccactccggaccagaccacctcagaggagactgtgggaggagccattctggaccagaccacctcagaggatgctgttgggggagccacgctgggccagactacctcagaggaggctgtaggaggagctacactggcccagaccacctcggaggcagccatggagggagccacactggaccagactacgtcagaggaggctccagggggcaccgagctgatccaaactcctctagcctcgagcacagaccaccagacccccccaacctcacctgtgcagggaactacaccccagatatctcccagtacactgattgggagtctcaggaccttggagctaggcagcgaatctcagggggcctcagaatctcaggccccaggagaggagaacctactaggagaggcagctggaggtcaggacatggctgattcgatgctgatgcagggatctaggggcctcactgatcaggccatattttatgctgtgacaccactgccctggtgtccccatttggtggcagtatgccccatacctgcagcaggcctagacgtgacccaaccttgtggggactgtggaacaatccaagagaattgggtgtgtctctcttgctatcaggtctactgtggtcgttacatcaatggccacatgctccaacaccatggaaattctggacacccgctggtcctcagctacatcgacctgtcagcctggtgttactactgtcaggcctatgtccaccaccaggctctcctagatgtgaagaacatcgcccaccagaacaagtttggggaggatatgccccacccacactaagccccagaatacggtccctcttcaccttctgaggcccacgatagaccagctgtagctcattccagcctgtaccttggatgaggggtagcctcccactgcatcccatcctgaatatcctttgcaactccccaagagtgcttatttaagtgttaatacttttaagagaactgcgacgattaattgtggatctccccctgcccattgcctgcttgaggggcaccactactccagcccagaaggaaaggggggcagctcagtggccccaagagggagctgatatcatgaggataacattggcgggaggggagttaactggcaggcatggcaaggttgcatatgtaataaagtacaagctgttaaaaaa

SEQ ID NO: 1936 - DNA, 907 bp, Homo sapiens
  source 1..907: mol_type = genomic DNA
agctggcgtagcacgccgacgcaccgccccgccgcttgtgagctcgcgagaggtgtggctcgcgcgaggggcgcggccttgaggcacggtcccctctggaggcgggatctgggcgggcagtcgagagacgaggcccaatggaaaagaaaagcctgagcgctcgcgtccccacaggtcgccagaaacttggtggagcgagccaagggcggagtttgagaaaggggctgcgtccaatgagtggagcgaaccgcggcaggggccaagcctcctcaactatgacctcaaccggccaggattccaccacaaccaggcagcgaagaagtaggcagaacccccagtcgccccctcaggactccagtgtcacttcgaagcgaaatattaaaaagggagccgttccccgctctatccccaatctagcggaggtaaagaagaaaggcaaaatgaagaagctcggccaagcaatggaagaagacctaatcgtgggactgcaagggatggatctgaaccttgaggctgaagcactggctggcactggcttggtgttggatgagcagttaaatgaattccattgcctctgggatgacagcttcccggaaggccctgagcggctccatgccatcaaggagcaactgatccaggagggcctcctagatcgctgcgtgtcctttcaggcccggtttgctgaaaaggaagagctgatgttggttcacagcctagaatatattgatctgatggaaacaacccagtacatgaatgagggagaactccgtgtcctagcagacacctacgactcagtttatctgcatccgaactcatactcctgtgcctgcctggcctcaggctctgtcctcaggctggtggatgcggtcctgggggctgagatccggaatggcatggccatcattag

SEQ ID NO: 1937 - DNA, 1130 bp, Homo sapiens
  source 1..1130: mol_type = genomic DNA
ggggtggagttaagtgaatcgttaagggtggagtcgaaaccggggtcggggccggggccggctgagtgaaagggtgggtgattatcccgggagataggccgaaagggcagaagcgaaatattaaaaagggagccgttccccgctctatccccaatctagcggaggtaaagaagaaaggcaaaatgaagaagctcggccaagcaatggaagaagacctaatcgtgggactgcaagggatggatctgaaccttgaggctgaagcactggctggcactggcttggtgttggatgagcagttaaatgaattccattgcctctgggatgacagcttcccggaaggccctgagcggctccatgccatcaaggagcaactgatccaggagggcctcctagatcgctgcgtgtcctttcaggcccggtttgctgaaaaggaagagctgatgttggttcacagcctagaatatattgatctgatggaaacaacccagtacatgaatgagggagaactccgtgtcctagcagacacctacgactcagtttatctgcatccgaactcatactcctgtgcctgcctggcctcaggctctgtcctcaggctggtggatgcggtcctgggggctgagatccggaatggcatggccatcattaggcctcctggacatcacgcccagcacagtcttatggatggctattgcatgttcaaccacgtggctgtggcagcccgctatgctcaacagaaacaccgcatccggagggtccttatcgtagattgggatgtgcaccacggtcaaggaacacagttcaccttcgaccaggaccccagtgtcctctatttctccatccaccgctacgagcagggtaggttctggccccacctgaaggcctctaactggtccaccacaggtttcggccaaggccaaggatataccatcaatgtgccttggaaccaggtggggatgcgggatgctgactacattgctgctttcctgcacgtcctgctgccagtcgccctcgaggtcctggggatctggggtgtgttgggaggaggagtggccttgaaggttaggctgtgagggtaggtagcctcatggagtctgttcccccttcagttccagcctcagctggtcctg

SEQ ID NO: 1938 - DNA, 583 bp, Homo sapiens
  source 1..583: mol_type = genomic DNA
agcccgcccgcgctacgtcatcacggcgcgtcgcgcgggaagtcgcggggaaaaggtcgccagaaacttggtggagcgagccaagggcggagtttgagaaaggggctgcgtccaatgagtggagcgaaccgcggcaggggccaagcctcctcaactatgacctcaaccggccaggattccaccacaaccaggcagcgaagaagtaggcagaacccccagtcgccccctcaggactccagtgtcacttcgaagcgaaatattaaaaagggagccgttccccgctctatccccaatctagcggaggtaaagaagaaaggcaaaatgaagaagctcggccaagcaatggaagaagacctaatcgtgggactgcaagggatggatctgaaccttgaggctgaagcactggctggcactggcttggtgttggatgagcagttaaatgaattccattgcctctgggatgacagcttcccggaaggccctgagcggctccatgccatcaaggagcaactgatccaggagggcctcctagatcgctgcgtgtcctttcaggcccggtttgctgaaaaggaagagctgatgt

SEQ ID NO: 1939 - DNA, 882 bp, Homo sapiens
  source 1..882: mol_type = genomic DNA
ggagtcgaaaccggggtcggggccggggccggctgagtgaaaggaaccgcggcaggggccaagcctcctcaactatgacctcaaccggccaggattccaccacaaccaggcagcgaagaagtaggcagaacccccagtcgccccctcaggactccagtgtcacttcgaagcgaaatattaaaaagggagccgttccccgctctatccccaatctagcggaggtaaagaagaaaggcaaaatgaagaagctcggccaagcaatggaagaagacctaatcgtgggactgcaagggatggatctgaaccttgaggctgaagcactggctggcactggcttggtgttggatgagcagttaaatgaattccattgcctctgggatgacagcttcccggaaggccctgagcggctccatgccatcaaggagcaactgatccaggagggcctcctagatcgctgcgtgtcctttcaggcccggtttgctgaaaaggaagagctgatgttggttcacagcctagaatatattgatctgatggaaacaacccagtacatgaatgagggagaactccgtgtcctagcagacacctacgactcagtttatctgcatccgaactcatactcctgtgcctgcctggcctcaggctctgtcctcaggctggtggatgcggtcctgggggctgagatccggaatggcatggccatcattaggcctcctggacatcacgcccagcacagtcttatggatggctattgcatgttcaaccacgtggctgtggcagcccgctatgctcaacagaaacaccgcatccggagggtccttatcgtagattgggatgtgcaccacggtcaaggaacacagttcaccttcgaccaggaccccaggt

SEQ ID NO: 1940 - DNA, 2544 bp, Homo sapiens
  source 1..2544: mol_type = genomic DNA
gggcagtcccctgaggagcggggctggttgaaacgctaggggcgggatctggcggagtggaagaaccgcggcaggggccaagcctcctcaactatgacctcaaccggccaggattccaccacaaccaggcagcgaagaagtaggcagaacccccagtcgccccctcaggactccagtgtcacttcgaagcgaaatattaaaaagggagccgttccccgctctatccccaatctagcggaggtaaagaagaaaggcaaaatgaagaagctcggccaagcaatggaagaagacctaatcgtgggactgcaagggatggatctgaaccttgaggctgaagcactggctggcactggcttggtgttggatgagcagttaaatgaattccattgcctctgggatgacagcttcccggaaggccctgagcggctccatgccatcaaggagcaactgatccaggagggcctcctagatcgctgcgtgtcctttcaggcccggtttgctgaaaaggaagagctgatgttggttcacagcctagaatatattgatctgatggaaacaacccagtacatgaatgagggagaactccgtgtcctagcagacacctacgactcagtttatctgcatccgaactcatactcctgtgcctgcctggcctcaggctctgtcctcaggctggtggatgcggtcctgggggctgagatccggaatggcatggccatcattaggcctcctggacatcacgcccagcacagtcttatggatggctattgcatgttcaaccacgtggctgtggcagcccgctatgctcaacagaaacaccgcatccggagggtccttatcgtagattgggatgtgcaccacggtcaaggaacacagttcaccttcgaccaggaccccagtgtcctctatttctccatccaccgctacgagcagggtaggttctggccccacctgaaggcctctaactggtccaccacaggtttcggccaaggccaaggatataccatcaatgtgccttggaaccaggtggggatgcgggatgctgactacattgctgctttcctgcacgtcctgctgccagtcgccctcgagttccagcctcagctggtcctggtggctgctggatttgatgccctgcaaggggaccccaagggtgagatggccgccactccggcagggttcgcccagctaacccacctgctcatgggtctggcaggaggcaagctgatcctgtctctggagggtggctacaacctccgcgccctggctgaaggcgtcagtgcttcgctccacacccttctgggagacccttgccccatgctggagtcacctggtgccccctgccggagtgcccaggcttcagtttcctgtgctctggaagcccttgagcccttctgggaggttcttgtgagatcaactgagaccgtggagagggacaacatggaggaggacaatgtagaggagagcgaggaggaaggaccctgggagccccctgtgctcccaatcctgacatggccagtgctacagtctcgcacagggctggtctatgaccaaaatatgatgaatcactgcaacttgtgggacagccaccaccctgaggtaccccagcgcatcttgcggatcatgtgccgtctggaggagctgggccttgccgggcgctgcctcaccctgacaccgcgccctgccacagaggctgagctgctcacctgtcacagtgctgagtacgtgggtcatctccgggccacagagaaaatgaaaacccgggagctgcaccgtgagagttccaactttgactccatctatatctgccccagtaccttcgcctgtgcacagcttgccactggcgctgcctgccgcctggtggaggctgtgctctcaggagaggttctgaatggtgctgctgtggtgcgtcccccaggacaccacgcagagcaggatgcagcttgcggtttttgctttttcaactctgtggctgtggctgctcgccatgcccagactatcagtgggcatgccctacggatcctgattgtggattgggatgtccaccacggtaatggaactcagcacatgtttgaggatgaccccagtgtgctatatgtgtccctgcaccgctatgatcatggcaccttcttccccatgggggatgagggtgccagcagccagatcggccgggctgcgggcacaggcttcaccgtcaacgtggcatggaacgggccccgcatgggtgatgctgactacctagctgcctggcatcgcctggtgcttcccattgcctacgagtttaacccagaactggtgctggtctcagctggctttgatgctgcacggggggatccgctggggggctgccaggtgtcacctgagggttatgcccacctcaccctgcccattgcctgcttgaggggcaccactactccagcccagaaggaaaggggggcagctcagtggccccaagagggagctgatatcatgaggataacattggcgggaggggagttaactggcaggcatggcaaggttgcatatgtaataaagtacaagctg

SEQ ID NO: 1941 - DNA, 610 bp, Homo sapiens
  source 1..610: mol_type = genomic DNA
atcacggcgcgtcgcgcgggaagtcgcggggaaaaggtaagatgccccttcctaattccctcgcttccttgcttgctctccagacaccgccgacccgaagggctcctaagtgactggacagggacggaggggcggcggctatggcatccgggacgacagcgacgatagccgaggcaagaaaaagcttgcaccgcagccctgtcgggaaccgccggcgcctgccttttacgtaggcgcagcacagctggcgtagcacgccgacgcaccgccccgtcgcctgtgagctcgcggtgtggctcagcccagctggcgtagcacgccgacgcaccgccccgccgcttgtgagctcgcgagaggtcgccagaaacttggtggagcgagccaagggcggagtttgagaaaggggctgcgtccaatgagtggagcgaaccgcggcaggggccaagcctcctcaactatgacctcaaccggccaggattccaccacaaccaggcagcgaagaagtaggcagaacccccagtcgccccctcaggactccagtgtcacttcgaagcgaaatattaaaaagggagccgttccccgctctatccccaatctagcggaggtaaag

SEQ ID NO: 1942 - DNA, 658 bp, Homo sapiens
  source 1..658: mol_type = genomic DNA
gcgtaaggaatggaatctaatagagggggcggagcctggaaaagggcagagaggtggggtcctcagggcacactagccccctcacatacccacgctcctccccccacccccagaaccgcggcaggggccaagcctcctcaactatgacctcaaccggccaggattccaccacaaccaggcagcgaagaagtaggcagaacccccagtcgccccctcaggactccagtgtcacttcgaagcgaaatattaaaaagggagccgttccccgctctatccccaatctagcggaggtaaagaagaaaggcaaaatgaagaagctcggccaagcaatggaagaagacctaatcgtgggactgcaagggatggatctgaaccttgaggctgaagcactggctggcactggcttggtgttggatgagcagttaaatgaattccattgcctctgggatgacagcttcccggaaggccctgagcggctccatgccatcaaggagcaactgatccaggagggcctcctagatcgctgcgtgtcctttcaggcccggtttgctgaaaaggaagagctgatgttggttcacagcctagaatatattgatctgatggaaacaacccagtacatgaatgagggagaactccgtgtcctagcagacacctacga

SEQ ID NO: 1943 - DNA, 599 bp, Homo sapiens
  source 1..599: mol_type = genomic DNA
agggtggagtcgaaaccggggtcggggccggggccggctgagtgaaagggtgggtgattatcccgggagataggccgaaagggcagaaccgcggcaggggccaagcctcctcaactatgacctcaaccggccaggattccaccacaaccaggcagcgaagaagtaggcagaacccccagtcgccccctcaggactccagtgtcacttcgaagcgaaatattaaaaagggagccgttccccgctctatccccaatctagcggaggtaaagaagaaaggcaaaatgaagaagctcggccaagcaatggaagaagacctaatcgtgggactgcaagggatggatctgaaccttgaggctgaagcactggctggcactggcttggtgttggatgagcagttaaatgaattccattgcctctgggatgacagcttcccggaaggccctgagcggctccatgccatcaaggagcaactgatccaggagggcctcctagatcgctgcgtgtcctttcaggcccggtttgctgaaaaggaagagctgatgttggttcacagcctagaatatattgatctgatggaaacaacccagtacatgaatgag

SEQ ID NO: 1944 - DNA, 568 bp, Homo sapiens
  source 1..568: mol_type = genomic DNA
gaggcggagtttggaaggctgtggagaatcagatcgcaaccgcggcaggggccaagcctcctcaactatgacctcaaccggccaggattccaccacaaccaggcagcgaagaagtaggcagaacccccagtcgccccctcaggactccagtgtcacttcgaagcgaaatattaaaaagggagccgttccccgctctatccccaatctagcggaggtaaagaagaaaggcaaaatgaagaagctcggccaagcaatggaagaagacctaatcgtgggactgcaagggatggatctgaaccttgaggctgaagcactggctggcactggcttggtgttggatgagcagttaaatgaattccattgcctctgggatgacagcttcccggaaggccctgagcggctccatgccatcaaggagcaactgatccaggagggcctcctagatcgctgcgtgtcctttcaggcccggtttgctgaaaaggaagagctgatgttggttcacagcctagaatatattgatctgatggaaacaacccagtacatgaatgagggagaactccgtgtccta

SEQ ID NO: 1945 - DNA, 3887 bp, Homo sapiens
  source 1..3887: mol_type = genomic DNA
agaaacttggtggagcgagccaagggcggagtttgagaaaggggctgcgtccaatgagtggagcgaaccgcggcaggggccaagcctcctcaactatgacctcaaccggccaggattccaccacaaccaggcagcgaagaagtaggcagaacccccagtcgccccctcaggactccagtgtcacttcgaagcgaaatattaaaaagggagccgttccccgctctatccccaatctagcggaggtaaagaagaaaggcaaaatgaagaagctcggccaagcaatggaagaagacctaatcgtgggactgcaagggatggatctgaaccttgaggctgaagcactggctggcactggcttggtgttggatgagcagttaaatgaattccattgcctctgggatgacagcttcccggaaggccctgagcggctccatgccatcaaggagcaactgatccaggagggcctcctagatcgctgcgtgtcctttcaggcccggtttgctgaaaaggaagagctgatgttggttcacagcctagaatatattgatctgatggaaacaacccagtacatgaatgagggagaactccgtgtcctagcagacacctacgactcagtttatctgcatccgaactcatactcctgtgcctgcctggcctcaggctctgtcctcaggctggtggatgcggtcctgggggctgagatccggaatggcatggccatcattaggcctcctggacatcacgcccagcacagtcttatggatggctattgcatgttcaaccacgtggctgtggcagcccgctatgctcaacagaaacaccgcatccggagggtccttatcgtagattgggatgtgcaccacggtcaaggaacacagttcaccttcgaccaggaccccagtgtcctctatttctccatccaccgctacgagcagggtaggttctggccccacctgaaggcctctaactggtccaccacaggtttcggccaaggccaaggatataccatcaatgtgccttggaaccaggtggggatgcgggatgctgactacattgctgctttcctgcacgtcctgctgccagtcgccctcgagttccagcctcagctggtcctggtggctgctggatttgatgccctgcaaggggaccccaagggtgagatggccgccactccggcagggttcgcccagctaacccacctgctcatgggtctggcaggaggcaagctgatcctgtctctggagggtggctacaacctccgcgccctggctgaaggcgtcagtgcttcgctccacacccttctgggagacccttgccccatgctggagtcacctggtgccccctgccggagtgcccaggcttcagtttcctgtgctctggaagcccttgagcccttctgggaggttcttgtgagatcaactgagaccgtggagagggacaacatggaggaggacaatgtagaggagagcgaggaggaaggaccctgggagccccctgtgctcccaatcctgacatggccagtgctacagtctcgcacagggctggtctatgaccaaaatatgatgaatcactgcaacttgtgggacagccaccaccctgaggtaccccagcgcatcttgcggatcatgtgccgtctggaggagctgggccttgccgggcgctgcctcaccctgacaccgcgccctgccacagaggctgagctgctcacctgtcacagtgctgagtacgtgggtcatctccgggccacagagaaaatgaaaacccgggagctgcaccgtgagagttccaactttgactccatctatatctgccccagtaccttcgcctgtgcacagcttgccactggcgctgcctgccgcctggtggaggctgtgctctcaggagaggttctgaatggtgctgctgtggtgcgtcccccaggacaccacgcagagcaggatgcagcttgcggtttttgctttttcaactctgtggctgtggctgctcgccatgcccagactatcagtgggcatgccctacggatcctgattgtggattgggatgtccaccacggtaatggaactcagcacatgtttgaggatgaccccagtgtgctatatgtgtccctgcaccgctatgatcatggcaccttcttccccatgggggatgagggtgccagcagccagatcggccgggctgcgggcacaggcttcaccgtcaacgtggcatggaacgggccccgcatgggtgatgctgactacctagctgcctggcatcgcctggtgcttcccattgcctacgagtttaacccagaactggtgctggtctcagctggctttgatgctgcacggggggatccgctggggggctgccaggtgtcacctgagggttatgcccacctcacccacctgctgatgggccttgccagtggccgcattatccttatcctagagggtggctataacctgacatccatctcagagtccatggctgcctgcactcgctccctccttggagacccaccacccctgctgaccctgccacggcccccactatcaggggccctggcctcaatcactgagaccatccaagtccatcgcagatactggcgcagcttacgggtcatgaaggtagaagacagagaaggaccctccagttctaagttggtcaccaagaaggcaccccaaccagccaaacctaggttagctgagcggatgaccacacgagaaaagaaggttctggaagcaggcatggggaaagtcacctcggcatcatttggggaagagtccactccaggccagactaactcagagacagctgtggtggccctcactcaggaccagccctcagaggcagccacagggggagccactctggcccagaccatttctgaggcagccattgggggagccatgctgggccagaccacctcagaggaggctgtcgggggagccactccggaccagaccacctcagaggagactgtgggaggagccattctggaccagaccacctcagaggatgctgttgggggagccacgctgggccagactacctcagaggaggctgtaggaggagctacactggcccagaccacctcggaggcagccatggagggagccacactggaccagactacgtcagaggaggctccagggggcaccgagctgatccaaactcctctagcctcgagcacagaccaccagacccccccaacctcacctgtgcagggaactacaccccagatatctcccagtacactgattgggagtctcaggaccttggagctaggcagcgaatctcagggggcctcagaatctcaggccccaggagaggagaacctactaggagaggcagctggaggtcaggacatggctgattcgatgctgatgcagggatctaggggcctcactgatcaggccatattttatgctgtgacaccactgccctggtgtccccatttggtggcagtatgccccatacctgcagcaggcctagacgtgacccaaccttgtggggactgtggaacaatccaagagaattgggtgtgtctctcttgctatcaggtctactgtggtcgttacatcaatggccacatgctccaacaccatggaaattctggacacccgctggtcctcagctacatcgacctgtcagcctggtgttactactgtcaggcctatgtccaccaccaggctctcctagatgtgaagaacatcgcccaccagaacaagtttggggaggatatgccccacccacactaagccccagaatacggtccctcttcaccttctgaggcccacgatagaccagctgtagctcattccagcctgtaccttggatgaggggtagcctcccactgcatcccatcctgaatatcctttgcaactccccaagagtgcttattt

SEQ ID NO: 1946 - DNA, 4095 bp, Homo sapiens
  source 1..4095: mol_type = genomic DNA
atgcacagccccggcgctgatgggacccaggtgagcccgggtgcccactactgcagccccactggcgcaggctgccccaggccctgtgcagacacaccaggccctcagccgcagcccatggacctgcgggtgggccagcggcccccagtggagcccccaccagagcccacattgctggccctgcagcgtccccagcgcctgcaccaccacctcttcctagcaggcctgcagcagcagcgctcggtggagcccatgaggctctccatggacacgccgatgcccgagttgcaggtgggaccccaggaacaagagctgcggcagcttctccacaaggacaagagcaagcgaagtgctgtagccagcagcgtggtcaagcagaagctagcggaggtgattctgaaaaaacagcaggcggccctagaaagaacagtccatcccaacagccccggcattccctacagaaccctggagcccctggagacggaaggagccacccgctccatgctcagcagctttttgcctcctgttcccagcctgcccagtgaccccccagagcacttccctctgcgcaagacagtctctgagcccaacctgaagctgcgctataagcccaagaagtccctggagcggaggaagaatccactgctccgaaaggagagtgcgccccccagcctccggcggcggcccgcagagaccctcggagactcctccccaagtagtagcagcacgcccgcatcagggtgcagctcccccaatgacagcgagcacggccccaatcccatcctgggctcggaggcgctcttgggccagcggctgcggctgcaggagacttctgtggccccgttcgccttgccgacagtgtccttgctgcccgcaatcactctggggctgcccgcccctgccagggctgacagtgaccgcaggacccatccgactctgggccctcgggggccaatcctggggagcccccacactcccctcttcctgccccatggcttggagcccgaggctgggggcaccttgccctctcgcctgcagcccattctcctcctggacccctcaggctctcatgccccgctgctgactgtgcccgggcttgggcccttgcccttccactttgcccagtccttaatgaccaccgagcggctctctgggtcaggcctccactggccactgagccggactcgctcagagcccctgccccccagtgccaccgctcccccaccgccgggccccatgcagccccgcctggagcagctcaaaactcacgtccaggtgatcaagaggtcagccaagccgagtgagaagccccggctgcggcagataccctcggctgaagacctggagacagatggcgggggaccgggccaggtggtggacgatggcctggagcacagggagctgggccatgggcagcctgaggccagaggccccgctcctctccagcagcaccctcaggtgttgctctgggaacagcagcgactggctgggcggctcccccggggcagcaccggggacactgtgctgcttcctctggcccagggtgggcaccggcctctgtcccgggctcagtcttccccagccgcacctgcctcactgtcagccccagagcctgccagccaggcccgagtcctctccagctcagagacccctgccaggaccctgcccttcaccacagggctgatctatgactcggtcatgctgaagcaccagtgctcctgcggtgacaacagcaggcacccggagcacgccggccgcatccagagcatctggtcccggctgcaggagcgggggctccggagccagtgtgagtgtctccgaggccggaaggcctccctggaagagctgcagtcggtccactctgagcggcacgtgctcctctacggcaccaacccgctcagccgcctcaaactggacaacgggaagctggcagggctcctggcacagcggatgtttgtgatgctgccctgtggtggggttggggtggacactgacaccatctggaatgagcttcattcctccaatgcagcccgctgggccgctggcagtgtcactgacctcgccttcaaagtggcttctcgtgagctaaagaatggtttcgctgtggtgcggcccccaggacaccatgcagatcattcaacagccatgggcttctgcttcttcaactcagtggccatcgcctgccggcagctgcaacagcagagcaaggccagcaagatcctcattgtagactgggacgtgcaccatggcaacggcacccagcaaaccttctaccaagaccccagtgtgctctacatctccctgcatcgccatgacgacggcaacttcttcccggggagtggggctgtggatgaggtaggggctggcagcggtgagggcttcaatgtcaatgtggcctgggctggaggtctggacccccccatgggggatcctgagtacctggctgctttcaggatagtcgtgatgcccatcgcccgagagttctctccagacctagtcctggtgtctgctggatttgatgctgctgagggtcacccggccccactgggtggctaccatgtttctgccaaatgttttggatacatgacgcagcaactgatgaacctggcaggaggcgcagtggtgctggccttggagggtggccatgacctcacagccatctgtgacgcctctgaggcctgtgtggctgctcttctgggtaacagggtggatcccctttcagaagaaggctggaaacagaaacccaacctcaatgccatccgctctctggaggccgtgatccgggtgcacagtaaatactggggctgcatgcagcgcctggcctcctgtccagactcctgggtgcctagagtgccaggggctgacaaagaagaagtggaggcagtgaccgcactggcgtccctctctgtgggcatcctggctgaagataggccctcggagcagctggtggaggaggaagaacctatgaatctctaaggctctggaaccatctgcccgcccaccatgcccttgggacctggttctcttctaacccctggcaatagcccccattcctgggtctttagagatcctgtgggcaagtagttggaaccagagaacagcctgcctgctttgacagttatcccagggagcgtgagaaaatccctgggtctagaatgggaactggagaggaccctgagaggagacgggctgggcggcgacccccacagggctctcgagaacagattctcccctccagtatgggccctggctgtggcccccattcctcaggactgcacagaggaggactggctccggctccgtcgggctcacccttaaccactattcctggctctgcaaaccccagactttgcacacagcctcaggctccacacagaaatgtgaacttggcctcagacaggctggcccttcctaggctctaggggctaggggggagtggggagccaagaggtcccatattcctgagtgcaggggtagtccctctcacctgcttcctcagacgactctggaagcttccctctaccactgggcactgagacgaagctccctgacagccgagactggcagccctccatctggtccgtaccctcgccagaggcccccctacatcaacctcctggcgatgccctggtggagcagatgggtgctctgggagtcctgtgcttcctgatccaatggtgccaaacccttcatctccccaagaagcgcagcatacccctgggacccctcggccactgcccactcggggagccttctctgtttctggggcctcccccaccatagctctgattcccaccccacataggagtagcctgactgagggggaaggggtgggagagaagatacagacatggaggaggggaggctgctctggcaaagtcttcaaggcttttgggggtccaggcctggggtcaagaaggaaaatgtgtgtgagcatgtgtgtgagtgaggcgtgtgtgtgagcgtgtgtgtgagtgaggcgtgtgtgtgtgtctttcctaggacccaccataccctgtgtatgtatgcatgtttttgtaaaaaggaagaaaatggaaaaaaatctgaacaataaatgttttatttgctttaaaa

SEQ ID NO: 1947 - DNA, 4065 bp, Homo sapiens
  source 1..4065: mol_type = genomic DNA
ggcgactggggggatgtgaggccggcgccccagccccccgccccgccatgagccccccgctctgagggccccggcccctggatgcacagccccggcgctgatgggacccaggtgagcccgggtgcccactactgcagccccactggcgcaggctgccccaggccctgtgcagacacaccaggccctcagccgcagcccatggacctgcgggtgggccagcggcccccagtggagcccccaccagagcccacattgctggccctgcagcgtccccagcgcctgcaccaccacctcttcctagcaggcctgcagcagcagcgctcggtggagcccatgaggctctccatggacacgccgatgcccgagttgcaggtgggaccccaggaacaagagctgcggcagcttctccacaaggacaagagcaagcgaagtgctgtagccagcagcgtggtcaagcagaagctagcggaggtgattctgaaaaaacagcaggcggccctagaaagaacagtccatcccaacagccccggcattccctacagaaccctggagcccctggagacggaaggagccacccgctccatgctcagcagctttttgcctcctgttcccagcctgcccagtgaccccccagagcacttccctctgcgcaagacagtctctgagcccaacctgaagctgcgctataagcccaagaagtccctggagcggaggaagaatccactgctccgaaaggagagtgcgccccccagcctccggcggcggcccgcagagaccctcggagactcctccccaagtagtagcagcacgcccgcatcagggtgcagctcccccaatgacagcgagcacggccccaatcccatcctgggctcggaggctgacagtgaccgcaggacccatccgactctgggccctcgggggccaatcctggggagcccccacactcccctcttcctgccccatggcttggagcccgaggctgggggcaccttgccctctcgcctgcagcccattctcctcctggacccctcaggctctcatgccccgctgctgactgtgcccgggcttgggcccttgcccttccactttgcccagtccttaatgaccaccgagcggctctctgggtcaggcctccactggccactgagccggactcgctcagagcccctgccccccagtgccaccgctcccccaccgccgggccccatgcagccccgcctggagcagctcaaaactcacgtccaggtgatcaagaggtcagccaagccgagtgagaagccccggctgcggcagataccctcggctgaagacctggagacagatggcgggggaccgggccaggtggtggacgatggcctggagcacagggagctgggccatgggcagcctgaggccagaggccccgctcctctccagcagcaccctcaggtgttgctctgggaacagcagcgactggctgggcggctcccccggggcagcaccggggacactgtgctgcttcctctggcccagggtgggcaccggcctctgtcccgggctcagtcttccccagccgcacctgcctcactgtcagccccagagcctgccagccaggcccgagtcctctccagctcagagacccctgccaggaccctgcccttcaccacagggctgatctatgactcggtcatgctgaagcaccagtgctcctgcggtgacaacagcaggcacccggagcacgccggccgcatccagagcatctggtcccggctgcaggagcgggggctccggagccagtgtgagtgtctccgaggccggaaggcctccctggaagagctgcagtcggtccactctgagcggcacgtgctcctctacggcaccaacccgctcagccgcctcaaactggacaacgggaagctggcagggctcctggcacagcggatgtttgtgatgctgccctgtggtggggttggggtggacactgacaccatctggaatgagcttcattcctccaatgcagcccgctgggccgctggcagtgtcactgacctcgccttcaaagtggcttctcgtgagctaaagaatggtttcgctgtggtgcggcccccaggacaccatgcagatcattcaacagccatgggcttctgcttcttcaactcagtggccatcgcctgccggcagctgcaacagcagagcaaggccagcaagatcctcattgtagactgggacgtgcaccatggcaacggcacccagcaaaccttctaccaagaccccagtgtgctctacatctccctgcatcgccatgacgacggcaacttcttcccggggagtggggctgtggatgaggtaggggctggcagcggtgagggcttcaatgtcaatgtggcctgggctggaggtctggacccccccatgggggatcctgagtacctggctgctttcaggatagtcgtgatgcccatcgcccgagagttctctccagacctagtcctggtgtctgctggatttgatgctgctgagggtcacccggccccactgggtggctaccatgtttctgccaaatgttttggatacatgacgcagcaactgatgaacctggcaggaggcgcagtggtgctggccttggagggtggccatgacctcacagccatctgtgacgcctctgaggcctgtgtggctgctcttctgggtaacagggtggatcccctttcagaagaaggctggaaacagaaacccaacctcaatgccatccgctctctggaggccgtgatccgggtgcacagtaaatactggggctgcatgcagcgcctggcctcctgtccagactcctgggtgcctagagtgccaggggctgacaaagaagaagtggaggcagtgaccgcactggcgtccctctctgtgggcatcctggctgaagataggccctcggagcagctggtggaggaggaagaacctatgaatctctaaggctctggaaccatctgcccgcccaccatgcccttgggacctggttctcttctaacccctggcaatagcccccattcctgggtctttagagatcctgtgggcaagtagttggaaccagagaacagcctgcctgctttgacagttatcccagggagcgtgagaaaatccctgggtctagaatgggaactggagaggaccctgagaggagacgggctgggcggcgacccccacagggctctcgagaacagattctcccctccagtatgggccctggctgtggcccccattcctcaggactgcacagaggaggactggctccggctccgtcgggctcacccttaaccactattcctggctctgcaaaccccagactttgcacacagcctcaggctccacacagaaatgtgaacttggcctcagacaggctggcccttcctaggctctaggggctaggggggagtggggagccaagaggtcccatattcctgagtgcaggggtagtccctctcacctgcttcctcagacgactctggaagcttccctctaccactgggcactgagacgaagctccctgacagccgagactggcagccctccatctggtccgtaccctcgccagaggcccccctacatcaacctcctggcgatgccctggtggagcagatgggtgctctgggagtcctgtgcttcctgatccaatggtgccaaacccttcatctccccaagaagcgcagcatacccctgggacccctcggccactgcccactcggggagccttctctgtttctggggcctcccccaccatagctctgattcccaccccacataggagtagcctgactgagggggaaggggtgggagagaagatacagacatggaggaggggaggctgctctggcaaagtcttcaaggcttttgggggtccaggcctggggtcaagaaggaaaatgtgtgtgagcatgtgtgtgagtgaggcgtgtgtgtgagcgtgtgtgtgagtgaggcgtgtgtgtgtgtctttcctaggacccaccataccctgtgtatgtatgcatgtttttgtaaaaaggaagaaaatggaaaaaaatctgaacaataaatgttttatttgctttaaaa

SEQ ID NO: 1948 - DNA, 3261 bp, Homo sapiens
  source 1..3261: mol_type = genomic DNA
atttagaatgagtgacttgaggaagagggagctgggagcccttttcaccagcagggggactggaggagtcgaatgggatgggacccaggtgagcccgggtgcccactactgcagccccactggcgcaggctgccccaggccctgtgcagacacaccaggccctcagccgcagcccatggacctgcgggtgggccagcggcccccagtggagcccccaccagagcccacattgctggccctgcagcgtccccagcgcctgcaccaccacctcttcctagcaggcctgcagcagcagcgctcggtggagcccatgaggctctccatggacacgccgatgcccgagttgcaggtgggaccccaggaacaagagctgcggcagcttctccacaaggacaagagcaagcgaagtgctgtagccagcagcgtggtcaagcagaagctagcggaggtgattctgaaaaaacagcaggcggccctagaaagaacagtccatcccaacagccccggcattccctacagaaccctggagcccctggagacggaaggagccacccgctccatgctcagcagctttttgcctcctgttcccagcctgcccagtgaccccccagagcacttccctctgcgcaagacagtctctgagcccaacctgaagctgcgctataagcccaagaagtccctggagcggaggaagaatccactgctccgaaaggagagtgcgccccccagcctccggcggcggcccgcagagaccctcggagactcctccccaagtagtagcagcacgcccgcatcagggtgcagctcccccaatgacagcgagcacggccccaatcccatcctgggctcggaggcgctcttgggccagcggctgcggctgcaggagacttctgtggccccgttcgccttgccgacagtgtccttgctgcccgcaatcactctggggctgcccgcccctgccagggctgacagtgaccgcaggacccatccgactctgggccctcgggggccaatcctggggagcccccacactcccctcttcctgccccatggcttggagcccgaggctgggggcaccttgccctctcgcctgcagcccattctcctcctggacccctcaggctctcatgccccgctgctgactgtgcccgggcttgggcccttgcccttccactttgcccagtccttaatgaccaccgagcggctctctgggtcaggcctccactggccactgagccggactcgctcagagcccctgccccccagtgccaccgctcccccaccgccgggccccatgcagccccgcctggagcagctcaaaactcacgtccaggtgatcaagaggtcagccaagccgagtgagaagccccggctgcggcagataccctcggctgaagacctggagacagatggcgggggaccgggccaggtggtggacgatggcctggagcacagggagctgggccatgggcagcctgaggccagaggccccgctcctctccagcagcaccctcaggtgttgctctgggaacagcagcgactggctgggcggctcccccggggcagcaccggggacactgtgctgcttcctctggcccagggtgggcaccggcctctgtcccgggctcagtcttccccagccgcacctgcctcactgtcagccccagagcctgccagccaggcccgagtcctctccagctcagagacccctgccaggaccctgcccttcaccacagggctgatctatgactcggtcatgctgaagcaccagtgctcctgcggtgacaacagcaggcacccggagcacgccggccgcatccagagcatctggtcccggctgcaggagcgggggctccggagccagtgtgagtgtctccgaggccggaaggcctccctggaagagctgcagtcggtccactctgagcggcacgtgctcctctacggcaccaacccgctcagccgcctcaaactggacaacgggaagctggcagggctcctggcacagcggatgtttgtgatgctgccctgtggtggggttggggtggacactgacaccatctggaatgagcttcattcctccaatgcagcccgctgggccgctggcagtgtcactgacctcgccttcaaagtggcttctcgtgagctaaagaatggtttcgctgtggtgcggcccccaggacaccatgcagatcattcaacagccatgggcttctgcttcttcaactcagtggccatcgcctgccggcagctgcaacagcagagcaaggccagcaagatcctcattgtagactgggacgtgcaccatggcaacggcacccagcaaaccttctaccaagaccccagtgtgctctacatctccctgcatcgccatgacgacggcaacttcttcccggggagtggggctgtggatgaggtaggggctggcagcggtgagggcttcaatgtcaatgtggcctgggctggaggtctggacccccccatgggggatcctgagtacctggctgctttcaggatagtcgtgatgcccatcgcccgagagttctctccagacctagtcctggtgtctgctggatttgatgctgctgagggtcacccggccccactgggtggctaccatgtttctgccaaatgttttggatacatgacgcagcaactgatgaacctggcaggaggcgcagtggtgctggccttggagggtggccatgacctcacagccatctgtgacgcctctgaggcctgtgtggctgctcttctgggtaacagggtggatcccctttcagaagaaggctggaaacagaaacccaacctcaatgccatccgctctctggaggccgtgatccgggtgcacatgggtgccctcacactgagccagattccaggacatggttcctcacagcagcaggcaggaggagcattctcctggcctgggcacccatgcagagcggccgtggtgatggtaaatactggggctgcatgcagcgcctggcctcctgtccagactcctgggtgcctagagtgccaggggctgacaaagaagaagtggaggcagtgaccgcactggcgtccctctctgtgggcatcctggctgaagataggccctcggagcagctggtggaggaggaagaacctatgaatctctaaggctctggaaccatctgcccgcccaccatgcccttgggacctggttctcttctaacccctggcaatagcccccattcctgggtctttagagatcctgtgggcaagtagttggaaccagag

SEQ ID NO: 1949 - DNA, 576 bp, Homo sapiens
  source 1..576: mol_type = genomic DNA
attgtcatcctacccggccggccgggctgccagggccctccccctcccggccccctcccttcctctcgccgtctcacagtcgctctgcagcctccggcgactggggggatgtgaggccggcgccccagccccccgccccgccatgagccccccgctctgagggccccggcccctggatgcacagccccggcgctggctgccccaggccctgtgcagacacaccaggccctcagccgcagcccatggacctgcgggtgggccagcggcccccagtggagcccccaccagagcccacattgctggccctgcagcgtccccagcgcctgcaccaccacctcttcctagcaggcctgcagcagcagcgctcggtggagcccatgaggctctccatggacacgccgatgcccgagttgcaggtgggaccccaggaacaagagctgcggcagcttctccacaaggacaagagcaagcgaagtgctgtagccagcagcgtggtcaagcagaagctagcggaggtgattctgaaaaaacagcaggcggccctagaaagaacagtccatcccaacagccccggca

SEQ ID NO: 1950 - DNA, 3016 bp, Homo sapiens
  source 1..3016: mol_type = genomic DNA
acaccctttttcttttaataggaacaggctggacccttccgttcccctcagcaggcatgatgggacccaggtgagcccgggtgcccactactgcagccccactggcgcaggctgccccaggccctgtgcagacacaccaggccctcagccgcagcccatggacctgcgggtgggccagcggcccccagtggagcccccaccagagcccacattgctggccctgcagcgtccccagcgcctgcaccaccacctcttcctagcaggcctgcagcagcagcgctcggtggagcccatgaggctctccatggacacgccgatgcccgagttgcaggtgggaccccaggaacaagagctgcggcagcttctccacaaggacaagagcaagcgaagtgctgtagccagcagcgtggtcaagcagaagctagcggaggtgattctgaaaaaacagcaggcggccctagaaagaacagtccatcccaacagccccggcattccctacagaaccctggagcccctggagacggaaggagccacccgctccatgctcagcagctttttgcctcctgttcccagcctgcccagtgaccccccagagcacttccctctgcgcaagacagtctctgagcccaacctgaagctgcgctataagcccaagaagtccctggagcggaggaagaatccactgctccgaaaggagagtgcgccccccagcctccggcggcggcccgcagagaccctcggagactcctccccaagtagtagcagcacgcccgcatcagggtgcagctcccccaatgacagcgagcacggccccaatcccatcctgggctcggaggcgctcttgggccagcggctgcggctgcaggagacttctgtggccccgttcgccttgccgacagtgtccttgctgcccgcaatcactctggggctgcccgcccctgccagggctgacagtgaccgcaggacccatccgactctgggccctcgggggccaatcctggggagcccccacactcccctcttcctgccccatggcttggagcccgaggctgggggcaccttgccctctcgcctgcagcccattctcctcctggacccctcaggctctcatgccccgctgctgactgtgcccgggcttgggcccttgcccttccactttgcccagtccttaatgaccaccgagcggctctctgggtcaggcctccactggccactgagccggactcgctcagagcccctgccccccagtgccaccgctcccccaccgccgggccccatgcagccccgcctggagcagctcaaaactcacgtccaggtgatcaagaggtcagccaagccgagtgagaagccccggctgcggcagataccctcggctgaagacctggagacagatggcgggggaccgggccaggtggtggacgatggcctggagcacagggagctgggccatgggcagcctgaggccagaggccccgctcctctccagcagcaccctcaggtgttgctctgggaacagcagcgactggctgggcggctcccccggggcagcaccggggacactgtgctgcttcctctggcccagggtgggcaccggcctctgtcccgggctcagtcttccccagccgcacctgcctcactgtcagccccagagcctgccagccaggcccgagtcctctccagctcagagacccctgccaggaccctgcccttcaccacagggctgatctatgactcggtcatgctgaagcaccagtgctcctgcggtgacaacagcaggcacccggagcacgccggccgcatccagagcatctggtcccggctgcaggagcgggggctccggagccagtgtgagtgtctccgaggccggaaggcctccctggaagagctgcagtcggtccactctgagcggcacgtgctcctctacggcaccaacccgctcagccgcctcaaactggacaacgggaagctggcagggctcctggcacagcggatgtttgtgatgctgccctgtggtggggttggggtggacactgacaccatctggaatgagcttcattcctccaatgcagcccgctgggccgctggcagtgtcactgacctcgccttcaaagtggcttctcgtgagctaaagaatggtttcgctgtggtgcggcccccaggacaccatgcagatcattcaacagccatgggcttctgcttcttcaactcagtggccatcgcctgccggcagctgcaacagcagagcaaggccagcaagatcctcattgtagactgggacgtgcaccatggcaacggcacccagcaaaccttctaccaagaccccagtgtgctctacatctccctgcatcgccatgacgacggcaacttcttcccggggagtggggctgtggatgaggtaggggctggcagcggtgagggcttcaatgtcaatgtggcctgggctggaggtctggacccccccatgggggatcctgagtacctggctgctttcaggatagtcgtgatgcccatcgcccgagagttctctccagacctagtcctggtgtctgctggatttgatgctgctgagggtcacccggccccactgggtggctaccatgtttctgccaaatgttttggatacatgacgcagcaactgatgaacctggcaggaggcgcagtggtgctggccttggagggtggccatgacctcacagccatctgtgacgcctctgaggcctgtgtggctgctcttctgggtaacagggtggatcccctttcagaagaaggctggaaacagaaacccaacctcaatgccatccgctctctggaggccgtgatccgggtgcacagtaaatactggggctgcatgcagcgcctggcctcctgtccagactcctgggtgcctagagtgccaggggctgacaaagaagaagtggaggcagtgaccgcactggcgtccctctctgtgggcatcctggctgaagataggccctcggagcagctggtggaggaggaagaacctatgaatctctaa

SEQ ID NO: 1951 - DNA, 3216 bp, Homo sapiens
  source 1..3216: mol_type = genomic DNA
acagtcgctctgcagcctccggcgactggggggatgtgaggccggcgccccagccccccgccccgccatgagccccccgctctgagggccccggcccctggatgcacagccccggcgctggctgccccaggccctgtgcagacacaccaggccctcagccgcagcccatggacctgcgggtgggccagcggcccccagtggagcccccaccagagcccacattgctggccctgcagcgtccccagcgcctgcaccaccacctcttcctagcaggcctgcagcagcagcgctcggtggagcccatgaggctctccatggacacgccgatgcccgagttgcaggtgggaccccaggaacaagagctgcggcagcttctccacaaggacaagagcaagcgaagtgctgtagccagcagcgtggtcaagcagaagctagcggaggtgattctgaaaaaacagcaggcggccctagaaagaacagtccatcccaacagccccggcattccctacagaaccctggagcccctggagacggaaggagccacccgctccatgctcagcagctttttgcctcctgttcccagcctgcccagtgaccccccagagcacttccctctgcgcaagacagtctctgagcccaacctgaagctgcgctataagcccaagaagtccctggagcggaggaagaatccactgctccgaaaggagagtgcgccccccagcctccggcggcggcccgcagagaccctcggagactcctccccaagtagtagcagcacgcccgcatcagggtgcagctcccccaatgacagcgagcacggccccaatcccatcctgggctcggaggcgctcttgggccagcggctgcggctgcaggagacttctgtggccccgttcgccttgccgacagtgtccttgctgcccgcaatcactctggggctgcccgcccctgccagggctgacagtgaccgcaggacccatccgactctgggccctcgggggccaatcctggggagcccccacactcccctcttcctgccccatggcttggagcccgaggctgggggcaccttgccctctcgcctgcagcccattctcctcctggacccctcaggctctcatgccccgctgctgactgtgcccgggcttgggcccttgcccttccactttgcccagtccttaatgaccaccgagcggctctctgggtcaggcctccactggccactgagccggactcgctcagagcccctgccccccagtgccaccgctcccccaccgccgggccccatgcagccccgcctggagcagctcaaaactcacgtccaggtgatcaagaggtcagccaagccgagtgagaagccccggctgcggcagataccctcggctgaagacctggagacagatggcgggggaccgggccaggtggtggacgatggcctggagcacagggagctgggccatgggcagcctgaggccagaggccccgctcctctccagcagcaccctcaggtgttgctctgggaacagcagcgactggctgggcggctcccccggggcagcaccggggacactgtgctgcttcctctggcccagggtgggcaccggcctctgtcccgggctcagtcttccccagccgcacctgcctcactgtcagccccagagcctgccagccaggcccgagtcctctccagctcagagacccctgccaggaccctgcccttcaccacagggctgatctatgactcggtcatgctgaagcaccagtgctcctgcggtgacaacagcaggcacccggagcacgccggccgcatccagagcatctggtcccggctgcaggagcgggggctccggagccagtgtgagtgtctccgaggccggaaggcctccctggaagagctgcagtcggtccactctgagcggcacgtgctcctctacggcaccaacccgctcagccgcctcaaactggacaacgggaagctggcagggctcctggcacagcggatgtttgtgatgctgccctgtggtggggttggggtggacactgacaccatctggaatgagcttcattcctccaatgcagcccgctgggccgctggcagtgtcactgacctcgccttcaaagtggcttctcgtgagctaaagaatggtttcgctgtggtgcggcccccaggacaccatgcagatcattcaacagccatgggcttctgcttcttcaactcagtggccatcgcctgccggcagctgcaacagcagagcaaggccagcaagatcctcattgtagactgggacgtgcaccatggcaacggcacccagcaaaccttctaccaagaccccagtgtgctctacatctccctgcatcgccatgacgacggcaacttcttcccggggagtggggctgtggatgaggtaggggctggcagcggtgagggcttcaatgtcaatgtggcctgggctggaggtctggacccccccatgggggatcctgagtacctggctgctttcaggatagtcgtgatgcccatcgcccgagagttctctccagacctagtcctggtgtctgctggatttgatgctgctgagggtcacccggccccactgggtggctaccatgtttctgccaaatgttttggatacatgacgcagcaactgatgaacctggcaggaggcgcagtggtgctggccttggagggtggccatgacctcacagccatctgtgacgcctctgaggcctgtgtggctgctcttctgggtaacagggtggatcccctttcagaagaaggctggaaacagaaacccaacctcaatgccatccgctctctggaggccgtgatccgggtgcacagtaaatactggggctgcatgcagcgcctggcctcctgtccagactcctgggtgcctagagtgccaggggctgacaaagaagaagtggaggcagtgaccgcactggcgtccctctctgtgggcatcctggctgaagataggccctcggagcagctggtggaggaggaagaacctatgaatctctaaggctctggaaccatctgcccgcccaccatgcccttgggacctggttctcttctaacccctggcaatagcccccattcctgggtctttagagatcctgtgggcaagtagttggaaccagagaacagcctgcctgctttgacagttatcccagggagcgtgagaaaatccctgggtctagaatgggaactgg

SEQ ID NO: 1952 - DNA, 1161 bp, Homo sapiens
  source 1..1161: mol_type = genomic DNA
aaatggccccgtagggcaacaaggatggttagttttgaccctacttatttgtgccataaaaacaatcgatcctaattgacagctatttggacttttacatctgccaaacccttttccttgaactgtggtcactaaatgaggggagtctggtctgggaagtcccatccattccttcaataggatggggagcggtgatagtgtctccggcgatctcaagaataggagggaatgttgaccagggagcaccgctgcggccgatcagaggagcaggaactggaaccctggccgagtccgaaaaaagccagatctggaaggtggctgcggaacggttttaagcggaagatggaggagccggaggaaccggcggacagtgggcagtcgctggtcccggtttatatctatagtcccgagtatgtcagtatgtgtgactccctggccaagatccccaaacgggccagtatggtgcattctttgattgaagcatatgcactgcataagcagatgaggatagttaagcctaaagtggcctccatggaggagatggccaccttccacactgatgcttatctgcagcatctccagaaggtcagccaagagggcgatgatgatcatccggactccatagaatatgggctaggttatgactgcccagccactgaagggatatttgactatgcagcagctataggaggggctacgatcacagctgcccaatgcctgattgacggaatgtgcaaagtagcaattaactggtctggagggtggcatcatgcaaagaaagatgaagcatctggtttttgttatctcaatgatgctgtcctgggaatattacgattgcgacggaaatttgagcgtattctctacgtggatttggatctgcaccatggagatggtgtagaagacgcattcagtttcacctccaaagtcatgaccgtgtccctgcacaaattctccccaggatttttcccaggcaagagtgacgtgtctgatgttggcctagggaagggacggtactacagtgtaaatgtgcccattcaggatggcatacaagatgaaaaatattaccagatctgtgaaagtgtacgaacctcctgccccaaatccaggcctgtagaagcagctgccgcagcttgtcttccccatttgcatagccttgtctga

SEQ ID NO: 1953 - DNA, 2014 bp, Homo sapiens
  source 1..2014: mol_type = genomic DNA
aaatggccccgtagggcaacaaggatggttagttttgaccctacttatttgtgccataaaaacaatcgatcctaattgacagctatttggacttttacatctgccaaacccttttccttgaactgtggtcactaaatgaggggagtctggtctgggaagtcccatccattccttcaataggatggggagcggtgatagtgtctccggcgatctcaagaataggagggaatgttgaccagggagcaccgctgcggccgatcagaggagcaggaactggaaccctggccgagtccgaaaaaagccagatctggaaggtggctgcggaacggttttaagcggaagatggaggagccggaggaaccggcggacagtgggcagtcgctggtcccggtttatatctatagtcccgagtatgtcagtatgtgtgactccctggccaagatccccaaacgggccagtatggtgcattctttgattgaagcatatgcactgcataagcagatgaggatagttaagcctaaagtggcctccatggaggagatggccaccttccacactgatgcttatctgcagcatctccagaaggtcagccaagagggcgatgatgatcatccggactccatagaatatgggctaggttatgactgcccagccactgaagggatatttgactatgcagcagctataggaggggctacgatcacagctgcccaatgcctgattgacggaatgtgcaaagtagcaattaactggtctggagggtggcatcatgcaaagaaagatgaagcatctggtttttgttatctcaatgatgctgtcctgggaatattacgattgcgacggaaatttgagcgtattctctacgtggatttggatctgcaccatggagatggtgtagaagacgcattcagtttcacctccaaagtcatgaccgtgtccctgcacaaattctccccaggatttttcccaggaacaggtgacgtgtctgatgttggcctagggaagggacggtactacagtgtaaatgtgcccattcaggatggcatacaagatgaaaaatattaccagatctgtgaaagtgtactaaaggaagtataccaagcctttaatcccaaagcagtggtcttacagctgggagctgacacaatagctggggatcccatgtgctcctttaacatgactccagtgggaattggcaagtgtcttaagtacatccttcaatggcagttggcaacactcattttgggaggaggaggctataaccttgccaacacggctcgatgctggacatacttgaccggggtcatcctagggaaaacactatcctctgagatcccagatcatgagtttttcacagcatatggtcctgattatgtgctggaaatcacgccaagctgccggccagaccgcaatgagccccaccgaatccaacaaatcctcaactacatcaaagggaatctgaagcatgtggtctagttgacagaaagagatcaggtttccagagctgaggagtggtgcctataatgaagacagcgtgtttatgcaagcagtttgtggaatttgtgactgcagggaaaatttgaaagaaattacttcctgaaaatttccaaggggcatcaagtggcagctggcttcctggggtgaagaggcaggcaccccagagtcctcaactggacctaggggaagaaggagatatcccacatttaaagttcttatttaaaaaaacacacacacacaaatgaaatttttaatctttgaaaattatttttaagcgaattggggaggggagtattttaatcatcttaaatgaaacagatcagaagctggatgagagcagtcaccagtttgtagggcaggaggcagctgacaggcagggtttgggcctcaggaccatccaggtggagccctgggagagagggtactgatcagcagactgggaggtggggagaagtccgctggtgttgttttagtgttatatatctttggtttttttaataaaatctttgaaaaccta

SEQ ID NO: 1954 - DNA, 1740 bp, Homo sapiens
  source 1..1740: mol_type = genomic DNA
aaatggccccgtagggcaacaaggatggttagttttgaccctacttatttgtgccataaaaacaatcgatcctaattgacagctatttggacttttacatctgccaaacccttttccttgaactgtggtcactaaatgaggggagtctggtctgggaagtcccatccattccttcaataggatggggagcggtgatagtgtctccggcgatctcaagaataggagggaatgttgaccagggagcaccgctgcggccgatcagaggagcaggaactggaaccctggccgagtccgaaaaaagccagatctggaaggtggctgcggaacggttttaagcggaagatggaggagccggaggaaccggcggacagtgggcagtcgctggtcccggtttatatctatagtcccgagtatgtcagtatgtgtgactccctggccaagatccccaaacgggccagtatggtgcattctttgattgaagcatatgcactgcataagcagatgagagatgaagcatctggtttttgttatctcaatgatgctgtcctgggaatattacgattgcgacggaaatttgagcgtattctctacgtggatttggatctgcaccatggagatggtgtagaagacgcattcagtttcacctccaaagtcatgaccgtgtccctgcacaaattctccccaggatttttcccaggaacaggtgacgtgtctgatgttggcctagggaagggacggtactacagtgtaaatgtgcccattcaggatggcatacaagatgaaaaatattaccagatctgtgaaagtgtactaaaggaagtataccaagcctttaatcccaaagcagtggtcttacagctgggagctgacacaatagctggggatcccatgtgctcctttaacatgactccagtgggaattggcaagtgtcttaagtacatccttcaatggcagttggcaacactcattttgggaggaggaggctataaccttgccaacacggctcgatgctggacatacttgaccggggtcatcctagggaaaacactatcctctgagatcccagatcatgagtttttcacagcatatggtcctgattatgtgctggaaatcacgccaagctgccggccagaccgcaatgagccccaccgaatccaacaaatcctcaactacatcaaagggaatctgaagcatgtggtctagttgacagaaagagatcaggtttccagagctgaggagtggtgcctataatgaagacagcgtgtttatgcaagcagtttgtggaatttgtgactgcagggaaaatttgaaagaaattacttcctgaaaatttccaaggggcatcaagtggcagctggcttcctggggtgaagaggcaggcaccccagagtcctcaactggacctaggggaagaaggagatatcccacatttaaagttcttatttaaaaaaacacacacacacaaatgaaatttttaatctttgaaaattatttttaagcgaattggggaggggagtattttaatcatcttaaatgaaacagatcagaagctggatgagagcagtcaccagtttgtagggcaggaggcagctgacaggcagggtttgggcctcaggaccatccaggtggagccctgggagagagggtactgatcagcagactgggaggtggggagaagtccgctggtgttgttttagtgttatatatctttggtttttttaataaaatctttgaaaacct

SEQ ID NO: 1955 - DNA, 1316 bp, Homo sapiens
  source 1..1316: mol_type = genomic DNA
agaggagcaggaactggaaccctggccgagtccgaaaaaagccagatctggaaggtggctgcggaacggttttaagcggaagatggaggagccggaggaaccggcggacagtgggcagtcgctggtcccggtttatatctatagtcccgagtatgtcagtatgtgtgactccctggccaagatccccaaacgggccagtatggtgcattctttgattgaagcatatgcactgcataagcagatgaggatagttaagcctaaagtggcctccatggaggagatggccaccttccacactgatgcttatctgcagcatctccagaaggtcagccaagagggcgatgatgatcatccggactccatagaatatgggctagagatgaagcatctggtttttgttatctcaatgatgctgtcctgggaatattacgattgcgacggaaatttgagcgtattctctacgtggatttggatctgcaccatggagatggtgtagaagacgcattcagtttcacctccaaagtcatgaccgtgtccctgcacaaattctccccaggatttttcccaggaacaggtgacgtgtctgatgttggcctagggaagggacggtactacagtgtaaatgtgcccattcaggatggcatacaagatgaaaaatattaccagatctgtgaaagtgtactaaaggaagtataccaagcctttaatcccaaagcagtggtcttacagctgggagctgacacaatagctggggatcccatgtgctcctttaacatgactccagtgggaattggcaagtgtcttaagtacatccttcaatggcagttggcaacactcattttgggaggaggaggctataaccttgccaacacggctcgatgctggacatacttgaccggggtcatcctagggaaaacactatcctctgagatcccagatcatgagtttttcacagcatatggtcctgattatgtgctggaaatcacgccaagctgccggccagaccgcaatgagccccaccgaatccaacaaatcctcaactacatcaaagggaatctgaagcatgtggtctagttgacagaaagagatcaggtttccagagctgaggagtggtgcctataatgaagacagcgtgtttatgcaagcagtttgtggaatttgtgactgcagggaaaatttgaaagaaattacttcctgaaaatttccaaggggcatcaagtggcagctggcttcctggggtgaagaggcaggcaccccagagtcctcaactggacctaggggaagaaggagatatcccacatttaaagttcttattt

SEQ ID NO: 1956 - DNA, 833 bp, Homo sapiens
  source 1..833: mol_type = genomic DNA
gcggccgatcagaggagcaggaactggaaccctggccgagtccgaaaaaagccagatctggaaggtggctgcggaacggttttaagcggaagatggaggagccggaggaaccggcggacagtgggcagtcgctggtcccggtttatatctatagtcccgagtatgtcagtatgtgtgactccctggccaagatccccaaacgggccagtatggtgcattctttgattgaagcatatgcactgcataagcagatgaggatagttaagcctaaagtggcctccatggaggagatggccaccttccacactgatgcttatctgcagcatctccagaaggtcagccaagagggcgatgatgatcatccggactccatagaatatgggctaggttatgactgcccagccactgaagggatatttgactatgcagcagctataggaggggctacgatcacagctgcccaatgcctgattgacggaatgtgcaaagtagcaattaactggtctggagggtggcatcatgcaaagaagtaagaaaatgacctttctgttttctgactctttccttgagtcagtttctcagttatgtaaactcttatgcttattgtattgacatttacagagagacgtgtgtgtatgtggcactttacaaggcattctgaagaaatccaagtgaaatagaaaaaagattacctaatatagtggaaagcacactgctcaaagtcaggacacctgggctctacacctagtttttctaacttggctaactgacttggactgattaccctccctaggcctcagtttcttcatcaataaaatgaacaaaggatacaa

SEQ ID NO: 1957 - DNA, 704 bp, Homo sapiens
  source 1..704: mol_type = genomic DNA
tccgaaaaaagccagatctggaaggtggctgcggaacggttttaagcggaagatggaggagccggaggaaccggcggacagtgggcagtcgctggtcccggtttatatctatagtcccgagtatgtcagtatgtgtgactccctggccaagatccccaaacgggccagtatggtgcattctttgattgaagcatatgcactgcataagcagatgaggatagttaagcctaaagtggcctccatggaggagatggccaccttccacactgatgcttatctgcagcatctccagaaggtcagccaagagggcgatgatgatcatccggactccatagaatatgggctaggttatgactgcccagccactgaagggatatttgactatgcagcagctataggaggggctacgatcacagctgcccaatgcctgattgacggaatgtgcaaagtagcaattaactggtctggagggtggcatcatgcaaagaaagagacgtgtgtgtatgtggcactttacaaggcattctgaagaaatccaagtgaaatagaaaaaagattacctaatatagtggaaagcacactgctcaaagtcaggacacctgggctctacacctagtttttctaacttggctaactgacttggactgattaccctccctaggcctcagtttcttcatcaataaaatgaacaaaggatacaacta

SEQ ID NO: 1958 - DNA, 632 bp, Homo sapiens
  source 1..632: mol_type = genomic DNA
ccgaaaaaagccagatctggaaggtggctgcggaacggttttaagcggaagatggaggagccggaggaaccggcggacagtgggcagtcgctggtcccggtttatatctatagtcccgagtatgtcagtatgtgtgactccctggccaagatccccaaacgggccagtatggtgcattctttgattgaagcatatgcactgcataagcagatgagagatgaagcatctggtttttgttatctcaatgatgctgtcctgggaatattacgattgcgacggaaatttgagcgtattctctacgtggatttggatctgcaccatggagatggaacaggtgacgtgtctgatgttggcctagggaagggacggtactacagtgtaaatgtgcccattcaggatggcatacaagatgaaaaatattaccagatctgtgaaaggtacgaacctcctgccccaaatccaggcctgtagaagcagctgccgcagcttgtcttccccatttgcatagccttgtctgaaaactagactgctgaatactgaaggatcaggtttctcatcaagaaaactgcattttaaatgaatatcttgtatgtttatagggaagttactaatgtagtataaagagatgcctg

SEQ ID NO: 1959 - DNA, 2338 bp, Homo sapiens
  source 1..2338: mol_type = genomic DNA
ataaaaacaatcgatcctaattgacagctatttggacttttacatctgccaaacccttttccttgaactgtggtcactaaatgaggggagtctggtctgggaagtcccatccattccttcaataggatggggagcggtgatagtgtctccggcgatctcaagaataggagggaatgttgaccagggagcaccgctgcggccgatcagaggagcaggaactggaaccctggccgagtccgaaaaaagccagatctggaaggtggctgcggaacggttttaagcggaagatggaggagccggaggaaccggcggacagtgggcagtcgctggtcccggtttatatctatagtcccgagtatgtcagtatgtgtgactccctggccaagatccccaaacgggccagtatggtgcattctttgattgaagcatatgcactgcataagcagatgaggatagttaagcctaaagtggcctccatggaggagatggccaccttccacactgatgcttatctgcagcatctccagaaggtcagccaagagggcgatgatgatcatccggactccatagaatatgggctaggttatgactgcccagccactgaagggatatttgactatgcagcagctataggaggggctacgatcacagctgcccaatgcctgattgacggaatgtgcaaagtagcaattaactggtctggagggtggcatcatgcaaagaaagatgaagcatctggtttttgttatctcaatgatgctgtcctgggaatattacgattgcgacggaaatttgagcgtattctctacgtggatttggatctgcaccatggagatggtgtagaagacgcattcagtttcacctccaaagtcatgaccgtgtccctgcacaaattctccccaggatttttcccaggaacaggtgacgtgtctgatgttggcctagggaagggacggtactacagtgtaaatgtgcccattcaggatggcatacaagatgaaaaatattaccagatctgtgaaaggtacgaacctcctgccccaaatccaggcctgtagaagcagctgccgcagcttgtcttccccatttgcatagccttgtctgaaaactagactgctgaatactgaaggatcaggtttctcatcaagaaaactgcattttaaatgaatatcttgtatgtttatagggaagttactaatgtagtataaagagatgcctgtcctccccctcctttctggataagagattttatactttcacaaaacgaaaaattaatgatttgcagtgtagcaaacagtactgttacagtggttagggaaactttcccaaaagcaatctggagtgacatttcattcatgtattcatttaatgactatttattgaatgcctactatgtataaagtattgattctaccctcgaggaagttagtggaaatttttaaatgttagataaataaatagagattgattttcatattcacacacatttaaataaataaaacatagaaaattgtaagaaccataagagatagaatgctgtgggtattcaaagagagaaaatacttcagaaaaaggcgtaattgaggaggtaacatttgatctggtttctaaagggtagctaattactctatctttacaaagtgtgtgaatgtatatgagtgtttataaaatctgggtcaagtttgaatatacagagattgtagggaaggatgttctacacacagggtacagcaagatcaaagttgggagagactgagctatgtacaaagaatagcagtggttttagtttggctggactgtaaagtgcatggaggagaagttgcaaagaagattggaaacctgggtgggaaccacatcacggaagagctggaattcttagctatgaaaatttgtaccatattctgtaaacattttgggagccactgaaggttttagaatgagggaatcataagatcaaagcttgcttgggaagattaacactcttcccagtaaagttttggcaacagcatctgctgttatattgacataatgtgggtaaagtggctgacatagtatctgatgcataggagctcagtaagtcatggaagcagatatactgtagtggtttagagcaaaaactctggtgcctggatgcctgggttcaaaaaccagctctgccacttaatagctgtgtgattttgtacagatttcttaacctctctgtatggcagtttccccatctgtaaaataggattaaaaataatacctgttatgaattattatgagggtcaaatgagttaagacatgtaaaatacatagaacagtgctctattctgaataaagttctcaataaatgtta

SEQ ID NO: 1960 - DNA, 1477 bp, Homo sapiens
  source 1..1477: mol_type = genomic DNA
aagccgggtaggcgctgtctccgtcgcctccaacccccccggtccgaccagggaaggtgggatgctctgatggccgggcctgcggcgctgagcgcggcggcggcggctgctctggcggccgccctgctcctgctgcgtcgtgaggacccggggccgggggctggccccagcatggccgaaacagaagccctgtcgaagcttcgggaagacttcaggatgcagaataaatccgtctttattttgggcgccagcggagaaaccggcagagtgctcttaaaggaaatcctggagcagggcctgttttccaaagtcacgctcattggccggaggaagctcaccttcgacgaggaagcttataaaaatgtgaatcaagaagtggtggactttgaaaagttggatgactacgcctctgcctttcaaggtcatgatgttggattctgttgcctgggtaccaccagagggaaagctggggcggagggatttgttcgtgttgaccgagattatgtgctgaagtctgcagagctggcaaaagctggagggtgcaaacatttcaacttgctatcctctaaaggagctgataaatcaagcaattttttatatctacaagttaagggagaagtagaagccaaggttgaagaattaaaatttgatcgttactctgtatttaggcctggagttctgttatgtgataggcaagaatctcgcccaggtgaatggctggttagaaagttctttggctccttaccagactcttgggccagtgggcattctgtgcctgtggtgaccgtggttagagcaatgctgaacaatgtggtgagaccaagagacaagcagatggaactgctggagaacaaggccatccatgacctggggaaagcgcatggctctctcaagccatgaccacattggagaaatggtttttattgtcaaccttaacacccatcaccaaatcggtaatttcagggtctaaaaaaagtcagcatgttttaactttgttgttttactatcctcaggcatccattccaatcaagaaatgatggtgctctgcatcagtggttcagagcctggttatacatatagatcactcagggagctttggaaaaataaagatttgtcagccctatctcaaacttgaatcaaaatttctggggtgtgggcacaataatctgtaattttctttgtttatacttcccctgatgccactggttccgatgccactggctggggggcctgctttgaaatgcttgtctgcagagtcacagcagccatgaaaaccttatgaccgtgcaaatgagctctgctctaaaattgttgacattcatgtctctgagttacaaaagtgctaattcactacatgtaattgtgtaagtaaacattgtgcctttactacttctttatgtaatagaagttatatacctaagcttatataatacatggggaggattaaataaaggaataaagatgaatggacaactcc

SEQ ID NO: 1961 - DNA, 886 bp, Homo sapiens
  source 1..886: mol_type = genomic DNA
gcgaggccacccggaagaccaagccggcatggccgaaacagaagccctgtcgaagcttcgggaagacttcaggatgcagaataaatccgtctttattttgggcgccagcggagaaaccggcagagtgctcttaaaggaaatcctggagcagggcctgttttccaaagtcacgctcattggccggaggaagctcaccttcgacgaggaagcttataaaaatgtgaatcaagaagtggtggactttgaaaagttggatgactacgcctctgcctttcaaggtcatgatgttggattctgttgcctgggtaccaccagagggaaagctggggcggagggatttgttcgtgttgaccgagattatgtgctgaagtctgcagagctggcaaaagctggagggtgcaaacatttcaacttgctatcctctaaaggagctgataaatcaagcaattttttatatctacaagttaagggagaagtagaagccaaggttgaagaattaaaatttgatcgttactctgtatttaggcctggagttctgttatgtgataggcaagaatctcgcccaggtgaatggctggttagaaagttctttggctccttaccagactcttgggccagtgggcattctgtgcctgtggtgaccgtggttagagcaatgctgaacaatgtggtgagaccaagagacaagcagatggaactgctggagaacaaggccatccatgacctggggaaagcgcatggctctctcaagccatgaccacattggagaaatggtttttattgtcaaccttaacacccatcaccaaatcggtaatttcagggtctaaaaaaagtcagcatgttttaactttgttgttttactatcctcaggcatccattccaatca

SEQ ID NO: 1962 - DNA, 967 bp, Homo sapiens
  source 1..967: mol_type = genomic DNA
gaggccacccggaagaccaagccgggtaggcgctgtctccgtcgcctccaacccccccggtccgaccagggaagcatggccgaaacagaagccctgtcgaagcttcgggaagacttcaggatgcagaataaatccgtctttattttgggcgccagcggagaaaccggcagagtgctcttaaaggaaatcctggagcagggcctgttttccaaagtcacgctcattggccggaggaagctcaccttcgacgaggaagcttataaaaatgtgaatcaagaagtggtggactttgaaaagttggatgactacgcctctgcctttcaaggtcatgatgttggattctgttgcctgggtaccaccagagggaaagctggggcggagggatttgttcgtgttgaccgagattatgtgctgaagtctgcagagctggcaaaagctggagggtgcaaacatttcaacttgctatcctctaaaggagctgataaatcaagcaattttttatatctacaagttaagggagaagtagaagccaaggttgaagaattaaaatttgatcgttactctgtatttaggcctggagttctgttatgtgataggcaagaatctcgcccaggtgaatggctggttagaaagttctttggctccttaccagactcttgggccagtgggcattctgtgcctgtggtgaccgtggttagagcaatgctgaacaatgtggtgagaccaagagacaagcagatggaactgctggagaacaaggccatccatgacctggggaaagcgcatggctctctcaagccatgaccacattggagaaatggtttttattgtcaaccttaacacccatcaccaaatcggtaatttcagggtctaaaaaaagtcagcatgttttaactttgttgttttactatcctcaggcatccattccaatcaagaaatgatggtgctctgcatcagtggttcagag

SEQ ID NO: 1963 - DNA, 1748 bp, Homo sapiens
  source 1..1748: mol_type = genomic DNA
aggtgggatgctctgatggccgggcctgcggcgctgagcgcggcggcggcggctgctctggcggccgccctgctcctgctgcgtcgtgaggacccggggccgggggctggccccaggtaacccctccgcgtatgggaccgagctgggccaggtctcctggccgggccggggataccgtggggtatgcccagtgatgccagcagcttgtggcacctgggcgcaccctccagctcgggccccttccgatgggtctgctggctcaggtgcgggcgatggccggggagccgcgccccgcacgtgactcagcactttccccagagcccggactgcggagaacaatatcctcctccctaacagataaacagcccttgttcctcgggataaggactggcagtcccctgacaccctaagaccggcatctgtcgatgttatttccccagcatggccgaaacagaagccctgtcgaagcttcgggaagacttcaggatgcagaataaatccgtctttattttgggcgccagcggagaaaccggcagagtgctcttaaaggaaatcctggagcagggcctgttttccaaagtcacgctcattggccggaggaagctcaccttcgacgaggaagcttataaaaatgtgaatcaagaagtggtggactttgaaaagttggatgactacgcctctgcctttcaaggtcatgatgttggattctgttgcctgggtaccaccagagggaaagctggggcggagggatttgttcgtgttgaccgagattatgtgctgaagtctgcagagctggcaaaagctggagggtgcaaacatttcaacttgctatcctctaaaggagctgataaatcaagcaattttttatatctacaagttaagggagaagtagaagccaaggttgaagaattaaaatttgatcgttactctgtatttaggcctggagttctgttatgtgataggcaagaatctcgcccaggtgaatggctggttagaaagttctttggctccttaccagactcttgggccagtgggcattctgtgcctgtggtgaccgtggttagagcaatgctgaacaatgtggtgagaccaagagacaagcagatggaactgctggagaacaaggccatccatgacctggggaaagcgcatggctctctcaagccatgaccacattggagaaatggtttttattgtcaaccttaacacccatcaccaaatcggtaatttcagggtctaaaaaaagtcagcatgttttaactttgttgttttactatcctcaggcatccattccaatcaagaaatgatggtgctctgcatcagtggttcagagcctggttatacatatagatcactcagggagctttggaaaaataaagatttgtcagccctatctcaaacttgaatcaaaatttctggggtgtgggcacaataatctgtaattttctttgtttatacttcccctgatgccactggttccgatgccactggctggggggcctgctttgaaatgcttgtctgcagagtcacagcagccatgaaaaccttatgaccgtgcaaatgagctctgctctaaaattgttgacattcatgtctctgagttacaaaagtgctaattcactacatgtaattgtgtaagtaaacattgtgcctttactacttctttatgtaatagaagttatatacctaagcttatataatacatggggaggattaaataaaggaataaagatgaatggacaactcct

SEQ ID NO: 1964 - DNA, 713 bp, Homo sapiens
  source 1..713: mol_type = genomic DNA
aggtcccgcccctgtgggcggggcgaggcagcgtcgccgcgaggccacccggaagaccaagccggcatggccgaaacagaagccctgtcgaagcttcgggaagacttcaggatgcagaataaatccgtctttattttgggcgccagcggagaaaccggcagagtgctcttaaaggaaatcctggagcagggcctgttttccaaagtcacgctcattggccggaggaagctcaccttcgacgaggaagcttataaaaatgtgaatcaagaagtggtggactttgaaaagttggatgactacgcctctgcctttcaaggtcatgatgttggattctgttgcctgggtaccaccagagggaaagctggggcggtaaggaaggcatatgctcttttccctttttgctggccagtaatatcaaggattcttttcttgctcactctttttctttgtgcctgttgcaatgcttaaatgtgaataagcctttattgtttaagattctatatgctgcactaacctttggtatccttttaatagtactgataagttcgtctttcaaagtaatccttgagttcaggccccagtgctggagacgtcgtaaatatttacatgattttgcctattgtgattatcgctatcactacatcccctgactaagggaaaccatgatgtctgagtaaaactaattggtttatgctgttaacaatcagctgttt

SEQ ID NO: 1965 - DNA, 774 bp, Homo sapiens
  source 1..774: mol_type = genomic DNA
tcctccctaacagataaacagcccttgttcctcgggataaggactggcagtcccctgacaccctaagaccggcatctgtcgatgttatttccccagcatggccgaaacagaagccctgtcgaagcttcgggaagacttcaggatgcagaataaatccgtctttattttgggcgccagcggagaaaccggcagagtgctcttaaaggaaatcctggagcagggcctgttttccaaagtcacgctcattggccggaggaagctcaccttcgacgaggaagcttataaaaatgtgaatcaagaagtggtggactttgaaaagttggatgactacgcctctgcctttcaaggtcatgatgttggattctgttgcctgggtaccaccagagggaaagctggggcggtaaggaaggcatatgctcttttccctttttgctggccagtaatatcaaggattcttttcttgctcactctttttctttgtgcctgttgcaatgcttaaatgtgaataagcctttattgtttaagattctatatgctgcactaacctttggtatccttttaatagtactgataagttcgtctttcaaagtaatccttgagttcaggccccagtgctggagacgtcgtaaatatttacatgattttgcctattgtgattatcgctatcactacatcccctgactaagggaaaccatgatgtctgagtaaaactaattggtttatgctgttaacaatcagctgtttttccccttaataaatgtttgaaatttgaaa

SEQ ID NO: 1966 - DNA, 595 bp, Homo sapiens
  source 1..595: mol_type = genomic DNA
ctggcggccgccctgctcctgctgcgtcgtgaggacccggggccgggggctggccccagcatggccgaaacagaagccctgtcgaagcttcgggaagacttcaggatgcagaataaatccgtctttattttgggcgccagcggagaaaccggcagagtgctcttaaaggaaatcctggagcagggcctgttttccaaagtcacgctcattggccggaggaagctcaccttcgacgaggaagcttataaaaatgtgaatcaagaagtggtggactttgaaaagttggatgactacgcctctgcctttcaaggtcatgatgttggattctgttgcctgggtaccaccagagggaaagctggggcggtaaggaaggcatatgctcttttccctttttgctggccagtaatatcaaggattcttttcttgctcactctttttctttgtgcctgttgcaatgcttaaatgtgaataagcctttattgtttaagattctatatgctgcactaacctttggtatccttttaatagtactgataagttcgtctttcaaagtaatccttgagttcaggccccagtgctggagacgtcgtaaata

SEQ ID NO: 1967 - DNA, 2977 bp, Homo sapiens
  source 1..2977: mol_type = genomic DNA
gagtacaatggaccctggcaaagccccgctcccggcccaggtcttctgctctccaggtctgcccctccggctctccctctctccgggtttccccctccccaccatcatttgcatccagccgaaagctgggcccttcccactaatttgcatatcttatatggcctaatggtggcgatcatggcaagttagaagttttctgactcctttcggaggagcctccgggaccccggggagtaacaggtgtctggaggctgaagggtggaggggttcctggatttggggtttgcttgtgaaactcccctccaccctcctctctcgcacccacccaccccctcacccccttctttttccgtccttggaaaatggtgtccaagctcacgtcgctccagcaagaactcctgagcgccctgctgagctccggggtcaccaaggaggtgctggttcaggccttggaggagttgctgccatccccgaacttcggggtgaagctggagacgctgcccctgtcccctggcagcggggccgagcccgacaccaagccggtcttccatactctcaccaacggccacgccaagggccgcttgtccggcgacgagggctccgaggacggcgacgactatgacacacctcccatcctcaaggagctgcaggcgctcaacaccgaggaggcggcggagcagcgggcggaggtggaccggatgctcagtgaggacccttggagggctgctaaaatgatcaagggttacatgcagcaacacaacatcccccagagggaggtggtcgatgtcaccggcctgaaccagtcgcacctctcccagcatctcaacaagggcacccctatgaagacccagaagcgtgccgctctgtacacctggtacgtcagaaagcaacgagagatcctccgacaattcaaccagacagtccagagttctggaaatatgacagacaaaagcagtcaggatcagctgctgtttctctttccagagttcagtcaacagagccatgggcctgggcagtccgatgatgcctgctctgagcccaccaacaagaagatgcgccgcaaccggttcaaatgggggcccgcgtcccagcaaatcttgtaccaggcctacgatcggcaaaagaaccccagcaaggaagagagagaggccttagtggaggaatgcaacagggcagaatgtttgcagcgaggggtgtccccctccaaagcccacggcctgggctccaacttggtcactgaggtccgtgtctacaactggtttgcaaaccgcaggaaggaggaggcattccggcaaaagctggccatggacgcctatagctccaaccagactcacagcctgaaccctctgctctcccacggctccccccaccaccagcccagctcctctcctccaaacaagctgtcaggagtgcgctacagccagcagggaaacaatgagatcacttcctcctcaacaatcagtcaccatggcaacagcgccatggtgaccagccagtcggttttacagcaagtctccccagccagcctggacccaggccacaatctcctctcacctgatggtaaaatgatctcagtctcaggaggaggtttgcccccagtcagcaccttgacgaatatccacagcctctcccaccataatccccagcaatctcaaaacctcatcatgacacccctctctggagtcatggcaattgcacaaagcctcaacacctcccaagcacagagtgtccctgtcatcaacagtgtggccggcagcctggcagccctgcagcccgtccagttctcccagcagctgcacagccctcaccagcagcccctcatgcagcagagcccaggcagccacatggcccagcagcccttcatggcagctgtgactcagctgcagaactcacacatgtacgcacacaagcaggaacccccccagtattcccacacctcccggtttccatctgcaatggtggtcacagataccagcagcatcagtacactcaccaacatgtcttcaagtaaacagtgtcctctacaagcctggtgatgcccacacaccacttacttcgtgcgcaacaacaaggaccctgttttccacaccatcaccctctgggcagctgtcatggaaaagcccagtgacctgaccggcacctgcgagaggtccctgcttacctgacggacgtcctgctggcacctcagacaatccactctcaggaggcgcagcccgaagcccagtttcccttctatgcagtattgccacaatgcctctcccacgatgtcaaggactcctgtctgtcctggaggtgggagacaaggaaccaccgaagaggaagcaagaaagccgtactgtctatgttgtgatccttcatcgaacaaactgatgcgaaaacttgaatctgttactgaaatgaggagagaaggacatgtgctattgaactgagccaaacacactgtaaatatccacagactccctcccctgcccccatcccacatgatcttgagatttcttttaaagaagtaaatttgtccaatggctgtaaactataaactactgtaattaagtgcaatttcccctctgtgtcctctcccctctgccctgtatataatactaaagtgtctattagttttctttgtaaaggtcagagtcaaaatttcaaaagtgatctgtcccctctcccctcatggagaaacatcctaagtgggaagtgaagccccttgtcctctcccgcgggcctggacacttatggggacagcataccttggactgactaccagctaactccagtctcctgacattaagacacacctctggatccctggaggggctgaatgtagtgtgtcagagtaacatgccagcttcctgtgggccaggagctcagccgtgcactccctaagaaaccccagggcagggaaactggctgtttgatagcagaagaaaaagttgcagtctcagaaagccttccattaaaacaatttattttatcacta

SEQ ID NO: 1968 - DNA, 1546 bp, Homo sapiens
  source 1..1546: mol_type = genomic DNA
ggggagtaacaggtgtctggaggctgaagggtggaggggttcctggatttggggtttgcttgtgaaactcccctccaccctcctctctcgcacccacccaccccctcacccccttctttttccgtccttggaaaatggtgtccaagctcacgtcgctccagcaagaactcctgagcgccctgctgagctccggggtcaccaaggaggtgctggttcaggccttggaggagttgctgccatccccgaacttcggggtgaagctggagacgctgcccctgtcccctggcagcggggccgagcccgacaccaagccggtcttccatactctcaccaacggccacgccaagggccgcttgtccggcgacgagggctccgaggacggcgacgactatgacacacctcccatcctcaaggagctgcaggcgctcaacaccgaggaggcggcggagcagcgggcggaggtggaccggatgctcagtgaggacccttggagggctgctaaaatgatcaagggttacatgcagcaacacaacatcccccagagggaggtggtcgatgtcaccggcctgaaccagtcgcacctctcccagcatctcaacaagggcacccctatgaagacccagaagcgtgccgctctgtacacctggtacgtcagaaagcaacgagagatcctccgacagttcagtcaacagagccatgggcctgggcagtccgatgatgcctgctctgagcccaccaacaagaagatgcgccgcaaccggttcaaatgggggcccgcgtcccagcaaatcttgtaccaggcctacgatcggcaaaagaaccccagcaaggaagagagagaggccttagtggaggaatgcaacagggcagaatgtttgcagcgaggggtgtccccctccaaagcccacggcctgggctccaacttggtcactgaggtccgtgtctacaactggtttgcaaaccgcaggaaggaggaggcattccggcaaaagctggccatggacgcctatagctccaaccagactcacagcctgaaccctctgctctcccacggctccccccaccaccagcccagctcctctcctccaaacaagctgtcaggagtgcgctacagccagcagggaaacaatgagatcacttcctcctcaacaatcagtcaccatggcaacagcgccatggtgaccagccagtcggttttacagcaagtctccccagccagcctggacccaggccacaatctcctctcacctgatggtaaaatgatctcagtctcaggaggaggtttgcccccagtcagcaccttgacgaatatccacagcctctcccaccataatccccagcaatctcaaaacctcatcatgacacccctctctggagtcatggcaattgcacaaatgtcctctacaagcctggtgatgcccacacaccacttacttcgtgcgcaacaacaaggaccctgttttccacaccatcaccctctgggcagctgtcatggaaaagcccagtgacctgaccggcacctgcgagaggtccctgcttacctgac

SEQ ID NO: 1969 - DNA, 1794 bp, Homo sapiens
  source 1..1794: mol_type = genomic DNA
agaagttttctgactcctttcggaggagcctccgggaccccggggagtaacaggtgtctggaggctgaagggtggaggggttcctggatttggggtttgcttgtgaaactcccctccaccctcctctctcgcacccacccaccccctcacccccgaacttcggggtgaagctggagacgctgcccctgtcccctggcagcggggccgagcccgacaccaagccggtcttccatactctcaccaacggccacgccaagggccgcttgtccggcgacgagggctccgaggacggcgacgactatgacacacctcccatcctcaaggagctgcaggcgctcaacaccgaggaggcggcggagcagcgggcggaggtggaccggatgctcagtgaggacccttggagggctgctaaaatgatcaagggttacatgcagcaacacaacatcccccagagggaggtggtcgatgtcaccggcctgaaccagtcgcacctctcccagcatctcaacaagggcacccctatgaagacccagaagcgtgccgctctgtacacctggtacgtcagaaagcaacgagagatcctccgacaattcaaccagacagtccagagttctggaaatatgacagacaaaagcagtcaggatcagctgctgtttctctttccagagttcagtcaacagagccatgggcctgggcagtccgatgatgcctgctctgagcccaccaacaagaagatgcgccgcaaccggttcaaatgggggcccgcgtcccagcaaatcttgtaccaggcctacgatcggcaaaagaaccccagcaaggaagagagagaggccttagtggaggaatgcaacagggcagaatgtttgcagcgaggggtgtccccctccaaagcccacggcctgggctccaacttggtcactgaggtccgtgtctacaactggtttgcaaaccgcaggaaggaggaggcattccggcaaaagctggccatggacgcctatagctccaaccagactcacagcctgaaccctctgctctcccacggctccccccaccaccagcccagctcctctcctccaaacaagctgtcaggagtgcgctacagccagcagggaaacaatgagatcacttcctcctcaacaatcagtcaccatggcaacagcgccatggtgaccagccagtcggttttacagcaagtctccccagccagcctggacccaggccacaatctcctctcacctgatggtaaaatgatctcagtctcaggaggaggtttgcccccagtcagcaccttgacgaatatccacagcctctcccaccataatccccagcaatctcaaaacctcatcatgacacccctctctggagtcatggcaattgcacaaagcctcaacacctcccaagcacagagtgtccctgtcatcaacagtgtggccggcagcctggcagccctgcagcccgtccagttctcccagcagctgcacagccctcaccagcagcccctcatgcagcagagcccaggcagccacatggcccagcagcccttcatggcagctgtgactcagctgcagaactcacacatgtacgcacacaagcaggaacccccccagtattcccacacctcccggtttccatctgcaatggtggtcacagataccagcagcatcagtacactcaccaacatgtcttcaagtaaacagtgtcctctacaagcctggtgatgcccacacaccacttacttcgtgcgcaacaacaaggaccctgttttccacaccatcaccctctgggcagctgtca

SEQ ID NO: 1970 - DNA, 1820 bp, Homo sapiens
  source 1..1820: mol_type = genomic DNA
ggggagtaacaggtgtctggaggctgaagggtggaggggttcctggatttggggtttgcttgtgaaactcccctccaccctcctctctcgcacccacccaccccctcacccccttctttttccgtccttggaaaatggtgtccaagctcacgtcgctccagcaagaactcctgagcgccctgctgagctccggggtcaccaaggaggtgctggttcaggccttggaggagttgctgccatccccgaacttcggggtgaagctggagacgctgcccctgtcccctggcagcggggccgagcccgacaccaagccggtcttccatactctcaccaacggccacgccaagggccgcttgtccggcgacgagggctccgaggacggcgacgactatgacacacctcccatcctcaaggagctgcaggcgctcaacaccgaggaggcggcggagcagcgggcggaggtggaccggatgctcagtgaggacccttggagggctgctaaaatgatcaagggttacatgcagcaacacaacatcccccagagggaggtggtcgatgtcaccggcctgaaccagtcgcacctctcccagcatctcaacaagggcacccctatgaagacccagaagcgtgccgctctgtacacctggtacgtcagaaagcaacgagagatcctccgacaattcaaccagacagtccagagttctggaaatatgacagacaaaagcagtcaggatcagctgctgtttctctttccagagttcagtcaacagagccatgggcctgggcagtccgatgatgcctgctctgagcccaccaacaagaagatgcgccgcaaccggttcaaatgggggcccgcgtcccagcaaatcttgtaccaggcctacgatcggcaaaagaaccccagcaaggaagagagagaggccttagtggaggaatgcaacagggcagaatgtttgcagcgaggggtgtccccctccaaagcccacggcctgggctccaacttggtcactgaggtccgtgtctacaactggtttgcaaaccgcaggaaggaggaggcattccggcaaaagctggccatggacgcctatagctccaaccagactcacagcctgaaccctctgctctcccacggctccccccaccaccagcccagctcctctcctccaaacaagctgtcaggagtgcgctacagccagcagggaaacaatgagatcacttcctcctcaacaatcagtcaccatggcaacagcgccatggtgaccagccagtcggttttacagcaagtctccccagccagcctggacccaggccacaatctcctctcacctgatggtaaaatggatctcagtctcaggaggaggtttgcccccagtcagcaccttgacgaatatccacagcctctcccaccataatccccagcaatctcaaaacctcatcatgacacccctctctggagtcatggcaattgcacaaagcctcaacacctcccaagcacagagtgtccctgtcatcaacagtgtggccggcagcctggcagccctgcagcccgtccagttctcccagcagctgcacagccctcaccagcagcccctcatgcagcagagcccaggcagccacatggcccagcagcccttcatggcagctgtgactcagctgcagaactcacacatgtcctctacaagcctggtgatgcccacacaccacttacttcgtgcgcaacaacaaggaccctgttttccacaccatcaccctctgggcagctgtcatggaaaagcccagtgacctgaccggcacctgcgagaggtccctgcttacctgac

SEQ ID NO: 1971 - DNA, 1971 bp, Homo sapiens
  source 1..1971: mol_type = genomic DNA
agaagttttctgactcctttcggaggagcctccgggaccccggggagtaacaggtgtctggaggctgaagggtggaggggttcctggatttggggtttgcttgtgaaactcccctccaccctcctctctcgcacccacccaccccctcacccccttctttttccgtccttggaaaatggtgtccaagctcacgtcgctccagcaagaactcctgagcgccctgctgagctccggggtcaccaaggaggtgctggttcaggccttggaggagttgctgccatccccgaacttcggggtgaagctggagacgctgcccctgtcccctggcagcggggccgagcccgacaccaagccggtcttccatactctcaccaacggccacgccaagggccgcttgtccggcgacgagggctccgaggacggcgacgactatgacacacctcccatcctcaaggagctgcaggcgctcaacaccgaggaggcggcggagcagcgggcggaggtggaccggatgctcagtgaggacccttggagggctgctaaaatgatcaagggttacatgcagcaacacaacatcccccagagggaggtggtcgatgtcaccggcctgaaccagtcgcacctctcccagcatctcaacaagggcacccctatgaagacccagaagcgtgccgctctgtacacctggtacgtcagaaagcaacgagagatcctccgacagttcagtcaacagagccatgggcctgggcagtccgatgatgcctgctctgagcccaccaacaagaagatgcgccgcaaccggttcaaatgggggcccgcgtcccagcaaatcttgtaccaggcctacgatcggcaaaagaaccccagcaaggaagagagagaggccttagtggaggaatgcaacagggcagaatgtttgcagcgaggggtgtccccctccaaagcccacggcctgggctccaacttggtcactgaggtccgtgtctacaactggtttgcaaaccgcaggaaggaggaggcattccggcaaaagctggccatggacgcctatagctccaaccagactcacagcctgaaccctctgctctcccacggctccccccaccaccagcccagctcctctcctccaaacaagctgtcaggagtgcgctacagccagcagggaaacaatgagatcacttcctcctcaacaatcagtcaccatggcaacagcgccatggtgaccagccagtcggttttacagcaagtctccccagccagcctggacccaggccacaatctcctctcacctgatggtaaaatgatctcagtctcaggaggaggtttgcccccagtcagcaccttgacgaatatccacagcctctcccaccataatccccagcaatctcaaaacctcatcatgacacccctctctggagtcatggcaattgcacaaagcctcaacacctcccaagcacagagtgtccctgtcatcaacagtgtggccggcagcctggcagccctgcagcccgtccagttctcccagcagctgcacagccctcaccagcagcccctcatgcagcagagcccaggcagccacatggcccagcagcccttcatggcagctgtgactcagctgcagaactcacacatgtacgcacacaagcaggaacccccccagtattcccacacctcccggtttccatctgcaatggtggtcacagataccagcagcatcagtacactcaccaacatgtcttcaagtaaacagtgtcctctacaagcctggtgatgcccacacaccacttacttcgtgcgcaacaacaaggaccctgttttccacaccatcaccctctgggcagctgtcatggaaaagcccagtgacctgaccggcacctgcgagaggtccctgcttacctgacggacgtcctgctggcacctcagacaatccactctcaggaggcgcagcccgaagcccagtttcccttctat

SEQ ID NO: 1972 - DNA, 2935 bp, Homo sapiens
  source 1..2935: mol_type = genomic DNA
gccgcggctgcgccatccgcggccatgaagtttcgggccaagatcgtggacggggcctgtctgaaccacttcacacgaatcagtaacatgatagccaagcttgccaaaacctgcaccctccgcatcagccctgataagcttaacttcatcctttgtgacaagctggctaatggaggagtgagcatgtggtgtgagctggaacaggagaacttcttcaacgaatttcaaatggagggtgtctctgcagaaaacaatgagatttatttagagctaacatcggaaaacttatctcgagccttgaagactgcccagaatgccagggctttgaaaatcaaactgactaataaacactttccctgcctcacggtctccgtggagctgttatctatgtcaagcagtagccgcattgtgacccatgacatccccataaaggtgattcctaggaaattgtggaaggacttacaagaaccggtggtcccagatcctgatgttagtatttatttaccagtcttgaagactatgaagagtgttgtggaaaaaatgaaaaacatcagcaatcaccttgttattgaagcaaacctagatggagaattgaatttgaaaatagaaactgaattagtatgtgttacaactcattttaaagatcttggaaatcctccattagcctctgaaagcacccatgaggacagaaacgtggaacacatggctgaagtgcacatagatattaggaagctcctacagtttcttgctggacaacaagtaaatcccacaaaggccttatgcaatattgtgaataacaagatggtgcattttgatctgcttcatgaagacgtgtcccttcagtatttcatccctgcgctgtcctagcaccctgtcgctggagttggcatgcagagactttgtcaggatgggagaggccgcaggtgttgtgttctgatcactggtctgtgccctcacagcaccgcacatcgacacactgtacttatttgtccctctctaacattttaactaaaagttgattcaacaacacacagttggataaacatatcacttcatgttgctcatgtctgttttgctttgtttttaagacactgaaaagaaaagctagaatttatttattcagactttaaagaacaatttctcattgatgttgtgaaaatcgtcatgtatttagacttggtgtagtagccagaattcgtaaagctgttgcctgggagcttggtactttccctccaggcagaggctctagctcagcacggcctgtagcgcacagtcagtcttgcatttcagtgtgttcaccccgctgctcctgccccttggagcccagtgacagaaagaacagcctctgtcaccccgccgccactgccttggttactcagagcactgtggggtgtcacagctgcagcatttggagtctctctcttgctgaggactcaagcccacctgagtccactcccctcttgatgcctagagagctggcccagccaacacagctcttagctgggagctccttctgccattccaactagtttcttcctggggccagttttgggtttaggttgtaattccttatatttctttcttccacagtgtatcggatctgtcgttctggaaagaagacccttctatttagagtagaaacaaacgaaacttctaaggtatcatctgtgttaagtgatgagaccatatttctttgatgtttctgaacatcaaagctgattcagtactggtagatgtgctcattctccctgaaacatacccatcatatttcctattataattacatctcattgtcctgtggaggtggacatgataaacattatcttttgttttcttgttttgttttgtttgagacggtctcattctgtcacccagactggagtgcagtgccacaatcatggctcaccgcattgacctccttggctcaaggcatcctcccacctcagcttcctgactagctgggactactggtgtgcaccaccacacccagctaattttcaatttttcatagagacagggtctcactgtgttgtccaggctggtcttgaactcctgggctcaagccacccgcccacctgggcctcccaaagtgctgggattacaggcatcagccatcacacccatccataaacattatattaatgtcacattacaaaactgagacctaagttgcttaggataaaatgaaattggaagactagctaacatgaaaatttatattttggctttttcatgttttttgataaaaccagtgtatttgaatgattcttttgatgtttagtaatggttttttgtttgttttttggtttttttttttgagacggagtctcactctgtcgccagtctggagtgctagtggcgcgatcttggcttactgcagcctccacttcccaagttcaagcgattctcctgcctcagcctcccgagtagctgggactacaggcgcatgccaccacgcccggctaatttttgtatttttagtagagacggagtttcactgtgttggccaggatggtctcgatctcgacctcgtgatcacccaccttggcctctcaaagtgctgggattacaggcgtgagccaccacgcctggcctatgtttaataatgttgaaataggatggaatattttgttaaattaacattttaaaattagaagacaccgttttaatttttaaacccttcctcctctcattgtaacgaaattaattccagctgcagtgagaaaacttaaaaatcatgatacaaaatgaaacaatatctgaaagtagttttataaaactgaaattgctgttaaagagaatgtgttagtgacttaaccatttgctctatgtgatgtttattatcaaatacatataattttgaagattttaatgaatggcttaagattttatctttgtgtagaatgtggctaaagaaaccttagttgagattcaa

SEQ ID NO: 1973 - DNA, 1125 bp, Homo sapiens
  source 1..1125: mol_type = genomic DNA
acagaggcccgccgcggctgcgccatccgcggccatgaagtttcgggccaagatcgtggacggggcctgtctgaaccacttcacacgtgagcagggaggccggagaggagcgagggaggaacggaaggaagcagtgagcgcgcggaatcagtaacatgatagccaagcttgccaaaacctgcaccctccgcatcagccctgataagcttaacttcatcctttgtgacaagctggctaatggaggagtgagcatgtggtgtgagctggaacaggagaacttcttcaacgaatttcaaatggagggtgtctctgcagaaaacaatgagatttatttagagctaacatcggaaaacttatctcgagccttgaagactgcccagaatgccagggctttgaaaatcaaactgactaataaacactttccctgcctcacggtctccgtggagctgttatctatgtcaagcagtagccgcattgtgacccatgacatccccataaaggtgattcctaggaaattgtggaaggacttacaagaaccggtggtcccagatcctgatgttagtatttatttaccagtcttgaagactatgaagagtgttgtggaaaaaatgaaaaacatcagcaatcaccttgttattgaagcaaacctagatggagaattgaatttgaaaatagaaactgaattagtatgtgttacaactcattttaaagatcttggaaatcctccattagcctctgaaagcacccatgaggacagaaacgtggaacacatggctgaagtgcacatagatattaggaagctcctacagtttcttgctggacaacaagtaaatcccacaaaggccttatgcaatattgtgaataacaagatggtgcattttgatctgcttcatgaagacgtgtcccttcagtatttcatccctgcgctgtcctagcaccctgtcgctggagttggcatgcagagactttgtcaggatgggagaggccgcaggtgttgtgttctgatcactggtctgtgccctcacagcaccgcacatcgacacactgtacttatttgtccctctctaacattttaactaaaagttgattcaacaacacacagttggataaacatatcacttcatg

SEQ ID NO: 1974 - DNA, 2121 bp, Homo sapiens
  source 1..2121: mol_type = genomic DNA
ctcagggcgcgacgcttttctgttacccacagaggcccgccgcggctgcgccatccgcggccatgaagtttcgggccaagatcgtggacggggcctgtctgaaccacttcacacgaatcagtaacatgatagccaagcttgccaaaacctgcaccctccgcatcagccctgataagcttaacttcatcctttgtgacaagctggctaatggaggagtgagcatgtggtgtgagctggaacaggagaacttcttcaacgaatttcaaatggagggtgtctctgcagaaaacaatgagatttatttagagctaacatcggaaaacttatctcgagccttgaagactgcccagaatgccagggctttgaaaatcaaactgactaataaacactttccctgcctcacggtctccgtggagctgttatctatgtcaagcagtagccgcattgtgacccatgacatccccataaaggtgattcctaggaaattgtggaaggacttacaagaaccggtggtcccagatcctgatgttagtatttatttaccagtcttgaagactatgaagagtgttgtggaaaaaatgaaaaacatcagcaatcaccttgttattgaagcaaacctagatggagaattgaatttgaaaatagaaactgaattagtatgtgttacaactcattttaaagatcttggaaatcctccattagcctctgaaagcacccatgaggacagaaacgtggaacacatggctgaagtgcacatagatattaggaagctcctacagtttcttgctggacaacaagtaaatcccacaaaggccttatgcaatattgtgaataacaagatggtgcattttgatctgcttcatgaagacgtgtcccttcagtatttcatccctgcgctgtcctagcaccctgtcgctggagttggcatgcagagactttgtcaggatgggagaggccgcaggtgttgtgttctgatcactggtctgtgccctcacagcaccgcacatcgacacactgtacttatttgtccctctctaacattttaactaaaagttgattcaacaacacacagttggataaacatatcacttcatgttgctcatgtctgttttgctttgtttttaagacactgaaaagaaaagctagaatttatttattcagactttaaagaacaatttctcattgatgttgtgaaaatcgtcatgtatttagacttggtgtagtagccagaattcgtaaagctgttgcctgggagcttggtactttccctccaggcagaggctctagctcagcacggcctgtagcgcacagtcagtcttgcatttcagtgtgttcaccccgctgctcctgccccttggagcccagtgacagaaagaacagcctctgtcaccccgccgccactgccttggttactcagagcactgtggggtgtcacagctgcagcatttggagtctctctcttgctgaggactcaagcccacctgagtccactcccctcttgatgcctagagagctggcccagccaacacagctcttagctgggagctccttctgccattccaactagtttcttcctggggccagttttgggtttaggttgtaattccttatatttctttcttccacagtgtatcggatctgtcgttctggaaagaagacccttctatttagagtagaaacaaacgaaacttctaaggtatcatctgtgttaagtgatgagaccatatttctttgatgtttctgaacatcaaagctgattcagtactggtagatgtgctcattctccctgaaacatacccatcatatttcctattataattacatctcattgtcctgtggaggtggacatgataaacattatcttttgttttcttgttttgttttgtttgagacggtctcattctgtcacccagactggagtgcagtgccacaatcatggctcaccgcattgacctccttggctcaaggcatcctcccacctcagcttcctgactagctgggactactggtgtgcaccaccacacccagctaattttcaatttttcatagagacagggtctcactgtgttgtccaggagttggagaccagcctggccaacatggtgaaaccacgtctctact

SEQ ID NO: 1975 - DNA, 1304 bp, Homo sapiens
  source 1..1304: mol_type = genomic DNA
acagaggcccgccgcggctgcgccatccgcggccatgaagtttcgggccaagatcgtggacggggcctgtctgaaccacttcacacgtgagcagggaggccggagaggagcgagggaggaacggaaggaagcagtgagcgcgcggaatcagtaacatgatagccaagcttgccaaaacctgcaccctccgcatcagccctgataagcttaacttcatcctttgtgacaagctggctaatggaggagtgagcatgtggtgtgagctggaacaggagaacttcttcaacgaatttcaaatggagggtgtctctgcagaaaacaatgagatttatttagagctaacatcggaaaacttatctcgagccttgaagactgcccagaatgccagggctttgaaaatcaaactgactaataaacactttccctgcctcacggtctccgtggagctgttatctatgtcaagcagtagccgcattgtgacccatgacatccccataaaggtgattcctaggaaattgtggaaggacttacaagaaccggtggtcccagatcctgatgttagtatttatttaccagtcttgaagactatgaagagtgttgtggaaaaaatgaaaaacatcagcaatcaccttgttattgaagcaaacctagatggagaattgaatttgaaaatagaaactgaattagtatgtgttacaactcattttaaagatcttggaaatcctccattagcctctgaaagcacccatgaggacagaaacgtggaacacatggctgaagtgcacatagatattaggaagctcctacagtttcttgctggacaacaagtaaatcccacaaaggccttatgcaatattgtgaataacaagatggtgcattttgatctgcttcatgaagacgtgtcccttcagtatttcatccctgcgctgtcctagcaccctgtcgctggagttggcatgcagagactttgtcaggatgggagaggccgcagtgtatcggatctgtcgttctggaaagaagacccttctatttagagtagaaacaaacgaaacttctaaggtatcatctgtgttaagtgatgagaccatatttctttgatgtttctgaacatcaaagctgattcagtactggtagatgtgctcattctccctgaaacatacccatcatatttcctattataattacatctcattgtcctgtggaggtggacatgataaacattatcttttgttttcttgttttgttttgtttgagacggtctcattctgtcacccagactggagtgcagtgccacaatcatggct

SEQ ID NO: 1976 - DNA, 2872 bp, Homo sapiens
  source 1..2872: mol_type = genomic DNA
gggaagtgcgcttgcgcaaatgctaggttacacttgagtaactccgggaatgactgggtgggtggggcggggaacagtaacggtctcctattggatggcagcctaaactcgcaggccagctaattggacgcaatcagaacccagcattctttcttcgtgttcctgtgcgggattggtgtgcccaggggtttggctttccaattggctaacgccggggtgggtggggaatgtggggagatttgaatttgaaaccggtagggagtgataatccgcattcagttgtcgaggagtgccagtcaccttcagtttctggagctggccgtcaacatgtcctttcctaaggcgcccttgaaacgattcaatgacccttctggttgtgcaccatctccaggtgcttatgatgttaaaactttagaagtattgaaaggaccagtatcctttcagaaatcacaaagatttaaacagcaaaaagaatctaaacaaaatcttaatgttgacaaagatactaccttgcctgcttcagctagaaaagttaagtcttcggaatcaaagattcgtgttcttctacaggaacgtggtgcccaggacaggcggatccaggatctggaaactgagttggaaaagatggaagcaaggctaaatgctgcactaagggaaaaaacatctctctctgcaaataatgctacactggaaaaacaacttattgaattgaccaggactaatgaactactaaaatctaagttttctgaaaatggtaaccagaagaatttgagaattctaagcttggagttgatgaaacttagaaacaaaagagaaacaaagatgaggggtatgatggctaagcaagaaggcatggagatgaagctgcaggtcacccaaaggagtctcgaagagtctcaagggaaaatagcccaactggagggaaaacttgtttcaatagagaaagaaaagattgatgaaaaatctgaaacagaaaaactcttggaatacatcgaagaaattagttgtgcttcagatcaagtggaaaaatacaagctagatattgcccagttagaagaaaatttgaaagagaagaatgatgaaattttaagccttaagcagtctcttgaggagaatattgttatattatctaaacaagtagaagatctaaatgtgaaatgtcagctgcttgaaaaagaaaaagaagaccatgtcaacaggaatagagaacacaacgaaaatctaaatgcagagatgcaaaacttaaaacagaagtttattcttgaacaacaggaacgtgaaaagcttcaacaaaaagaattacaaattgattcacttctgcaacaagagaaagaattatcttcgagtcttcatcagaagctctgttcttttcaagaggaaatggttaaagagaagaatctgtttgaggaagaattaaagcaaacactggatgagcttgataaattacagcaaaaggaggaacaagctgaaaggctggtcaagcaattggaagaggaagcaaaatctagagctgaagaattaaaactcctagaagaaaagctgaaagggaaggaggctgaactggagaaaagtagtgctgctcatacccaggccaccctgcttttgcaggaaaagtatgacagtatggtgcaaagccttgaagatgttactgctcaatttgaaagctataaagcgttaacagccagtgagatagaagatcttaagctggagaactcatcattacaggaaaaagcggccaaggctgggaaaaatgcagaggatgttcagcatcagattttggcaactgagagctcaaatcaagaatatgtaaggatgcttctagatctgcagaccaagtcagcactaaaggaaacagaaattaaagaaatcacagtttcttttcttcaaaaaataactgatttgcagaaccaactcaagcaacaggaggaagactttagaaaacagctggaagatgaagaaggaagaaaagctgaaaaagaaaatacaacagcagaattaactgaagaaattaacaagtggcgtctcctctatgaagaactatataataaaacaaaaccttttcagctacaactagatgcttttgaagtagaaaaacaggcattgttgaatgaacatggtgcagctcaggaacagctaaataaaataagagattcatatgctaaattattgggtcatcagaatttgaaacaaaaaatcaagcatgttgtgaagttgaaagatgaaaatagccaactcaaatcggaagtatcaaaactccgctgtcagcttgctaaaaaaaaacaaagtgagacaaaacttcaagaggaattgaataaagttctaggtatcaaacactttgatccttcaaaggcttttcatcatgaaagtaaagaaaattttgccctgaagaccccattaaaagaaggcaatacaaactgttaccgagctcctatggagtgtcaagaatcatggaagtaaacatctgagaaacctgttgaagattatttcattcgtcttgttgttattgatgttgctgttattatatttgacatgggtattttataatgttgtatttaattttaactgccaatccttaaatatgtgaaaggaacattttttaccaaagtgtcttttgacattttattttttcttgcaaatacctcctccctaatgctcacctttatcacctcattctgaaccctttcgctggctttccagcttagaatgcatctcatcaacttaaaagtcagtatcatattattatcctcctgttctgaaaccttagtttcaagagtctaaaccccagattcttcagcttgatcctggaggtcttttctagtctgagcttctttagctaggctaaaacaccttggcttgttattgcctctacttt

SEQ ID NO: 1977 - DNA, 2988 bp, Homo sapiens
  source 1..2988: mol_type = genomic DNA
gccagtcaccttcagtttctggagctggccgtcaacatgtcctttcctaaggcgcccttgaaacgattcaatgacccttctggttgtgcaccatctccaggtgcttatgatgttaaaactttagaagtattgaaaggaccagtatcctttcagaaatcacaaagatttaaacagcaaaaagaatctaaacaaaatcttaatgttgacaaagatactaccttgcctgcttcagctagaaaagttaagtcttcggaatcaaaggaatctcaaaagaatgataaagatttgaagatattagagaaagagattcgtgttcttctacaggaacgtggtgcccaggacaggcggatccaggatctggaaactgagttggaaaagatggaagcaaggctaaatgctgcactaagggaaaaaacatctctctctgcaaataatgctacactggaaaaacaacttattgaattgaccaggactaatgaactactaaaatctaagttttctgaaaatggtaaccagaagaatttgagaattctaagcttggagttgatgaaacttagaaacaaaagagaaacaaagatgaggggtatgatggctaagcaagaaggcatggagatgaagctgcaggtcacccaaaggagtctcgaagagtctcaagggaaaatagcccaactggagggaaaacttgtttcaatagagaaagaaaagattgatgaaaaatctgaaacagaaaaactcttggaatacatcgaagaaattagttgtgcttcagatcaagtggaaaaatacaagctagatattgcccagttagaagaaaatttgaaagagaagaatgatgaaattttaagccttaagcagtctcttgaggagaatattgttatattatctaaacaagtagaagatctaaatgtgaaatgtcagctgcttgaaaaagaaaaagaagaccatgtcaacaggaatagagaacacaacgaaaatctaaatgcagagatgcaaaacttaaaacagaagtttattcttgaacaacaggaacgtgaaaagcttcaacaaaaagaattacaaattgattcacttctgcaacaagagaaagaattatcttcgagtcttcatcagaagctctgttcttttcaagaggaaatggttaaagagaagaatctgtttgaggaagaattaaagcaaacactggatgagcttgataaattacagcaaaaggaggaacaagctgaaaggctggtcaagcaattggaagaggaagcaaaatctagagctgaagaattaaaactcctagaagaaaagctgaaagggaaggaggctgaactggagaaaagtagtgctgctcatacccaggccaccctgcttttgcaggaaaagtatgacagtatggtgcaaagccttgaagatgttactgctcaatttgaaagctataaagcgttaacagccagtgagatagaagatcttaagctggagaactcatcattacaggaaaaagcggccaaggctgggaaaaatgcagaggatgttcagcatcagattttggcaactgagagctcaaatcaagaatatgtaaggatgcttctagatctgcagaccaagtcagcactaaaggaaacagaaattaaagaaatcacagtttcttttcttcaaaaaataactgatttgcagaaccaactcaagcaacaggaggaagactttagaaaacagctggaagatgaagaaggaagaaaagctgaaaaagaaaatacaacagcagaattaactgaagaaattaacaagtggcgtctcctctatgaagaactatataataaaacaaaaccttttcagctacaactagatgcttttgaagtagaaaaacaggcattgttgaatgaacatggtgcagctcaggaacagctaaataaaataagagattcatatgctaaattattgggtcatcagaatttgaaacaaaaaatcaagcatgttgtgaagttgaaagatgaaaatagccaactcaaatcggaagtatcaaaactccgctgtcagcttgctaaaaaaaaacaaagtgagacaaaacttcaagaggaattgaataaagttctaggtatcaaacactttgatccttcaaaggcttttcatcatgaaagtaaagaaaattttgccctgaagaccccattaaaagaaggcaatacaaactgttaccgagctcctatggagtgtcaagaatcatggaagtaaacatctgagaaacctgttgaagattatttcattcgtcttgttgttattgatgttgctgttattatatttgacatgggtattttataatgttgtatttaattttaactgccaatccttaaatatgtgaaaggaacattttttaccaaagtgtcttttgacattttattttttcttgcaaatacctcctccctaatgctcacctttatcacctcattctgaaccctttcgctggctttccagcttagaatgcatctcatcaacttaaaagtcagtatcatattattatcctcctgttctgaaaccttagtttcaagagtctaaaccccagattcttcagcttgatcctggaggtcttttctagtctgagcttctttagctaggctaaaacaccttggcttgttattgcctctactttgattctgataatgctcacttggtcctacctattatccttctacttgtccagttcaaataagaaataaggacaagcctaacttcatagaaacctctctatttttaatcagttgtttaataatttacaggttcttaggctccatcctgtttgtatgaaattataatctgtggattggcctttaagcctgcattcttaacaaactcttcagttaattcttagatacactaaaaatctgagaaactctacatgtaactatttcttcagagtttgtcatatactgcttgtcatctgcatgtctactcagcatttgattaacatttgtgtaatatgaaataaaattacacagtaagtcatttaaccaa

SEQ ID NO: 1978 - DNA, 3098 bp, Homo sapiens
  source 1..3098: mol_type = genomic DNA
ggggtttggctttccaattggctaacgccggggtgggtggggaatgtggggagatttgaatttgaaaccggtagggagtgataatccgcattcagttgtcgaggagtgccagtcaccttcagtttctggagctggccgtcaacatgtcctttcctaaggcgcccttgaaacgattcaatgacccttctggttgtgcaccatctccaggtgcttatgatgttaaaactttagaagtattgaaaggaccagtatcctttcagaaatcacaaagatttaaacagcaaaaagaatctaaacaaaatcttaatgttgacaaagatactaccttgcctgcttcagctagaaaagttaagtcttcggaatcaaagaaggaatctcaaaagaatgataaagatttgaagatattagagaaagagattcgtgttcttctacaggaacgtggtgcccaggacaggcggatccaggatctggaaactgagttggaaaagatggaagcaaggctaaatgctgcactaagggaaaaaacatctctctctgcaaataatgctacactggaaaaacaacttattgaattgaccaggactaatgaactactaaaatctaagttttctgaaaatggtaaccagaagaatttgagaattctaagcttggagttgatgaaacttagaaacaaaagagaaacaaagatgaggggtatgatggctaagcaagaaggcatggagatgaagctgcaggtcacccaaaggagtctcgaagagtctcaagggaaaatagcccaactggagggaaaacttgtttcaatagagaaagaaaagattgatgaaaaatctgaaacagaaaaactcttggaatacatcgaagaaattagttgtgcttcagatcaagtggaaaaatacaagctagatattgcccagttagaagaaaatttgaaagagaagaatgatgaaattttaagccttaagcagtctcttgaggagaatattgttatattatctaaacaagtagaagatctaaatgtgaaatgtcagctgcttgaaaaagaaaaagaagaccatgtcaacaggaatagagaacacaacgaaaatctaaatgcagagatgcaaaacttaaaacagaagtttattcttgaacaacaggaacgtgaaaagcttcaacaaaaagaattacaaattgattcacttctgcaacaagagaaagaattatcttcgagtcttcatcagaagctctgttcttttcaagaggaaatggttaaagagaagaatctgtttgaggaagaattaaagcaaacactggatgagcttgataaattacagcaaaaggaggaacaagctgaaaggctggtcaagcaattggaagaggaagcaaaatctagagctgaagaattaaaactcctagaagaaaagctgaaagggaaggaggctgaactggagaaaagtagtgctgctcatacccaggccaccctgcttttgcaggaaaagtatgacagtatggtgcaaagccttgaagatgttactgctcaatttgaaagctataaagcgttaacagccagtgagatagaagatcttaagctggagaactcatcattacaggaaaaagcggccaaggctgggaaaaatgcagaggatgttcagcatcagattttggcaactgagagctcaaatcaagaatatgtaaggatgcttctagatctgcagaccaagtcagcactaaaggaaacagaaattaaagaaatcacagtttcttttcttcaaaaaataactgatttgcagaaccaactcaagcaacaggaggaagactttagaaaacagctggaagatgaagaaggaagaaaagctgaaaaagaaaatacaacagcagaattaactgaagaaattaacaagtggcgtctcctctatgaagaactatataataaaacaaaaccttttcagctacaactagatgcttttgaagtagaaaaacaggcattgttgaatgaacatggtgcagctcaggaacagctaaataaaataagagattcatatgctaaattattgggtcatcagaatttgaaacaaaaaatcaagcatgttgtgaagttgaaagatgaaaatagccaactcaaatcggaagtatcaaaactccgctgtcagcttgctaaaaaaaaacaaagtgagacaaaacttcaagaggaattgaataaagttctaggtatcaaacactttgatccttcaaaggcttttcatcatgaaagtaaagaaaattttgccctgaagaccccattaaaagaaggcaatacaaactgttaccgagctcctatggagtgtcaagaatcatggaagtaaacatctgagaaacctgttgaagattatttcattcgtcttgttgttattgatgttgctgttattatatttgacatgggtattttataatgttgtatttaattttaactgccaatccttaaatatgtgaaaggaacattttttaccaaagtgtcttttgacattttattttttcttgcaaatacctcctccctaatgctcacctttatcacctcattctgaaccctttcgctggctttccagcttagaatgcatctcatcaacttaaaagtcagtatcatattattatcctcctgttctgaaaccttagtttcaagagtctaaaccccagattcttcagcttgatcctggaggtcttttctagtctgagcttctttagctaggctaaaacaccttggcttgttattgcctctactttgattctgataatgctcacttggtcctacctattatccttctacttgtccagttcaaataagaaataaggacaagcctaacttcatagaaacctctctatttttaatcagttgtttaataatttacaggttcttaggctccatcctgtttgtatgaaattataatctgtggattggcctttaagcctgcattcttaacaaactcttcagttaattcttagatacactaaaaatctgagaaactctacatgtaactatttcttcagagtttgtcatatactgcttgtcatctgcatgtctactcagcatttgattaacatttgtgtaatatgaaataaaattacacagtaagtcatttaaccaa

SEQ ID NO: 1979 - DNA, 2468 bp, Homo sapiens
  source 1..2468: mol_type = genomic DNA
aatccgcattcagttgtcgaggagtgccagtcaccttcagtttctggagctggccgtcaacatgtcctttcctaaggcgcccttgaaacgattcaatgacccttctggttgtgcaccatctccaggtgcttatgatgttaaaactttagaagtattgaaaggaccagtatcctttcagaaatcacaaagatttaaacagcaaaaagaatctaaacaaaatcttaatgttgacaaagatactaccttgcctgcttcagctagaaaagttaagtcttcggaatcaaagaaggaatctcaaaagaatgataaagatttgaagatattagagaaagagattcgtgttcttctacaggaacgtggtgcccaggacaggcggatccaggatctggaaactgagttggaaaaacaacttattgaattgaccaggactaatgaactactaaaatctaagttttctgaaaatggtaaccagaagaatttgagaattctaagcttggagttgatgaaacttagaaacaaaagagaaacaaagatgaggggtatgatggctaagcaagaaggcatggagatgaagctgcaggtcacccaaaggagtctcgaagagtctcaagggaaaatagcccaactggagggaaaacttgtttcaatagagaaagaaaagattgatgaaaaatctgaaacagaaaaactcttggaatacatcgaagaaattagttgtgcttcagatcaagtggaaaaatacaagctagatattgcccagttagaagaaaatttgaaagagaagaatgatgaaattttaagccttaagcagtctcttgaggagaatattgttatattatctaaacaagtagaagatctaaatgtgaaatgtcagctgcttgaaaaagaaaaagaagaccatgtcaacaggaatagagaacacaacgaaaatctaaatgcagagatgcaaaacttaaaacagaagtttattcttgaacaacaggaacgtgaaaagcttcaacaaaaagaattacaaattgattcacttctgcaacaagagaaagaattatcttcgagtcttcatcagaagctctgttcttttcaagaggaaatggttaaagagaagaatctgtttgaggaagaattaaagcaaacactggatgagcttgataaattacagcaaaaggaggaacaagctgaaaggctggtcaagcaattggaagaggaagcaaaatctagagctgaagaattaaaactcctagaagaaaagctgaaagggaaggaggctgaactggagaaaagtagtgctgctcatacccaggccaccctgcttttgcaggaaaagtatgacagtatggtgcaaagccttgaagatgttactgctcaatttgaaagctataaagcgttaacagccagtgagatagaagatcttaagctggagaactcatcattacaggaaaaagcggccaaggctgggaaaaatgcagaggatgttcagcatcagattttggcaactgagagctcaaatcaagaatatgtaaggatgcttctagatctgcagaccaagtcagcactaaaggaaacagaaattaaagaaatcacagtttcttttcttcaaaaaataactgatttgcagaaccaactcaagcaacaggaggaagactttagaaaacagctggaagatgaagaaggaagaaaagctgaaaaagaaaatacaacagcagaattaactgaagaaattaacaagtggcgtctcctctatgaagaactatataataaaacaaaaccttttcagctacaactagatgcttttgaagtagaaaaacaggcattgttgaatgaacatggtgcagctcaggaacagctaaataaaataagagattcatatgctaaattattgggtcatcagaatttgaaacaaaaaatcaagcatgttgtgaagttgaaagatgaaaatagccaactcaaatcggaagtatcaaaactccgctgtcagcttgctaaaaaaaaacaaagtgagacaaaacttcaagaggaattgaataaagttctaggtatcaaacactttgatccttcaaaggcttttcatcatgaaagtaaagaaaattttgccctgaagaccccattaaaagaaggcaatacaaactgttaccgagctcctatggagtgtcaagaatcatggaagtaaacatctgagaaacctgttgaagattatttcattcgtcttgttgttattgatgttgctgttattatatttgacatgggtattttataatgttgtatttaattttaactgccaatccttaaatatgtgaaaggaacattttttaccaaagtgtcttttgacattttattttttcttgcaaatacctcctccctaatgctcacctttatcacctcattctgaaccctttcgctggctttccagcttagaatgcatctcatcaacttaaaagtcagtatcatattattatcctcctgttctgaaa

SEQ ID NO: 1980 - DNA, 2084 bp, Homo sapiens
  source 1..2084: mol_type = genomic DNA
tccgcattcagttgtcgaggagtgccagtcaccttcagtttctggagctggccgtcaacatgtcctttcctaaggcgcccttgaaacgattcaatgacccttctgattcgtgttcttctacaggaacgtggtgcccaggacaggcggatccaggatctggaaactgagttggaaaagatggaagcaaggctaaatgctgcactaagggaaaaaacatctctctctgcaaataatgctacactggaaaaacaacttattgaattgaccaggactaatgaactactaaaatctaagttttctgaaaatggtaaccagaagaatttgagaattctaagcttggagttgatgaaacttagaaacaaaagagaaacaaagatgaggggtatgatggctaagcaagaaggcatggagatgaagctgcaggtcacccaaaggagtctcgaagagtctcaagggaaaatagcccaactggagggaaaacttgtttcaatagagaaagaaaagattgatgaaaaatctgaaacagaaaaactcttggaatacatcgaagaaattagttgtgcttcagatcaagtggaaaaatacaagctagatattgcccagttagaagaaaatttgaaagagaagaatgatgaaattttaagccttaagcagtctcttgaggagaatattgttatattatctaaacaagtagaagatctaaatgtgaaatgtcagctgcttgaaaaagaaaaagaagaccatgtcaacaggaatagagaacacaacgaaaatctaaatgcagagatgcaaaacttaaaacagaagtttattcttgaacaacaggaacgtgaaaagcttcaacaaaaagaattacaaattgattcacttctgcaacaagagaaagaattatcttcgagtcttcatcagaagctctgttcttttcaagaggaaatggttaaagagaagaatctgtttgaggaagaattaaagcaaacactggatgagcttgataaattacagcaaaaggaggaacaagctgaaaggctggtcaagcaattggaagaggaagcaaaatctagagctgaagaattaaaactcctagaagaaaagctgaaagggaaggaggctgaactggagaaaagtagtgctgctcatacccaggccaccctgcttttgcaggaaaagtatgacagtatggtgcaaagccttgaagatgttactgctcaatttgaaagctataaagcgttaacagccagtgagatagaagatcttaagctggagaactcatcattacaggaaaaagcggccaaggctgggaaaaatgcagaggatgttcagcatcagattttggcaactgagagctcaaatcaagaatatgtaaggatgcttctagatctgcagaccaagtcagcactaaaggaaacagaaattaaagaaatcacagtttcttttcttcaaaaaataactgatttgcagaaccaactcaagcaacaggaggaagactttagaaaacagctggaagatgaagaaggaagaaaagctgaaaaagaaaatacaacagcagaattaactgaagaaattaacaagtggcgtctcctctatgaagaactatataataaaacaaaaccttttcagctacaactagatgcttttgaagtagaaaaacaggcattgttgaatgaacatggtgcagctcaggaacagctaaataaaataagagattcatatgctaaattattgggtcatcagaatttgaaacaaaaaatcaagcatgttgtgaagttgaaagatgaaaatagccaactcaaatcggaagtatcaaaactccgctgtcagcttgctaaaaaaaaacaaagtgagacaaaacttcaagaggaattgaataaagttctaggtatcaaacactttgatccttcaaaggcttttcatcatgaaagtaaagaaaattttgccctgaagaccccattaaaagaaggcaatacaaactgttaccgagctcctatggagtgtcaagaatcatggaagtaaacatctgagaaacctgttgaagattatttcattcgtcttgttgttattgatgttgctgttattatatttgacat

SEQ ID NO: 1981 - DNA, 1175 bp, Homo sapiens
  source 1..1175: mol_type = genomic DNA
attctttcttcgtgttcctgtgcgggattggtgtgcccaggggtttggctttccaattggctaacgccggggtgggtggggaatgtggggagatttgaatttgaaaccggtagggagtgataatccgcattcagttgtcgaggagtgccagtcaccttcagtttctggagctggccgtcaacatgtcctttcctaaggcgcccttgaaacgattcaatgacccttctggttgtgcaccatctccaggtgcttatgatgttaaaactttagaagtattgaaaggaccagtatcctttcagaaatcacaaagatttaaacagcaaaaagaatctaaacaaaatcttaatgttgacaaagatactaccttgcctgcttcagctagaaaagttaagtcttcggaatcaaagattcgtgttcttctacaggaacgtggtgcccaggacaggcggatccaggatctggaaactgagttggaaaagatggaagcaaggctaaatgctgcactaagggaaaaaacatctctctctgcaaataatgctacactggaaaaacaacttattgaattgaccaggactaatgaactactaaaatctaagttttctgaaaatggtaaccagaagaatttgagaattctaagcttggagttgatgaaacttagaaacaaaagagaaacaaagatgaggggtatgatggctaagcaagaaggcatggagatgaagctgcaggtcacccaaaggagtctcgaagagtctcaagggaaaatagcccaactggagggaaaacttgtttcaatagagaaagaaaagattgatgaaaaatctgaaacagaaaaactcttggaatacatcgaagaaattagttgtgcttcagatcaagtggaaaaatacaagctagatattgcccagttagaagaaaatttgaaagagaagaatgatgaaattttaagccttaagcagtctcttgaggagaatattgttatattatctaaacaagtagaagatctaaatgtgaaatgtcagctgcttgaaaaagaaaaagaagaccatgtcaacaggaatagagaacacaacgaaaatctaaatgcagagatgcaaaacttaaaacagaagtttattcttgaacaacaggaacgtgaaaagcttcaacaaaaaaagaaacaaatgagaagaaagaaa

SEQ ID NO: 1982 - DNA, 1171 bp, Homo sapiens
  source 1..1171: mol_type = genomic DNA
agctcgcccaccgcccgccccagcagtggctgcaccatgcacgtgaacggcaaagtggcgctggtgaccggcgcggctcagggcataggcagagcctttgcagaggcgctgctgcttaagggcgccaaggtagcgctggtggattggaatcttgaagcaggtgtacagtgtaaagctgccctggatgagcagtttgaacctcagaagactctgttcatccagtgcgatgtggctgaccagcaacaactgagagacacttttagaaaagttgtagaccactttggaagactggacattttggtcaataatgctggagtgaataatgagaaaaactgggaaaaaactctgcaaattaatttggtttctgttatcagtggaacctatcttggtttggattacatgagtaagcaaaatggaggtgaaggcggcatcattatcaatatgtcatctttagcaggactcatgcccgttgcacagcagccggtttattgtgcttcaaagcatggcatagttggattcacacgctcagcagcgcccaccattgattgccaatggattgataacactcattgaagatgatgctttaaatggtgctattatgaagatcacaacttctaagggaattcattttcaagactatgatacaactccatttcaagcaaaaacccaatgaacagcttatgtgttagccatagctgaaaataagcacaaatagcttatattcagatcctatcttcatttgaatatagcttttaaatgaaatgttacagtttgaagttttccttcatgcacttggtgataaacgttttctaaatttttagttaagtatatggataaaaagttatgaactattaaaaatgtgatgtggaccaaaggctaggttgtaatcttgatagtctaaaaaatgatcaaaacaaatgattttcaaggaatattcaatattctgcctttcagaaagtgtatttatatctgtgcttcataaatattaatgttcttcagaacatcattttaaaggagatacttgaattgttatttaaatcaaaccagatgtaaaacactcacatacaagttcatactttaaaagaggaaagctacttaacaatgacaaatatttcacaataataatttttacttatataccatctttcaactgaacatttcagttcttcca

SEQ ID NO: 1983 - DNA, 3027 bp, Homo sapiens
  source 1..3027: mol_type = genomic DNA
gctttattgtttgcttgttttgttccggagtcggggccgggagggagtgcaggaggagggatccaagcttccaagcctctgctccgctctccttctatccagttggtctttagggcactgaaggaaactcttcttcagaaataaccttttaacttttcttctgtcagctgcctgccaatcacggagccagaggctgaggggaggctttgagccggtctgcgagtccggaaggcaaagatcgcgaagcttggcgctccagaacgctcagggggcaggtgacacagtcgtgggttccccggcgggcgctggcttgacagtttcctccccgcccactggcaggggagcgccccgccgggctgcacgcgcgcgcgcgcaggggggcataaaagccgcggccgcgcggagacgcggagctcgcccaccgcccgccccagcagtggctgcaccatgcacgtgaacggcaaagtggcgctggtgaccggcgcggctcagggcataggcagagcctttgcagaggcgctgctgcttaagggcgccaaggtagcgctggtggattggaatcttgaagcaggtgtacagtgtaaagctgccctggatgagcagtttgaacctcagaagactctgttcatccagtgcgatgtggctgaccagcaacaactgagagacacttttagaaaagttgtagaccactttggaagactggacattttggtcaataatgctggagtgaataatgagaaaaactgggaaaaaactctgcaaattaatttggtttctgttatcagtggaacctatcttggtttggattacatgagtaagcaaaatggaggtgaaggcggcatcattatcaatatgtcatctttagcaggactcatgcccgttgcacagcagccggtttattgtgcttcaaagcatggcatagttggattcacacgctcagcagcgttggctgctaatcttatgaacagtggtgtgagactgaatgccatttgtccaggctttgttaacacagccatccttgaatcaattgaaaaagaagaaaacatgggacaatatatagaatataaggatcatatcaaggatatgattaaatactatggaattttggacccaccattgattgccaatggattgataacactcattgaagatgatgctttaaatggtgctattatgaagatcacaacttctaagggaattcattttcaagactatgatacaactccatttcaagcaaaaacccaatgaacagcttatgtgttagccatagctgaaaataagcacaaatagcttatattcagatcctatcttcatttgaatatagcttttaaatgaaatgttacagtttgaagttttccttcatgcacttggtgataaacgttttctaaatttttagttaagtatatggataaaaagttatgaactattaaaaatgtgatgtggaccaaaggctaggttgtaatcttgatagtctaaaaaatgatcaaaacaaatgattttcaaggaatattcaatattctgcctttcagaaagtgtatttatatctgtgcttcataaatattaatgttcttcagaacatcattttaaaggagatacttgaattgttatttaaatcaaaccagatgtaaaacactcacatacaagttcatactttaaaagaggaaagctacttaacaatgacaaatatttcacaataataatttttacttatataccatctttcaactgaacatttcagttcttccaagagcttcttagagtagtatattttgggggcagtcaaggaataaactacagtgtaaacatatcccagatgaaaactgctgtatggaaaaatgacagaaagtaactgattgacactgttgattcacagttcagcctcctatctgggaaagacatttctttcctctgctcactttaagaacttttaccgactccaaaaatctcaggaattaaacttttaacagttacagcaataaagaatagttagtactccaaaaatattatatttaagatgctcaacaagaaaaaaatgcaaatgtaatatttttttcaaattacttctttattgacttgtccaaatttcaaaagtgcctacccttcaataaaacttttttattctgatctccataaattacttagtcttctatgtatagctatcaaggaaataaaaccaattttgccacagccacaactgtaaatgtttttgtacccatgctgaaactcataacaacacagacataaaaatagctgtgaggttttgctttttttgttgtcagctatcttaagaatcattaaatacacctgctttgggtaaaactctttgcaagcagtaattaacactagtaacagtgaaagcacaagatttccaaatcagtcgttttctcaaaaaaatatcgtataagtgactcatcctgtctgctaactccagacctcccagcttgaagccaaatctttccatgtgagattgatatggatttcctagaagtactggaatgttgtcatatcttgccctattttaattctgctatagaaaacaattgccttcacttttaaggagtaatttgaatattaataactctggtctagattttcatataatgtattaaagacaaagtagtgaacatcaatgaacatctgatagagataaactgtaatcaggcataagcttgtttgtatgttctggcagtgactaatcagtaaatgatgtcggtttgcccagtatcacttatcttctgtatttttcctctgtcgtgtaaatagtataaccttttcatttatggacaattttttggactagtagccttcaatatacattctgctttgaattaattttttcaaatcaataaattatgtagacatttaaaatcaaatatcaagtagaattgaaaaatgtgagttacataagttaaaaacttactttaaatcttaccttctataggtagctctaaataaattcatatggttatatggcatctctggtgtatactgattgagaaaataattaaactgaagttaggggagggg

SEQ ID NO: 1984 - DNA, 1535 bp, Homo sapiens
  source 1..1535: mol_type = genomic DNA
gacagagcagagtccacttctcatctccagtatccgtaaaaatttgtccaaaatgtaactaagaaaacacaatgatattagttacttctgctccccgtcaccctcaaccccactgattacgagatgggaactcacacaaaactttgagacaaaagagcaacaagtttgctttattgtttgcttgttttgttccggagtcggggccgggagggagtgcaggaggagggatccaagcttccaagcctctgctccgctctccttctatccagttggtctttagggcactgaaggaaactcttcttcagaaataaccttttaacttttcttctgtcagctgcctgccaatcacggagccagaggctgaggggaggctttgagccggtctgcgagtccggaaggcaaagatcgcgaagcttggcgctccagaacgctcagggggcaggtagcgctggtggattggaatcttgaagcaggtgtacagtgtaaagctgccctggatgagcagtttgaacctcagaagactctgttcatccagtgcgatgtggctgaccagcaacaactgagagacacttttagaaaagttgtagaccactttggaagactggacattttggtcaataatgctggagtgaataatgagaaaaactgggaaaaaactctgcaaattaatttggtttctgttatcagtggaacctatcttggtttggattacatgagtaagcaaaatggaggtgaaggcggcatcattatcaatatgtcatctttagcaggactcatgcccgttgcacagcagccggtttattgtgcttcaaagcatggcatagttggattcacacgctcagcagcgttggctgctaatcttatgaacagtggtgtgagactgaatgccatttgtccaggctttgttaacacagccatccttgaatcaattgaaaaagaagaaaacatgggacaatatatagaatataaggatcatatcaaggatatgattaaatactatggaattttggacccaccattgattgccaatggattgataacactcattgaagatgatgctttaaatggtgctattatgaagatcacaacttctaagggaattcattttcaagactatgatacaactccatttcaagcaaaaacccaatgaacagcttatgtgttagccatagctgaaaataagcacaaatagcttatattcagatcctatcttcatttgaatatagcttttaaatgaaatgttacagtttgaagttttccttcatgcacttggtgataaacgttttctaaatttttagttaagtatatggataaaaagttatgaactattaaaaatgtgatgtggaccaaaggctaggttgtaatcttgatagtctaaaaaatgatcaaaacaaatgattttcaaggaatattcaatattctgcctttcagaaagtgtatttatatctgtgcttcataaatattaatgttcttcagaacatcattttaaaggagatacttgaattgttatttaaatcaaaccagatgtaaaacac

SEQ ID NO: 1985 - DNA, 1046 bp, Homo sapiens
  source 1..1046: mol_type = genomic DNA
agaacgctcagggggcaggtgacacagtcgtgggttccccggcgggcgctggcttgacagtttcctccccgcccactggcaggggagcgccccgccgggctgcacgcgcgcgcgcgcaggggggcataaaagccgcggccgcgcggagacgcggagctcgcccaccgcccgccccagcagtggctgcaccatgcacgtgaacggcaaagtggcgctggtgaccggcgcggctcagggcataggcagagcctttgcagaggcgctgctgcttaagggcgccaaggtagcgctggtggattggaatcttgaagcaggtgtacagtgtaaagctgccctggatgagcagtttgaacctcagaagactctgttcatccagtgcgatgtggctgaccagcaacaactgagaggtttctgttatcagtggaacctatcttggtttggattacatgagtaagcaaaatggaggtgaaggcggcatcattatcaatatgtcatctttagcaggactcatgcccgttgcacagcagccggtttattgtgcttcaaagcatggcatagttggattcacacgctcagcagcgttggctgctaatcttatgaacagtggtgtgagactgaatgccatttgtccaggctttgttaacacagccatccttgaatcaattgaaaaagaagaaaacatgggacaatatatagaatataaggatcatatcaaggatatgattaaatactatggaattttggacccaccattgattgccaatggattgataacactcattgaagatgatgctttaaatggtgctattatgaagatcacaacttctaagggaattcattttcaagactatgatacaactccatttcaagcaaaaacccaatgaacagcttatgtgttagccatagctgaaaataagcacaaatagcttatattcagatcctatcttcatttgaatatagcttttaaatgaaatgttacagtttgaagttttccttcatgcacttggtgataaacgttttctaaatttttagttaagtatatggat

SEQ ID NO: 1986 - DNA, 583 bp, Homo sapiens
  source 1..583: mol_type = genomic DNA
atgcacgtgaacggcaaagtggcgctggtgaccggcgcggctcagggcataggcagagcctttgcagaggcgctgctgcttaagggcgccaaggtagcgctggtggattggaatcttgaagcaggtgtacagtgtaaagctgccctggatgagcagtttgaacctcagaagactctgttcatccagtgcgatgtggctgaccagcaacaactgagagacacttttagaaaagttgtagaccactttggaagactggacattttggtcaataatgctggagtgaataatgagaaaaactgggaaaaaactctgcaaattaatttggtttctgttatcagtggaacctatcttggtttggattacatgagtaagcaaaatggaggtgaaggcggcatcattatcaatatgtcatctttagcagcccaccattgattgccaatggattgataacactcattgaagatgatgctttaaatggtgctattatgaagatcacaacttctaagggaattcattttcaagactatgatacaactccatttcaagcaaaaacccaatgaacagcttatgtgttagccatagc

SEQ ID NO: 1987 - DNA, 3053 bp, Homo sapiens
  source 1..3053: mol_type = genomic DNA
atgacttttcctgaagcggacattttacttaaatcgggagagtgtgctgggcagacgatgctggacacgatggaggcgcccggccactccaggcagctgctgctgcagctcaacaaccagcgcaccaagggcttcttgtgcgacgtgatcatcgtggtgcagaacgccctcttccgcgcgcacaagaacgtgctggcggccagcagcgcctacctcaagtccctggtggtgcatgacaacctgctcaacctggaccatgacatggtgagcccggccgtgttccgcctggtgctggacttcatctacaccggccgcctggctgacggcgcagaggcggctgcggccgcggccgtggccccgggggctgagccgagcctgggcgccgtgctggccgccgccagctacctgcagatccccgacctcgtggcgctgtgcaagaaacgcctcaagcgccacggcaagtactgccacctgcggggcggcggcggcggcggcggcggctacgcgccctatggtcggccgggccggggcctgcgggccgccacgccggtcatccaggcctgctacccgtccccagtcgggcctccgccgccgcctgccgcggagccgccctcgggcccagaggccgcggtcaacacgcactgcgccgagctgtacgcgtcgggacccggcccggccgccgcactctgtgcctcggagcgccgctgctcccctctttgtggcctggacctgtccaagaagagcccgccgggctccgcggcgccagagcggccgctggctgagcgcgagctgcccccgcgcccggacagccctcccagcgccggccccgccgcctacaaggagccgcctctcgccctgccgtcgctgccgccgctgcccttccagaagctggaggaggccgcaccgccttccgacccatttcgcggcggcagcggcagcccgggacccgagccccccggccgccccgacgggcctagtctcctctatcgctggatgaagcacgagccgggcctgggtagctatggcgacgagctgggccgggagcgcggctcccccagcgagcgctgcgaagagcgtggtggggacgcggccgtctcgcccggggggcccccgctcggcctggcgccgccgccgcgctaccctggcagcctggacgggcccggcgcgggcggcgacggcgacgactacaagagcagcagcgaggagaccggtagcagcgaggaccccagcccgcctggcggccacctcgagggctacccatgcccgcacctggcctatggcgagcccgagagcttcggtgacaacctgtacgtgtgcattccgtgcggcaagggcttccccagctctgagcagctgaacgcgcacgtggaggctcacgtggaggaggaggaagcgctgtacggcagggccgaggcggccgaagtggccgctggggccgccggcctagggcccccttttggaggcggcggggacaaggtcgccggggctccgggtggcctgggagagctgctgcggccctaccgctgcgcgtcgtgcgacaagagctacaaggacccggccacgctgcggcagcacgagaagacgcactggctgacccggccctacccatgcaccatctgcgggaagaagttcacgcagcgtgggaccatgacgcgccacatgcgcagccacctgggcctcaagcccttcgcgtgcgacgcgtgcggcatgcggttcacgcgccagtaccgcctcacggagcacatgcgcatccactcgggcgagaagccctacgagtgccaggtgtgcggcggcaagttcgcacagcaacgcaacctcatcagccacatgaagatgcacgccgtggggggcgcggccggcgcggccggggcgctggcgggcttgggggggctccccggcgtccccggccccgacggcaagggcaagctcgacttccccgagggcgtctttgctgtggctcgcctcacggccgagcagctgagcctgaagcagcaggacaaggcggccgcggccgagctgctggcgcagaccacgcacttcctgcacgaccccaaggtggcgctggagagcctctacccgctggccaagttcacggccgagctgggcctcagccccgacaaggcggccgaggtgctgagccagggcgctcacctggcggccgggcccgacggccggaccatcgaccgtttctctcccacctagagcgcccctcgccagcccgctctgtcgctgctgcgcggccctggcccgcaccccagggagcggcgggggcggcgcgcagggcccactgtgcccgggacaaccgcagcgtcgccacagtggcggctccacctctcggcggcctcacctggcctcactgcttcgtgccttagctcgggggtcgggggagaaccccgggacgggggtgggatggggtaagggaaatttatatttttgatatcagctttgaccaaaggagaccccaggcccctcccgcctcttcctgtggttcgtcggccccctcccccggctccgcgctgctcttagagggggaggggtgtcactgtcggggcactcctagccctacctccggcccttgcgaccacacccattctcactgtgaatctccccgctggggtcggagcgtcgggcagagttggggagtggggaggggactgagccggccggagggccccccgcacccccgctcccacccaccccgggactgataatgtgaagttcctcattttgcacaagtggcactagccccagggccaacccttccttcctcagtcaccaagggcggggagttctggagtcggaaggcgaagagcctaccaccaggtctcccactcccgcggtgccctcccttcccttccctgcggccccggaccatatttattgcatgcgccccggcggccccccatcccgagcccaggctgggctgggctggaacgcggtctctttagctccctcctcttcgtttgtatatttcctaccttgtacacaggctcttccagagccgcttccattttctatactcgaaccaaacagcaataaagcagtaaccaagg

SEQ ID NO: 1988 - DNA, 3156 bp, Homo sapiens
  source 1..3156: mol_type = genomic DNA
ggctgagacgcgaccaggacgcggggaggacggaccagcaggacagaccgaccgggggcccggcgggcggagggcagcgcagccacgtcccccctggatccgccgtcagccgggcccggggctttcgacatgccccccaggagagtgtgctgggcagacgatgctggacacgatggaggcgcccggccactccaggcagctgctgctgcagctcaacaaccagcgcaccaagggcttcttgtgcgacgtgatcatcgtggtgcagaacgccctcttccgcgcgcacaagaacgtgctggcggccagcagcgcctacctcaagtccctggtggtgcatgacaacctgctcaacctggaccatgacatggtgagcccggccgtgttccgcctggtgctggacttcatctacaccggccgcctggctgacggcgcagaggcggctgcggccgcggccgtggccccgggggctgagccgagcctgggcgccgtgctggccgccgccagctacctgcagatccccgacctcgtggcgctgtgcaagaaacgcctcaagcgccacggcaagtactgccacctgcggggcggcggcggcggcggcggcggctacgcgccctatggtcggccgggccggggcctgcgggccgccacgccggtcatccaggcctgctacccgtccccagtcgggcctccgccgccgcctgccgcggagccgccctcgggcccagaggccgcggtcaacacgcactgcgccgagctgtacgcgtcgggacccggcccggccgccgcactctgtgcctcggagcgccgctgctcccctctttgtggcctggacctgtccaagaagagcccgccgggctccgcggcgccagagcggccgctggctgagcgcgagctgcccccgcgcccggacagccctcccagcgccggccccgccgcctacaaggagccgcctctcgccctgccgtcgctgccgccgctgcccttccagaagctggaggaggccgcaccgccttccgacccatttcgcggcggcagcggcagcccgggacccgagccccccggccgccccgacgggcctagtctcctctatcgctggatgaagcacgagccgggcctgggtagctatggcgacgagctgggccgggagcgcggctcccccagcgagcgctgcgaagagcgtggtggggacgcggccgtctcgcccggggggcccccgctcggcctggcgccgccgccgcgctaccctggcagcctggacgggcccggcgcgggcggcgacggcgacgactacaagagcagcagcgaggagaccggtagcagcgaggaccccagcccgcctggcggccacctcgagggctacccatgcccgcacctggcctatggcgagcccgagagcttcggtgacaacctgtacgtgtgcattccgtgcggcaagggcttccccagctctgagcagctgaacgcgcacgtggaggctcacgtggaggaggaggaagcgctgtacggcagggccgaggcggccgaagtggccgctggggccgccggcctagggcccccttttggaggcggcggggacaaggtcgccggggctccgggtggcctgggagagctgctgcggccctaccgctgcgcgtcgtgcgacaagagctacaaggacccggccacgctgcggcagcacgagaagacgcactggctgacccggccctacccatgcaccatctgcgggaagaagttcacgcagcgtgggaccatgacgcgccacatgcgcagccacctgggcctcaagcccttcgcgtgcgacgcgtgcggcatgcggttcacgcgccagtaccgcctcacggagcacatgcgcatccactcgggcgagaagccctacgagtgccaggtgtgcggcggcaagttcgcacagcaacgcaacctcatcagccacatgaagatgcacgccgtggggggcgcggccggcgcggccggggcgctggcgggcttgggggggctccccggcgtccccggccccgacggcaagggcaagctcgacttccccgagggcgtctttgctgtggctcgcctcacggccgagcagctgagcctgaagcagcaggacaaggcggccgcggccgagctgctggcgcagaccacgcacttcctgcacgaccccaaggtggcgctggagagcctctacccgctggccaagttcacggccgagctgggcctcagccccgacaaggcggccgaggtgctgagccagggcgctcacctggcggccgggcccgacggccggaccatcgaccgtttctctcccacctagagcgcccctcgccagcccgctctgtcgctgctgcgcggccctggcccgcaccccagggagcggcgggggcggcgcgcagggcccactgtgcccgggacaaccgcagcgtcgccacagtggcggctccacctctcggcggcctcacctggcctcactgcttcgtgccttagctcgggggtcgggggagaaccccgggacgggggtgggatggggtaagggaaatttatatttttgatatcagctttgaccaaaggagaccccaggcccctcccgcctcttcctgtggttcgtcggccccctcccccggctccgcgctgctcttagagggggaggggtgtcactgtcggggcactcctagccctacctccggcccttgcgaccacacccattctcactgtgaatctccccgctggggtcggagcgtcgggcagagttggggagtggggaggggactgagccggccggagggccccccgcacccccgctcccacccaccccgggactgataatgtgaagttcctcattttgcacaagtggcactagccccagggccaacccttccttcctcagtcaccaagggcggggagttctggagtcggaaggcgaagagcctaccaccaggtctcccactcccgcggtgccctcccttcccttccctgcggccccggaccatatttattgcatgcgccccggcggccccccatcccgagcccaggctgggctgggctggaacgcggtctctttagctccctcctcttcgtttgtatatttcctaccttgtacacaggctcttccagagccgcttccattttctatactcgaaccaaacagcaataaagcagtaaccaagg

SEQ ID NO: 1989 - DNA, 3555 bp, Homo sapiens
  source 1..3555: mol_type = genomic DNA
gtgaagacatcgcggggaccgattcaccatggagggcgccggcggcgcgaacgacaagaaaaagataagttctgaacgtcgaaaagaaaagtctcgagatgcagccagatctcggcgaagtaaagaatctgaagttttttatgagcttgctcatcagttgccacttccacataatgtgagttcgcatcttgataaggcctctgtgatgaggcttaccatcagctatttgcgtgtgaggaaacttctggatgctggtgatttggatattgaagatgacatgaaagcacagatgaattgcttttatttgaaagccttggatggttttgttatggttctcacagatgatggtgacatgatttacatttctgataatgtgaacaaatacatgggattaactcagtttgaactaactggacacagtgtgtttgattttactcatccatgtgaccatgaggaaatgagagaaatgcttacacacagaaatggccttgtgaaaaagggtaaagaacaaaacacacagcgaagcttttttctcagaatgaagtgtaccctaactagccgaggaagaactatgaacataaagtctgcaacatggaaggtattgcactgcacaggccacattcacgtatatgataccaacagtaaccaacctcagtgtgggtataagaaaccacctatgacctgcttggtgctgatttgtgaacccattcctcacccatcaaatattgaaattcctttagatagcaagactttcctcagtcgacacagcctggatatgaaattttcttattgtgatgaaagaattaccgaattgatgggatatgagccagaagaacttttaggccgctcaatttatgaatattatcatgctttggactctgatcatctgaccaaaactcatcatgatatgtttactaaaggacaagtcaccacaggacagtacaggatgcttgccaaaagaggtggatatgtctgggttgaaactcaagcaactgtcatatataacaccaagaattctcaaccacagtgcattgtatgtgtgaattacgttgtgagtggtattattcagcacgacttgattttctcccttcaacaaacagaatgtgtccttaaaccggttgaatcttcagatatgaaaatgactcagctattcaccaaagttgaatcagaagatacaagtagcctctttgacaaacttaagaaggaacctgatgctttaactttgctggccccagccgctggagacacaatcatatctttagattttggcagcaacgacacagaaactgatgaccagcaacttgaggaagtaccattatataatgatgtaatgctcccctcacccaacgaaaaattacagaatataaatttggcaatgtctccattacccaccgctgaaacgccaaagccacttcgaagtagtgctgaccctgcactcaatcaagaagttgcattaaaattagaaccaaatccagagtcactggaactttcttttaccatgccccagattcaggatcagacacctagtccttccgatggaagcactagacaaagttcacctgagcctaatagtcccagtgaatattgtttttatgtggatagtgatatggtcaatgaattcaagttggaattggtagaaaaactttttgctgaagacacagaagcaaagaacccattttctactcaggacacagatttagacttggagatgttagctccctatatcccaatggatgatgacttccagttacgttccttcgatcagttgtcaccattagaaagcagttccgcaagccctgaaagcgcaagtcctcaaagcacagttacagtattccagcagactcaaatacaagaacctactgctaatgccaccactaccactgccaccactgatgaattaaaaacagtgacaaaagaccgtatggaagacattaaaatattgattgcatctccatctcctacccacatacataaagaaactactagtgccacatcatcaccatatagagatactcaaagtcggacagcctcaccaaacagagcaggaaaaggagtcatagaacagacagaaaaatctcatccaagaagccctaacgtgttatctgtcgctttgagtcaaagaactacagttcctgaggaagaactaaatccaaagatactagctttgcagaatgctcagagaaagcgaaaaatggaacatgatggttcactttttcaagcagtaggaattatttagcatgtagactgctggggcaatcaatggatgaaagtggattaccacagctgaccagttatgattgtgaagttaatgctcctatacaaggcagcagaaacctactgcagggtgaagaattactcagagctttggatcaagttaactgagctttttcttaatttcattcctttttttggacactggtggctcattacctaaagcagtctatttatattttctacatctaattttagaagcctggctacaatactgcacaaacttggttagttcaattttgatcccctttctacttaatttacattaatgctcttttttagtatgttctttaatgctggatcacagacagctcattttctcagttttttggtatttaaaccattgcattgcagtagcatcattttaaaaaatgcacctttttatttatttatttttggctagggagtttatccctttttcgaattatttttaagaagatgccaatataatttttgtaagaaggcagtaacctttcatcatgatcataggcagttgaaaaatttttacaccttttttttcacattttacataaataataatgctttgccagcagtacgtggtagccacaattgcacaatatattttcttaaaaaataccagcagttactcatggaatatattctgcgtttataaaactagtttttaagaagaaattttttttggcctatgaaattgttaaacctggaacatgacattgttaatcatataataatgattcttaaatgctgtatggtttattatttaaatgggtaaagccatttacataatatagaaagatatgcatatatctagaaggtatgtggcatttatttggataaaattctcaattcagagaaatcatctgatgtttctatagtcactttgccagctcaaaagaaaacaataccctatgtagttgtggaagtttatgctaatattgtgtaactgatattaaacctaaatgttctgcctaccctgttggtataaagatattttgagcagactgtaaacaagaaaaaaaaaatcatgcattcttagcaaaattgcctagtatgttaatttgctcaaaatacaatgtttgattttatgcactttgtcgctattaacatcctttttttcatgtagatttcaataattgagtaattttagaagcattattttaggaatatatagttgtcacagtaaatatcttgttttttctatgtacattgtacaaatttttcattccttttgctctttgtggttggatctaacactaactgtattgttttgttacatcaaataaacatcttctgtggaccagg

SEQ ID NO: 1990 - DNA, 3919 bp, Homo sapiens
  source 1..3919: mol_type = genomic DNA
gacaggaggatcaccctcttcgtcgcttcggccagtgtgtcgggctgggccctgacaagccacctgaggagaggctcggagccgggcccggaccccggcgattgccgcccgcttctctctagtctcacgaggggtttcccgcctcgcacccccacctctggacttgcctttccttctcttctccgcgtgtggagggagccagcgcttaggccggagcgagcctgggggccgcccgccgtgaagacatcgcggggaccgattcaccatggagggcgccggcggcgcgaacgacaagaaaaagataagttctgaacgtcgaaaagaaaagtctcgagatgcagccagatctcggcgaagtaaagaatctgaagttttttatgagcttgctcatcagttgccacttccacataatgtgagttcgcatcttgataaggcctctgtgatgaggcttaccatcagctatttgcgtgtgaggaaacttctggatgctggtgatttggatattgaagatgacatgaaagcacagatgaattgcttttatttgaaagccttggatggttttgttatggttctcacagatgatggtgacatgatttacatttctgataatgtgaacaaatacatgggattaactcagtttgaactaactggacacagtgtgtttgattttactcatccatgtgaccatgaggaaatgagagaaatgcttacacacagaaatggccttgtgaaaaagggtaaagaacaaaacacacagcgaagcttttttctcagaatgaagtgtaccctaactagccgaggaagaactatgaacataaagtctgcaacatggaaggtattgcactgcacaggccacattcacgtatatgataccaacagtaaccaacctcagtgtgggtataagaaaccacctatgacctgcttggtgctgatttgtgaacccattcctcacccatcaaatattgaaattcctttagatagcaagactttcctcagtcgacacagcctggatatgaaattttcttattgtgatgaaagaattaccgaattgatgggatatgagccagaagaacttttaggccgctcaatttatgaatattatcatgctttggactctgatcatctgaccaaaactcatcatgatatgtttactaaaggacaagtcaccacaggacagtacaggatgcttgccaaaagaggtggatatgtctgggttgaaactcaagcaactgtcatatataacaccaagaattctcaaccacagtgcattgtatgtgtgaattacgttgtgagtggtattattcagcacgacttgattttctcccttcaacaaacagaatgtgtccttaaaccggttgaatcttcagatatgaaaatgactcagctattcaccaaagttgaatcagaagatacaagtagcctctttgacaaacttaagaaggaacctgatgctttaactttgctggccccagccgctggagacacaatcatatctttagattttggcagcaacgacacagaaactgatgaccagcaacttgaggaagtaccattatataatgatgtaatgctcccctcacccaacgaaaaattacagaatataaatttggcaatgtctccattacccaccgctgaaacgccaaagccacttcgaagtagtgctgaccctgcactcaatcaagaagttgcattaaaattagaaccaaatccagagtcactggaactttcttttaccatgccccagattcaggatcagacacctagtccttccgatggaagcactagacaaagttcacctgagcctaatagtcccagtgaatattgtttttatgtggatagtgatatggtcaatgaattcaagttggaattggtagaaaaactttttgctgaagacacagaagcaaagaacccattttctactcaggacacagatttagacttggagatgttagctccctatatcccaatggatgatgacttccagttacgttccttcgatcagttgtcaccattagaaagcagttccgcaagccctgaaagcgcaagtcctcaaagcacagttacagtattccagcagactcaaatacaagaacctactgctaatgccaccactaccactgccaccactgatgaattaaaaacagtgacaaaagaccgtatggaagacattaaaatattgattgcatctccatctcctacccacatacataaagaaactactagtgccacatcatcaccatatagagatactcaaagtcggacagcctcaccaaacagagcaggaaaaggagtcatagaacagacagaaaaatctcatccaagaagccctaacgtgttatctgtcgctttgagtcaaagaactacagttcctgaggaagaactaaatccaaagatactagctttgcagaatgctcagagaaagcgaaaaatggaacatgatggttcactttttcaagcagtaggaattggaacattattacagcagccagacgatcatgcagctactacatcactttcttggaaacgtgtaaaaggatgcaaatctagtgaacagaatggaatggagcaaaagacaattattttaataccctctgatttagcatgtagactgctggggcaatcaatggatgaaagtggattaccacagctgaccagttatgattgtgaagttaatgctcctatacaaggcagcagaaacctactgcagggtgaagaattactcagagctttggatcaagttaactgagctttttcttaatttcattcctttttttggacactggtggctcattacctaaagcagtctatttatattttctacatctaattttagaagcctggctacaatactgcacaaacttggttagttcaattttgatcccctttctacttaatttacattaatgctcttttttagtatgttctttaatgctggatcacagacagctcattttctcagttttttggtatttaaaccattgcattgcagtagcatcattttaaaaaatgcacctttttatttatttatttttggctagggagtttatccctttttcgaattatttttaagaagatgccaatataatttttgtaagaaggcagtaacctttcatcatgatcataggcagttgaaaaatttttacaccttttttttcacattttacataaataataatgctttgccagcagtacgtggtagccacaattgcacaatatattttcttaaaaaataccagcagttactcatggaatatattctgcgtttataaaactagtttttaagaagaaattttttttggcctatgaaattgttaaacctggaacatgacattgttaatcatataataatgattcttaaatgctgtatggtttattatttaaatgggtaaagccatttacataatatagaaagatatgcatatatctagaaggtatgtggcatttatttggataaaattctcaattcagagaaatcatctgatgtttctatagtcactttgccagctcaaaagaaaacaataccctatgtagttgtggaagtttatgctaatattgtgtaactgatattaaacctaaatgttctgcctaccctgttggtataaagatattttgagcagactgtaaacaagaaaaaaaaaatcatgcattcttagcaaaattgcctagtatgttaatttgctcaaaatacaatgtttgattttatgcactttgtcgctattaacatcctttttttcatgtagatttcaataattgagtaattttagaagcattattttaggaatatatagttgtcacagtaaatatcttgttttttctatgtacattgtacaaatttttcattccttttgctctttgtggttggatctaacactaactgtattgttttgttacatcaaataaacatcttctgtggaccagg

SEQ ID NO: 1991 - DNA, 3065 bp, Homo sapiens
  source 1..3065: mol_type = genomic DNA
acagtgctgcctcgtctgaggggacaggaggatcaccctcttcgtcgcttcggccagtgtgtcgggctgggccctgacaagccacctgaggagaggctcggagccgggcccggaccccggcggcgcgaacgacaagaaaaagataagttctgaacgtcgaaaagaaaagtctcgagatgcagccagatctcggcgaagtaaagaatctgaagttttttatgagcttgctcatcagttgccacttccacataatgtgagttcgcatcttgataaggcctctgtgatgaggcttaccatcagctatttgcgtgtgaggaaacttctggatgctggtgatttggatattgaagatgacatgaaagcacagatgaattgcttttatttgaaagccttggatggttttgttatggttctcacagatgatggtgacatgatttacatttctgataatgtgaacaaatacatgggattaactcagtttgaactaactggacacagtgtgtttgattttactcatccatgtgaccatgaggaaatgagagaaatgcttacacacagaaatggccttgtgaaaaagggtaaagaacaaaacacacagcgaagcttttttctcagaatgaagtgtaccctaactagccgaggaagaactatgaacataaagtctgcaacatggaaggtattgcactgcacaggccacattcacgtatatgataccaacagtaaccaacctcagtgtgggtataagaaaccacctatgacctgcttggtgctgatttgtgaacccattcctcacccatcaaatattgaaattcctttagatagcaagactttcctcagtcgacacagcctggatatgaaattttcttattgtgatgaaagaattaccgaattgatgggatatgagccagaagaacttttaggccgctcaatttatgaatattatcatgctttggactctgatcatctgaccaaaactcatcatgatatgtttactaaaggacaagtcaccacaggacagtacaggatgcttgccaaaagaggtggatatgtctgggttgaaactcaagcaactgtcatatataacaccaagaattctcaaccacagtgcattgtatgtgtgaattacgttgtgagtggtattattcagcacgacttgattttctcccttcaacaaacagaatgtgtccttaaaccggttgaatcttcagatatgaaaatgactcagctattcaccaaagttgaatcagaagatacaagtagcctctttgacaaacttaagaaggaacctgatgctttaactttgctggccccagccgctggagacacaatcatatctttagattttggcagcaacgacacagaaactgatgaccagcaacttgaggaagtaccattatataatgatgtaatgctcccctcacccaacgaaaaattacagaatataaatttggcaatgtctccattacccaccgctgaaacgccaaagccacttcgaagtagtgctgaccctgcactcaatcaagaagttgcattaaaattagaaccaaatccagagtcactggaactttcttttaccatgccccagattcaggatcagacacctagtccttccgatggaagcactagacaaagttcacctgagcctaatagtcccagtgaatattgtttttatgtggatagtgatatggtcaatgaattcaagttggaattggtagaaaaactttttgctgaagacacagaagcaaagaacccattttctactcaggacacagatttagacttggagatgttagctccctatatcccaatggatgatgacttccagttacgttccttcgatcagttgtcaccattagaaagcagttccgcaagccctgaaagcgcaagtcctcaaagcacagttacagtattccagcagactcaaatacaagaacctactgctaatgccaccactaccactgccaccactgatgaattaaaaacagtgacaaaagaccgtatggaagacattaaaatattgattgcatctccatctcctacccacatacataaagaaactactagtgccacatcatcaccatatagagatactcaaagtcggacagcctcaccaaacagagcaggaaaaggagtcatagaacagacagaaaaatctcatccaagaagccctaacgtgttatctgtcgctttgagtcaaagaactacagttcctgaggaagaactaaatccaaagatactagctttgcagaatgctcagagaaagcgaaaaatggaacatgatggttcactttttcaagcagtaggaattggaacattattacagcagccagacgatcatgcagctactacatcactttcttggaaacgtgtaaaaggatgcaaatctagtgaacagaatggaatggagcaaaagacaattattttaataccctctgatttagcatgtagactgctggggcaatcaatggatgaaagtggattaccacagctgaccagttatgattgtgaagttaatgctcctatacaaggcagcagaaacctactgcagggtgaagaattactcagagctttggatcaagttaactgagctttttcttaatttcattcctttttttggacactggtggctcattacctaaagcagtctatttatattttctacatctaattttagaagcctggctacaatactgcacaaacttggttagttcaattttgatcccctttctacttaatttacattaatgctcttttttagtatgttctttaatgctggatcacagacagctcattttctcagttttttggtatttaaaccattgcattgcagtagcatcattttaaaaaatgcacctttttatttatttatttttggctagggagtttatccctttttcgaattatttttaagaagatgccaatataatttttgtaagaaggcagtaacctttcatcatgatcataggcagttgaaaaatttttacaccttttttttcacattttacataaataataatgctttgccagcagtacgtggtagccacaattgcacaatatattttctt

SEQ ID NO: 1992 - DNA, 3922 bp, Homo sapiens
  source 1..3922: mol_type = genomic DNA
gacaggaggatcaccctcttcgtcgcttcggccagtgtgtcgggctgggccctgacaagccacctgaggagaggctcggagccgggcccggaccccggcgattgccgcccgcttctctctagtctcacgaggggtttcccgcctcgcacccccacctctggacttgcctttccttctcttctccgcgtgtggagggagccagcgcttaggccggagcgagcctgggggccgcccgccgtgaagacatcgcggggaccgattcaccatggagggcgccggcggcgcgaacgacaagaaaaataggataagttctgaacgtcgaaaagaaaagtctcgagatgcagccagatctcggcgaagtaaagaatctgaagttttttatgagcttgctcatcagttgccacttccacataatgtgagttcgcatcttgataaggcctctgtgatgaggcttaccatcagctatttgcgtgtgaggaaacttctggatgctggtgatttggatattgaagatgacatgaaagcacagatgaattgcttttatttgaaagccttggatggttttgttatggttctcacagatgatggtgacatgatttacatttctgataatgtgaacaaatacatgggattaactcagtttgaactaactggacacagtgtgtttgattttactcatccatgtgaccatgaggaaatgagagaaatgcttacacacagaaatggccttgtgaaaaagggtaaagaacaaaacacacagcgaagcttttttctcagaatgaagtgtaccctaactagccgaggaagaactatgaacataaagtctgcaacatggaaggtattgcactgcacaggccacattcacgtatatgataccaacagtaaccaacctcagtgtgggtataagaaaccacctatgacctgcttggtgctgatttgtgaacccattcctcacccatcaaatattgaaattcctttagatagcaagactttcctcagtcgacacagcctggatatgaaattttcttattgtgatgaaagaattaccgaattgatgggatatgagccagaagaacttttaggccgctcaatttatgaatattatcatgctttggactctgatcatctgaccaaaactcatcatgatatgtttactaaaggacaagtcaccacaggacagtacaggatgcttgccaaaagaggtggatatgtctgggttgaaactcaagcaactgtcatatataacaccaagaattctcaaccacagtgcattgtatgtgtgaattacgttgtgagtggtattattcagcacgacttgattttctcccttcaacaaacagaatgtgtccttaaaccggttgaatcttcagatatgaaaatgactcagctattcaccaaagttgaatcagaagatacaagtagcctctttgacaaacttaagaaggaacctgatgctttaactttgctggccccagccgctggagacacaatcatatctttagattttggcagcaacgacacagaaactgatgaccagcaacttgaggaagtaccattatataatgatgtaatgctcccctcacccaacgaaaaattacagaatataaatttggcaatgtctccattacccaccgctgaaacgccaaagccacttcgaagtagtgctgaccctgcactcaatcaagaagttgcattaaaattagaaccaaatccagagtcactggaactttcttttaccatgccccagattcaggatcagacacctagtccttccgatggaagcactagacaaagttcacctgagcctaatagtcccagtgaatattgtttttatgtggatagtgatatggtcaatgaattcaagttggaattggtagaaaaactttttgctgaagacacagaagcaaagaacccattttctactcaggacacagatttagacttggagatgttagctccctatatcccaatggatgatgacttccagttacgttccttcgatcagttgtcaccattagaaagcagttccgcaagccctgaaagcgcaagtcctcaaagcacagttacagtattccagcagactcaaatacaagaacctactgctaatgccaccactaccactgccaccactgatgaattaaaaacagtgacaaaagaccgtatggaagacattaaaatattgattgcatctccatctcctacccacatacataaagaaactactagtgccacatcatcaccatatagagatactcaaagtcggacagcctcaccaaacagagcaggaaaaggagtcatagaacagacagaaaaatctcatccaagaagccctaacgtgttatctgtcgctttgagtcaaagaactacagttcctgaggaagaactaaatccaaagatactagctttgcagaatgctcagagaaagcgaaaaatggaacatgatggttcactttttcaagcagtaggaattggaacattattacagcagccagacgatcatgcagctactacatcactttcttggaaacgtgtaaaaggatgcaaatctagtgaacagaatggaatggagcaaaagacaattattttaataccctctgatttagcatgtagactgctggggcaatcaatggatgaaagtggattaccacagctgaccagttatgattgtgaagttaatgctcctatacaaggcagcagaaacctactgcagggtgaagaattactcagagctttggatcaagttaactgagctttttcttaatttcattcctttttttggacactggtggctcattacctaaagcagtctatttatattttctacatctaattttagaagcctggctacaatactgcacaaacttggttagttcaattttgatcccctttctacttaatttacattaatgctcttttttagtatgttctttaatgctggatcacagacagctcattttctcagttttttggtatttaaaccattgcattgcagtagcatcattttaaaaaatgcacctttttatttatttatttttggctagggagtttatccctttttcgaattatttttaagaagatgccaatataatttttgtaagaaggcagtaacctttcatcatgatcataggcagttgaaaaatttttacaccttttttttcacattttacataaataataatgctttgccagcagtacgtggtagccacaattgcacaatatattttcttaaaaaataccagcagttactcatggaatatattctgcgtttataaaactagtttttaagaagaaattttttttggcctatgaaattgttaaacctggaacatgacattgttaatcatataataatgattcttaaatgctgtatggtttattatttaaatgggtaaagccatttacataatatagaaagatatgcatatatctagaaggtatgtggcatttatttggataaaattctcaattcagagaaatcatctgatgtttctatagtcactttgccagctcaaaagaaaacaataccctatgtagttgtggaagtttatgctaatattgtgtaactgatattaaacctaaatgttctgcctaccctgttggtataaagatattttgagcagactgtaaacaagaaaaaaaaaatcatgcattcttagcaaaattgcctagtatgttaatttgctcaaaatacaatgtttgattttatgcactttgtcgctattaacatcctttttttcatgtagatttcaataattgagtaattttagaagcattattttaggaatatatagttgtcacagtaaatatcttgttttttctatgtacattgtacaaatttttcattccttttgctctttgtggttggatctaacactaactgtattgttttgttacatcaaataaacatcttctgtggaccagg

SEQ ID NO: 1993 - DNA, 3468 bp, Homo sapiens
  source 1..3468: mol_type = genomic DNA
atttgaaaacttggcaaccttggattggatggattcatatttcttagtatagaagttcttgatataactgaaaaattaagttaaacacttaataagtggtggttactcagcacttttagatgctgtttataatagatgaccttttctaactaatttacagttttttgaaagataactgagaggttgagggacggagattttcttcaagcaattttttttttcattttaaatgagctcccaatgtcggagtttggaaaacaaatttgtctttttaaaagaaggtctaggaaactcaaaacctgaagaattggaagaaatcagaatagaaaatggtaggataagttctgaacgtcgaaaagaaaagtctcgagatgcagccagatctcggcgaagtaaagaatctgaagttttttatgagcttgctcatcagttgccacttccacataatgtgagttcgcatcttgataaggcctctgtgatgaggcttaccatcagctatttgcgtgtgaggaaacttctggatgctggtgatttggatattgaagatgacatgaaagcacagatgaattgcttttatttgaaagccttggatggttttgttatggttctcacagatgatggtgacatgatttacatttctgataatgtgaacaaatacatgggattaactcagtttgaactaactggacacagtgtgtttgattttactcatccatgtgaccatgaggaaatgagagaaatgcttacacacagaaatggccttgtgaaaaagggtaaagaacaaaacacacagcgaagcttttttctcagaatgaagtgtaccctaactagccgaggaagaactatgaacataaagtctgcaacatggaaggtattgcactgcacaggccacattcacgtatatgataccaacagtaaccaacctcagtgtgggtataagaaaccacctatgacctgcttggtgctgatttgtgaacccattcctcacccatcaaatattgaaattcctttagatagcaagactttcctcagtcgacacagcctggatatgaaattttcttattgtgatgaaagaattaccgaattgatgggatatgagccagaagaacttttaggccgctcaatttatgaatattatcatgctttggactctgatcatctgaccaaaactcatcatgatatgtttactaaaggacaagtcaccacaggacagtacaggatgcttgccaaaagaggtggatatgtctgggttgaaactcaagcaactgtcatatataacaccaagaattctcaaccacagtgcattgtatgtgtgaattacgttgtgagtggtattattcagcacgacttgattttctcccttcaacaaacagaatgtgtccttaaaccggttgaatcttcagatatgaaaatgactcagctattcaccaaagttgaatcagaagatacaagtagcctctttgacaaacttaagaaggaacctgatgctttaactttgctggccccagccgctggagacacaatcatatctttagattttggcagcaacgacacagaaactgatgaccagcaacttgaggaagtaccattatataatgatgtaatgctcccctcacccaacgaaaaattacagaatataaatttggcaatgtctccattacccaccgctgaaacgccaaagccacttcgaagtagtgctgaccctgcactcaatcaagaagttgcattaaaattagaaccaaatccagagtcactggaactttcttttaccatgccccagattcaggatcagacacctagtccttccgatggaagcactagacaaagttcacctgagcctaatagtcccagtgaatattgtttttatgtggatagtgatatggtcaatgaattcaagttggaattggtagaaaaactttttgctgaagacacagaagcaaagaacccattttctactcaggacacagatttagacttggagatgttagctccctatatcccaatggatgatgacttccagttacgttccttcgatcagttgtcaccattagaaagcagttccgcaagccctgaaagcgcaagtcctcaaagcacagttacagtattccagcagactcaaatacaagaacctactgctaatgccaccactaccactgccaccactgatgaattaaaaacagtgacaaaagaccgtatggaagacattaaaatattgattgcatctccatctcctacccacatacataaagaaactactagtgccacatcatcaccatatagagatactcaaagtcggacagcctcaccaaacagagcaggaaaaggagtcatagaacagacagaaaaatctcatccaagaagccctaacgtgttatctgtcgctttgagtcaaagaactacagttcctgaggaagaactaaatccaaagatactagctttgcagaatgctcagagaaagcgaaaaatggaacatgatggttcactttttcaagcagtaggaattggaacattattacagcagccagacgatcatgcagctactacatcactttcttggaaacgtgtaaaaggatgcaaatctagtgaacagaatggaatggagcaaaagacaattattttaataccctctgatttagcatgtagactgctggggcaatcaatggatgaaagtggattaccacagctgaccagttatgattgtgaagttaatgctcctatacaaggcagcagaaacctactgcagggtgaagaattactcagagctttggatcaagttaactgagctttttcttaatttcattcctttttttggacactggtggctcattacctaaagcagtctatttatattttctacatctaattttagaagcctggctacaatactgcacaaacttggttagttcaattttgatcccctttctacttaatttacattaatgctcttttttagtatgttctttaatgctggatcacagacagctcattttctcagttttttggtatttaaaccattgcattgcagtagcatcattttaaaaaatgcacctttttatttatttatttttggctagggagtttatccctttttcgaattatttttaagaagatgccaatataatttttgtaagaaggcagtaacctttcatcatgatcataggcagttgaaaaatttttacaccttttttttcacattttacataaataataatgctttgccagcagtacgtggtagccacaattgcacaatatattttcttaaaaaataccagcagttactcatggaatatattctgcgtttataaaactagtttttaagaagaaattttttttggcctatgaaattgttaaacctggaacatgacattgttaatcatataataatgattcttaaatgctgtatggtttattatttaaatgggtaaagccatttacataatatagaaagatatgcatatatctagaagg

SEQ ID NO: 1994 - DNA, 2655 bp, Homo sapiens
  source 1..2655: mol_type = genomic DNA
agtgcacagtgctgcctcgtctgaggggacaggaggatcaccctcttcgtcgcttcggccagtgtgtcgggctgggccctgacaagccacctgaggagaggctcggagccgggcccggaccccggcgattgccgcccgcttctctctagtctcacgaggggtttcccgcctcgcacccccacctctggacttgcctttccttctcttctccgcgtgtggagggagccagcgcttaggccggagcgagcctgggggccgcccgccgtgaagacatcgcggggaccgattcaccatggagggcgccggcggcgcgaacgacaagaaaaagtgatttggatattgaagatgacatgaaagcacagatgaattgcttttatttgaaagccttggatggttttgttatggttctcacagatgatggtgacatgatttacatttctgataatgtgaacaaatacatgggattaactcagtttgaactaactggacacagtgtgtttgattttactcatccatgtgaccatgaggaaatgagagaaatgcttacacacagaaatggccttgtgaaaaagggtaaagaacaaaacacacagcctggatatgaaattttcttattgtgatgaaagaattaccgaattgatgggatatgagccagaagaacttttaggccgctcaatttatgaatattatcatgctttggactctgatcatctgaccaaaactcatcatgatatgtttactaaaggacaagtcaccacaggacagtacaggatgcttgccaaaagaggtggatatgtctgggttgaaactcaagcaactgtcatatataacaccaagaattctcaaccacagtgcattgtatgtgtgaattacgttgtgagtggtattattcagcacgacttgattttctcccttcaacaaacagaatgtgtccttaaaccggttgaatcttcagatatgaaaatgactcagctattcaccaaagttgaatcagaagatacaagtagcctctttgacaaacttaagaaggaacctgatgctttaactttgctggccccagccgctggagacacaatcatatctttagattttggcagcaacgacacagaaactgatgaccagcaacttgaggaagtaccattatataatgatgtaatgctcccctcacccaacgaaaaattacagaatataaatttggcaatgtctccattacccaccgctgaaacgccaaagccacttcgaagtagtgctgaccctgcactcaatcaagaagttgcattaaaattagaaccaaatccagagtcactggaactttcttttaccatgccccagattcaggatcagacacctagtccttccgatggaagcactagacaaagttcacctgagcctaatagtcccagtgaatattgtttttatgtggatagtgatatggtcaatgaattcaagttggaattggtagaaaaactttttgctgaagacacagaagcaaagaacccattttctactcaggacacagatttagacttggagatgttagctccctatatcccaatggatgatgacttccagttacgttccttcgatcagttgtcaccattagaaagcagttccgcaagccctgaaagcgcaagtcctcaaagcacagttacagtattccagcagactcaaatacaagaacctactgctaatgccaccactaccactgccaccactgatgaattaaaaacagtgacaaaagaccgtatggaagacattaaaatattgattgcatctccatctcctacccacatacataaagaaactactagtgccacatcatcaccatatagagatactcaaagtcggacagcctcaccaaacagagcaggaaaaggagtcatagaacagacagaaaaatctcatccaagaagccctaacgtgttatctgtcgctttgagtcaaagaactacagttcctgaggaagaactaaatccaaagatactagctttgcagaatgctcagagaaagcgaaaaatggaacatgatggttcactttttcaagcagtaggaattggaacattattacagcagccagacgatcatgcagctactacatcactttcttggaaacgtgtaaaaggatgcaaatctagtgaacagaatggaatggagcaaaagacaattattttaataccctctgatttagcatgtagactgctggggcaatcaatggatgaaagtggattaccacagctgaccagttatgattgtgaagttaatgctcctatacaaggcagcagaaacctactgcagggtgaagaattactcagagctttggatcaagttaactgagctttttcttaatttcattcctttttttggacactggtggctcattacctaaagcagtctatttatattttctacatctaattttagaagcctggctacaatactgcacaaacttggttagttcaattttgatcccctttctacttaatttacattaatgctcttttttagtatgttctttaatgctggatcacagacagctcattttctcagttttttggtatttaaaccattgcattgcagtagcatcattttaaaaaatgcacctttttatttatttatttttggctagggagtttatccctttttcgaattattttt

SEQ ID NO: 1995 - DNA, 3468 bp, Homo sapiens; identical to SEQ ID NO: 1993
  source 1..3468: mol_type = genomic DNA

SEQ ID NO: 1996 - DNA, 1296 bp, Homo sapiens
  source 1..1296: mol_type = genomic DNA
atggaagatatacaaacaaatgcggaactgaaaagcactcaggagcagtctgtgcccgcagaaagtgcagcggttttgaatgactacagtttaaccaaatctcatgaaatggaaaatgtggacagtggagaaggcccagccaatgaagatgaagacataggagatgattcaatgaaagtgaaagatgaatacagtgaaagagatgagaatgttttaaagtcagaacccatgggaaatgcagaagagcctgaaatcccttacagctattcaagagaatataatgaatatgaaaacattaagttggagagacatgttgtctcattcgatagtagcaggccaaccagtggaaagatgaactgcgatgtgtgtggattatcctgcatcagcttcaatgtcttaatggttcataagcgaagccatactggtgaacgcccattccagtgtaatcagtgtggggcatcttttactcagaaaggtaacctcctccgccacattaaactgcacacaggggaaaaaccttttaagtgtcacctctgcaactatgcatgccaaagaagagatgcgctcacggggcatcttaggacacattctggtgagaagcgccactgctttgatgtcaactataattcaagttacatgtatgagaaagagagtgagctcatacagacccgcatgatggaccaagccatcaataacgccatcagctatcttggcgccgaagccctgcgccccttggtccagacaccgcctgctcccacctcggagatggttccagttatcagcagcatgtatcccatagccctcacccgggctgagatgtcaaacggtgcccctcaagagctggaaaagaaaagcatccaccttccagagaagagcgtgccttctgagagaggcctctctcccaacaatagtggccacgactccacggacactgacagcaaccatgaagaacgccagaatcacatctatcagcaaaatcacatggtcctgtctcgggcccgcaatgggatgccacttctgaaggaggttccccgctcttacgaactcctcaagcccccgcccatctgcccaagagactccgtcaaagtgatcaacaaggaaggggaggtgatggatgtgtatcggtgtgaccactgccgcgtcctcttcctggactatgtgatgttcacgattcacatgggctgccacggcttccgtgaccctttcgagtgtaacatgtgtggatatcgaagccatgatcggtatgagttctcgtctcacatagccagaggagaacacagagccctgctgaagtga

SEQ ID NO: 1997 - DNA, 2152 bp, Homo sapiens
  source 1..2152: mol_type = genomic DNA
gcaggagcacgtggagaggccgagtagccacagcggcagctccagcccggcccggcagcgacatggaagatatacaaacaaatgcggaactgaaaagcactcaggagcagtctgtgcccgcagaaagtgcagcggttttgaatgactacagtttaaccaaatctcatgaaatggaaaatgtggacagtggagaaggcccagccaatgaagatgaagacataggagatgattcaatgaaagtgaaagatgaatacagtgaaagagatgagaatgttttaaagtcagaacccatgggaaatgcagaagagcctgaaatcccttacagctattcaagagaatataatgaatatgaaaacattaagttggagagacatgttgtctcattcgatagtagcaggccaaccagtggaaagatgaactgcgatgtgtgtggattatcctgcatcagcttcaatgtcttaatggttcataagcgaagccatactgcaagtgcggaggcaagacacatcaaagcagagatgggaagtgaaagagctctcgtactggacagattagcaagcaatgtggcaaaacgaaaaagctcaatgcctcagaaattcattggtgagaagcgccactgctttgatgtcaactataattcaagttacatgtatgagaaagagagtgagctcatacagacccgcatgatggaccaagccatcaataacgccatcagctatcttggcgccgaagccctgcgccccttggtccagacaccgcctgctcccacctcggagatggttccagttatcagcagcatgtatcccatagccctcacccgggctgagatgtcaaacggtgcccctcaagagctggaaaagaaaagcatccaccttccagagaagagcgtgccttctgagagaggcctctctcccaacaatagtggccacgactccacggacactgacagcaaccatgaagaacgccagaatcacatctatcagcaaaatcacatggtcctgtctcgggcccgcaatgggatgccacttctgaaggaggttccccgctcttacgaactcctcaagcccccgcccatctgcccaagagactccgtcaaagtgatcaacaaggaaggggaggtgatggatgtgtatcggtgtgaccactgccgcgtcctcttcctggactatgtgatgttcacgattcacatgggctgccacggcttccgtgaccctttcgagtgtaacatgtgtggatatcgaagccatgatcggtatgagttctcgtctcacatagccagaggagaacacagagccctgctgaagtgaatatctggtctcagggattgctcctatgtattcagcatcgtttctaaaaaccaatgacctcgcctaacagattgctctcaaaacatactcagttccaaacttcttttcataccatttttagctgtgttcacaggggtagccagggaaacactgtcttccttcagaaattattcgcaggtctagcatattattacttttgtgaaacctttgttttcccatcagggacttgaattttatggaatttaaaagccaaaaaggtatttggtcattatcttctacagcagtggaatgagtggtcccggagatgtgctatatgaaacattctttctgagatatatcaaccacacgtggaaaagcctttcagtcatacatgcaaatccacaaagaggaagagctgaccagctgaccttgctgggaagcctcacccttctgcccttcacaggctgaagggttaagatctaatctccctaatctaaatgacagtctaagagtaagtaaaagaacagccataaaataagtatctgttacgagtaactgaagaccccattctccaagcatcagatccatttcctatcacaacatttttaaaaaatgtcatctgatggcacttctgcttctgtcctttaccttcccatctccagtgaaaagctgagctgctttgggctaaaccagttgtctatagaagaaaatctatgccagaagaactcatggttttaaatatagaccatcatcgaaactccagaaatttatccactgtggatgatgacatcgctttcctttggtcaaggttggcagagcaagggtataaagggggaaattgtttggcagcaccaacagaaaacaaa

SEQ ID NO: 1998 - DNA, 1413 bp, Homo sapiens
  source 1..1413: mol_type = genomic DNA
atggaagatatacaaacaaatgcggaactgaaaagcactcaggagcagtctgtgcccgcagaaagtgcagcggttttgaatgactacagtttaaccaaatctcatgaaatggaaaatgtggacagtggagaaggcccagccaatgaagatgaagacataggagatgattcaatgaaagtgaaagatgaatacagtgaaagagatgagaatgttttaaagtcagaacccatgggaaatgcagaagagcctgaaatcccttacagctattcaagagaatataatgaatatgaaaacattaagttggagagacatgttgtctcattcgatagtagcaggccaaccagtggaaagatgaactgcgatgtgtgtggattatcctgcatcagcttcaatgtcttaatggttcataagcgaagccatactggtgaacgcccattccagtgtaatcagtgtggggcatcttttactcagaaaggtaacctcctccgccacattaaactgcacacaggggaaaaaccttttaagtgtcacctctgcaactatgcatgccaaagaagagatgcgctcacggggcatcttaggacacattctgtggagaaaccctacaaatgtgagttttgtggaaggagttacaagcagagaagttcccttgaggagcacaaggagcgctgccgtacatttcttcagagcactgacccaggggacactggtgagaagcgccactgctttgatgtcaactataattcaagttacatgtatgagaaagagagtgagctcatacagacccgcatgatggaccaagccatcaataacgccatcagctatcttggcgccgaagccctgcgccccttggtccagacaccgcctgctcccacctcggagatggttccagttatcagcagcatgtatcccatagccctcacccgggctgagatgtcaaacggtgcccctcaagagctggaaaagaaaagcatccaccttccagagaagagcgtgccttctgagagaggcctctctcccaacaatagtggccacgactccacggacactgacagcaaccatgaagaacgccagaatcacatctatcagcaaaatcacatggtcctgtctcgggcccgcaatgggatgccacttctgaaggaggttccccgctcttacgaactcctcaagcccccgcccatctgcccaagagactccgtcaaagtgatcaacaaggaaggggaggtgatggatgtgtatcggtgtgaccactgccgcgtcctcttcctggactatgtgatgttcacgattcacatgggctgccacggcttccgtgaccctttcgagtgtaacatgtgtggatatcgaagccatgatcggtatgagttctcgtctcacatagccagaggagaacacagagccctgctgaagtga

SEQ ID NO: 1999 - DNA, 1413 bp, Homo sapiens
  source 1..1413: mol_type = genomic DNA
atggaagatatacaaacaaatgcggaactgaaaagcactcaggagcagtctgtgcccgcagaaagtgcagcggttttgaatgactacagtttaaccaaatctcatgaaatggaaaatgtggacagtggagaaggcccagccaatgaagatgaagacataggagatgattcaatgaaagtgaaagatgaatacagtgaaagagatgagaatgttttaaagtcagaacccatgggaaatgcagaagagcctgaaatcccttacagctattcaagagaatataatgaatatgaaaacattaagttggagagacatgttgtctcattcgatagtagcaggccaaccagtggaaagatgaactgcgatgtgtgtggattatcctgcatcagcttcaatgtcttaatggttcataagcgaagccatactggtgaacgcccattccagtgtaatcagtgtggggcatcttttactcagaaaggtaacctcctccgccacattaaactgcacacaggggaaaaaccttttaagtgtcacctctgcaactatgcatgccaaagaagagatgcgctcacggggcatcttaggacacattctgcaagtgcggaggcaagacacatcaaagcagagatgggaagtgaaagagctctcgtactggacagattagcaagcaatgtggcaaaacgaaaaagctcaatgcctcagaaattcattggtgagaagcgccactgctttgatgtcaactataattcaagttacatgtatgagaaagagagtgagctcatacagacccgcatgatggaccaagccatcaataacgccatcagctatcttggcgccgaagccctgcgccccttggtccagacaccgcctgctcccacctcggagatggttccagttatcagcagcatgtatcccatagccctcacccgggctgagatgtcaaacggtgcccctcaagagctggaaaagaaaagcatccaccttccagagaagagcgtgccttctgagagaggcctctctcccaacaatagtggccacgactccacggacactgacagcaaccatgaagaacgccagaatcacatctatcagcaaaatcacatggtcctgtctcgggcccgcaatgggatgccacttctgaaggaggttccccgctcttacgaactcctcaagcccccgcccatctgcccaagagactccgtcaaagtgatcaacaaggaaggggaggtgatggatgtgtatcggtgtgaccactgccgcgtcctcttcctggactatgtgatgttcacgattcacatgggctgccacggcttccgtgaccctttcgagtgtaacatgtgtggatatcgaagccatgatcggtatgagttctcgtctcacatagccagaggagaacacagagccctgctgaagtga

SEQ ID NO: 2000 - DNA, 1669 bp, Homo sapiens
  source 1..1669: mol_type = genomic DNA
gcaggagcacgtggagaggccgagtagccacagcggcagctccagcccggcccggcagcgacatggaagatatacaaacaaatgcggaactgaaaagcactcaggagcagtctgtgcccgcagaaagtgcagcggttttgaatgactacagtttaaccaaatctcatgaaatggaaaatgtggacagtggagaaggcccagccaatgaagatgaagacataggagtggagaaaccctacaaatgtgagttttgtggaaggagttacaagcagagaagttcccttgaggagcacaaggagcgctgccgtacatttcttcagagcactgacccaggggacactgcaagtgcggaggcaagacacatcaaagcagagatgggaagtgaaagagctctcgtactggacagattagcaagcaatgtggcaaaacgaaaaagctcaatgcctcagaaattcattggtgagaagcgccactgctttgatgtcaactataattcaagttacatgtatgagaaagagagtgagctcatacagacccgcatgatggaccaagccatcaataacgccatcagctatcttggcgccgaagccctgcgccccttggtccagacaccgcctgctcccacctcggagatggttccagttatcagcagcatgtatcccatagccctcacccgggctgagatgtcaaacggtgcccctcaagagctggaaaagaaaagcatccaccttccagagaagagcgtgccttctgagagaggcctctctcccaacaatagtggccacgactccacggacactgacagcaaccatgaagaacgccagaatcacatctatcagcaaaatcacatggtcctgtctcgggcccgcaatgggatgccacttctgaaggaggttccccgctcttacgaactcctcaagcccccgcccatctgcccaagagactccgtcaaagtgatcaacaaggaaggggaggtgatggatgtgtatcggtgtgaccactgccgcgtcctcttcctggactatgtgatgttcacgattcacatgggctgccacggcttccgtgaccctttcgagtgtaacatgtgtggatatcgaagccatgatcggtatgagttctcgtctcacatagccagaggagaacacagagccctgctgaagtgaatatctggtctcagggattgctcctatgtattcagcatcgtttctaaaaaccaatgacctcgcctaacagattgctctcaaaacatactcagttccaaacttcttttcataccatttttagctgtgttcacaggggtagccagggaaacactgtcttccttcagaaattattcgcaggtctagcatattattacttttgtgaaacctttgttttcccatcagggacttgaattttatggaatttaaaagccaaaaaggtatttggtcattatcttctacagcagtggaatgagtggtcccggagatgtgctatatgaaacattctttctgagatatatcaaccacacgtggaaaagcctttcagtcatacatgcaaatccacaaagaggaagagctgaccagctgaccttgctgggaagcctcacccttctgcccttcacaggctgaagggttaagatctaatctccctaatctaaatgacagtctaagagtaagtaaaagaacag

SEQ ID NO: 2001 - DNA, 1696 bp, Homo sapiens
  source 1..1696: mol_type = genomic DNA
gcaggagcacgtggagaggccgagtagccacagcggcagctccagcccggcccggcagcgacatggaagatatacaaacaaatgcggaactgaaaagcactcaggagcagtctgtgcccgcagaaagtgcagcggttttgaatgactacagtttaaccaaatctcatgaaatggaaaatgtggacagtggagaaggcccagccaatgaagatgaagacataggagatgattcaatgaaagtgaaagatgaatacagtgaaagagatgagaatgttttaaagtcagaacccatgggaaatgcagaagagcctgaaatcccttacagctattcaagagaatataatgaatatgaaaacattaagttggagagacatgttgtctcattcgatagtagcaggccaaccagtggaaagatgaactgcgatgtgtgtggattatcctgcatcagcttcaatgtcttaatggttcataagcgaagccatactggtgagaagcgccactgctttgatgtcaactataattcaagttacatgtatgagaaagagagtgagctcatacagacccgcatgatggaccaagccatcaataacgccatcagctatcttggcgccgaagccctgcgccccttggtccagacaccgcctgctcccacctcggagatggttccagttatcagcagcatgtatcccatagccctcacccgggctgagatgtcaaacggtgcccctcaagagctggaaaagaaaagcatccaccttccagagaagagcgtgccttctgagagaggcctctctcccaacaatagtggccacgactccacggacactgacagcaaccatgaagaacgccagaatcacatctatcagcaaaatcacatggtcctgtctcgggcccgcaatgggatgccacttctgaaggaggttccccgctcttacgaactcctcaagcccccgcccatctgcccaagagactccgtcaaagtgatcaacaaggaaggggaggtgatggatgtgtatcggtgtgaccactgccgcgtcctcttcctggactatgtgatgttcacgattcacatgggctgccacggcttccgtgaccctttcgagtgtaacatgtgtggatatcgaagccatgatcggtatgagttctcgtctcacatagccagaggagaacacagagccctgctgaagtgaatatctggtctcagggattgctcctatgtattcagcatcgtttctaaaaaccaatgacctcgcctaacagattgctctcaaaacatactcagttccaaacttcttttcataccatttttagctgtgttcacaggggtagccagggaaacactgtcttccttcagaaattattcgcaggtctagcatattattacttttgtgaaacctttgttttcccatcagggacttgaattttatggaatttaaaagccaaaaaggtatttggtcattatcttctacagcagtggaatgagtggtcccggagatgtgctatatgaaacattctttctgagatatatcaaccacacgtggaaaagcctttcagtcatacatgcaaatccacaaagaggaagagctgaccagctgaccttgctgggaagcctcacccttctgcccttcacaggctgaagggttaagatctaatctccctaatctaaatgacagtctaagagtaagtaaaagaacag

SEQ ID NO: 2002 - DNA, 1435 bp, Homo sapiens
  source 1..1435: mol_type = genomic DNA
gcaggagcacgtggagaggccgagtagccacagcggcagctccagcccggcccggcagcgacatggaagatatacaaacaaatgcggaactgaaaagcactcaggagcagtctgtgcccgcagaaagtgcagcggttttgaatgactacagtttaaccaaatctcatgaaatggaaaatgtggacagtggagaaggcccagccaatgaagatgaagacataggaggtgagaagcgccactgctttgatgtcaactataattcaagttacatgtatgagaaagagagtgagctcatacagacccgcatgatggaccaagccatcaataacgccatcagctatcttggcgccgaagccctgcgccccttggtccagacaccgcctgctcccacctcggagatggttccagttatcagcagcatgtatcccatagccctcacccgggctgagatgtcaaacggtgcccctcaagagctggaaaagaaaagcatccaccttccagagaagagcgtgccttctgagagaggcctctctcccaacaatagtggccacgactccacggacactgacagcaaccatgaagaacgccagaatcacatctatcagcaaaatcacatggtcctgtctcgggcccgcaatgggatgccacttctgaaggaggttccccgctcttacgaactcctcaagcccccgcccatctgcccaagagactccgtcaaagtgatcaacaaggaaggggaggtgatggatgtgtatcggtgtgaccactgccgcgtcctcttcctggactatgtgatgttcacgattcacatgggctgccacggcttccgtgaccctttcgagtgtaacatgtgtggatatcgaagccatgatcggtatgagttctcgtctcacatagccagaggagaacacagagccctgctgaagtgaatatctggtctcagggattgctcctatgtattcagcatcgtttctaaaaaccaatgacctcgcctaacagattgctctcaaaacatactcagttccaaacttcttttcataccatttttagctgtgttcacaggggtagccagggaaacactgtcttccttcagaaattattcgcaggtctagcatattattacttttgtgaaacctttgttttcccatcagggacttgaattttatggaatttaaaagccaaaaaggtatttggtcattatcttctacagcagtggaatgagtggtcccggagatgtgctatatgaaacattctttctgagatatatcaaccacacgtggaaaagcctttcagtcatacatgcaaatccacaaagaggaagagctgaccagctgaccttgctgggaagcctcacccttctgcccttcacaggctgaagggttaagatctaatctccctaatctaaatgacagtctaagagtaagtaaaagaacag

SEQ ID NO: 2003 - DNA, 1837 bp, Homo sapiens
  source 1..1837: mol_type = genomic DNA
gcaggagcacgtggagaggccgagtagccacagcggcagctccagcccggcccggcagcgacatggaagatatacaaacaaatgcggaactgaaaagcactcaggagcagtctgtgcccgcagaaagtgcagcggttttgaatgactacagtttaaccaaatctcatgaaatggaaaatgtggacagtggagaaggcccagccaatgaagatgaagacataggaggtgaacgcccattccagtgtaatcagtgtggggcatcttttactcagaaaggtaacctcctccgccacattaaactgcacacaggggaaaaaccttttaagtgtcacctctgcaactatgcatgccaaagaagagatgcgctcacggggcatcttaggacacattctgtggagaaaccctacaaatgtgagttttgtggaaggagttacaagcagagaagttcccttgaggagcacaaggagcgctgccgtacatttcttcagagcactgacccaggggacactgcaagtgcggaggcaagacacatcaaagcagagatgggaagtgaaagagctctcgtactggacagattagcaagcaatgtggcaaaacgaaaaagctcaatgcctcagaaattcattggtgagaagcgccactgctttgatgtcaactataattcaagttacatgtatgagaaagagagtgagctcatacagacccgcatgatggaccaagccatcaataacgccatcagctatcttggcgccgaagccctgcgccccttggtccagacaccgcctgctcccacctcggagatggttccagttatcagcagcatgtatcccatagccctcacccgggctgagatgtcaaacggtgcccctcaagagctggaaaagaaaagcatccaccttccagagaagagcgtgccttctgagagaggcctctctcccaacaatagtggccacgactccacggacactgacagcaaccatgaagaacgccagaatcacatctatcagcaaaatcacatggtcctgtctcgggcccgcaatgggatgccacttctgaaggaggttccccgctcttacgaactcctcaagcccccgcccatctgcccaagagactccgtcaaagtgatcaacaaggaaggggaggtgatggatgtgtatcggtgtgaccactgccgcgtcctcttcctggactatgtgatgttcacgattcacatgggctgccacggcttccgtgaccctttcgagtgtaacatgtgtggatatcgaagccatgatcggtatgagttctcgtctcacatagccagaggagaacacagagccctgctgaagtgaatatctggtctcagggattgctcctatgtattcagcatcgtttctaaaaaccaatgacctcgcctaacagattgctctcaaaacatactcagttccaaacttcttttcataccatttttagctgtgttcacaggggtagccagggaaacactgtcttccttcagaaattattcgcaggtctagcatattattacttttgtgaaacctttgttttcccatcagggacttgaattttatggaatttaaaagccaaaaaggtatttggtcattatcttctacagcagtggaatgagtggtcccggagatgtgctatatgaaacattctttctgagatatatcaaccacacgtggaaaagcctttcagtcatacatgcaaatccacaaagaggaagagctgaccagctgaccttgctgggaagcctcacccttctgcccttcacaggctgaagggttaagatctaatctccctaatctaaatgacagtctaagagtaagtaaaagaacag

SEQ ID NO: 2004 - DNA, 1552 bp, Homo sapiens
  source 1..1552: mol_type = genomic DNA
gcaggagcacgtggagaggccgagtagccacagcggcagctccagcccggcccggcagcgacatggaagatatacaaacaaatgcggaactgaaaagcactcaggagcagtctgtgcccgcagaaagtgcagcggttttgaatgactacagtttaaccaaatctcatgaaatggaaaatgtggacagtggagaaggcccagccaatgaagatgaagacataggagcaagtgcggaggcaagacacatcaaagcagagatgggaagtgaaagagctctcgtactggacagattagcaagcaatgtggcaaaacgaaaaagctcaatgcctcagaaattcattggtgagaagcgccactgctttgatgtcaactataattcaagttacatgtatgagaaagagagtgagctcatacagacccgcatgatggaccaagccatcaataacgccatcagctatcttggcgccgaagccctgcgccccttggtccagacaccgcctgctcccacctcggagatggttccagttatcagcagcatgtatcccatagccctcacccgggctgagatgtcaaacggtgcccctcaagagctggaaaagaaaagcatccaccttccagagaagagcgtgccttctgagagaggcctctctcccaacaatagtggccacgactccacggacactgacagcaaccatgaagaacgccagaatcacatctatcagcaaaatcacatggtcctgtctcgggcccgcaatgggatgccacttctgaaggaggttccccgctcttacgaactcctcaagcccccgcccatctgcccaagagactccgtcaaagtgatcaacaaggaaggggaggtgatggatgtgtatcggtgtgaccactgccgcgtcctcttcctggactatgtgatgttcacgattcacatgggctgccacggcttccgtgaccctttcgagtgtaacatgtgtggatatcgaagccatgatcggtatgagttctcgtctcacatagccagaggagaacacagagccctgctgaagtgaatatctggtctcagggattgctcctatgtattcagcatcgtttctaaaaaccaatgacctcgcctaacagattgctctcaaaacatactcagttccaaacttcttttcataccatttttagctgtgttcacaggggtagccagggaaacactgtcttccttcagaaattattcgcaggtctagcatattattacttttgtgaaacctttgttttcccatcagggacttgaattttatggaatttaaaagccaaaaaggtatttggtcattatcttctacagcagtggaatgagtggtcccggagatgtgctatatgaaacattctttctgagatatatcaaccacacgtggaaaagcctttcagtcatacatgcaaatccacaaagaggaagagctgaccagctgaccttgctgggaagcctcacccttctgcccttcacaggctgaagggttaagatctaatctccctaatctaaatgacagtctaagagtaagtaaaagaacag

SEQ ID NO: 2005 - DNA, 1897 bp, Homo sapiens
  source 1..1897: mol_type = genomic DNA
ctcaggagcagtctgtgcccgcagatgattcaatgaaagtgaaagatgaatacagtgaaagagatgagaatgttttaaagtcagaacccatgggaaatgcagaagagcctgaaatcccttacagctattcaagagaatataatgaatatgaaaacattaagttggagagacatgttgtctcattcgatagtagcaggccaaccagtggaaagatgaactgcgatgtgtgtggattatcctgcatcagcttcaatgtcttaatggttcataagcgaagccatactggtgaacgcccattccagtgtaatcagtgtggggcatcttttactcagaaaggtaacctcctccgccacattaaactgcacacaggggaaaaaccttttaagtgtcacctctgcaactatgcatgccaaagaagagatgcgctcacggggcatcttaggacacattctgtggagaaaccctacaaatgtgagttttgtggaaggagttacaagcagagaagttcccttgaggagcacaaggagcgctgccgtacatttcttcagagcactgacccaggggacactgcaagtgcggaggcaagacacatcaaagcagagatgggaagtgaaagagctctcgtactggacagattagcaagcaatgtggcaaaacgaaaaagctcaatgcctcagaaattcattggtgagaagcgccactgctttgatgtcaactataattcaagttacatgtatgagaaagagagtgagctcatacagacccgcatgatggaccaagccatcaataacgccatcagctatcttggcgccgaagccctgcgccccttggtccagacaccgcctgctcccacctcggagatggttccagttatcagcagcatgtatcccatagccctcacccgggctgagatgtcaaacggtgcccctcaagagctggaaaagaaaagcatccaccttccagagaagagcgtgccttctgagagaggcctctctcccaacaatagtggccacgactccacggacactgacagcaaccatgaagaacgccagaatcacatctatcagcaaaatcacatggtcctgtctcgggcccgcaatgggatgccacttctgaaggaggttccccgctcttacgaactcctcaagcccccgcccatctgcccaagagactccgtcaaagtgatcaacaaggaaggggaggtgatggatgtgtatcggtgtgaccactgccgcgtcctcttcctggactatgtgatgttcacgattcacatgggctgccacggcttccgtgaccctttcgagtgtaacatgtgtggatatcgaagccatgatcggtatgagttctcgtctcacatagccagaggagaacacagagccctgctgaagtgaatatctggtctcagggattgctcctatgtattcagcatcgtttctaaaaaccaatgacctcgcctaacagattgctctcaaaacatactcagttccaaacttcttttcataccatttttagctgtgttcacaggggtagccagggaaacactgtcttccttcagaaattattcgcaggtctagcatattattacttttgtgaaacctttgttttcccatcagggacttgaattttatggaatttaaaagccaaaaaggtatttggtcattatcttctacagcagtggaatgagtggtcccggagatgtgctatatgaaacattctttctgagatatatcaaccacacgtggaaaagcctttcagtcatacatgcaaatccacaaagaggaagagctgaccagctgaccttgctgggaagcctcacccttctgcccttcacaggctgaagggttaagatctaatctccctaatctaaatgacagtctaagagtaagtaaaagaacag

SEQ ID NO: 2006 - DNA, 1780 bp, Homo sapiens
  source 1..1780: mol_type = genomic DNA
ctcaggagcagtctgtgcccgcagatgattcaatgaaagtgaaagatgaatacagtgaaagagatgagaatgttttaaagtcagaacccatgggaaatgcagaagagcctgaaatcccttacagctattcaagagaatataatgaatatgaaaacattaagttggagagacatgttgtctcattcgatagtagcaggccaaccagtggaaagatgaactgcgatgtgtgtggattatcctgcatcagcttcaatgtcttaatggttcataagcgaagccatactggtgaacgcccattccagtgtaatcagtgtggggcatcttttactcagaaaggtaacctcctccgccacattaaactgcacacaggggaaaaaccttttaagtgtcacctctgcaactatgcatgccaaagaagagatgcgctcacggggcatcttaggacacattctgcaagtgcggaggcaagacacatcaaagcagagatgggaagtgaaagagctctcgtactggacagattagcaagcaatgtggcaaaacgaaaaagctcaatgcctcagaaattcattggtgagaagcgccactgctttgatgtcaactataattcaagttacatgtatgagaaagagagtgagctcatacagacccgcatgatggaccaagccatcaataacgccatcagctatcttggcgccgaagccctgcgccccttggtccagacaccgcctgctcccacctcggagatggttccagttatcagcagcatgtatcccatagccctcacccgggctgagatgtcaaacggtgcccctcaagagctggaaaagaaaagcatccaccttccagagaagagcgtgccttctgagagaggcctctctcccaacaatagtggccacgactccacggacactgacagcaaccatgaagaacgccagaatcacatctatcagcaaaatcacatggtcctgtctcgggcccgcaatgggatgccacttctgaaggaggttccccgctcttacgaactcctcaagcccccgcccatctgcccaagagactccgtcaaagtgatcaacaaggaaggggaggtgatggatgtgtatcggtgtgaccactgccgcgtcctcttcctggactatgtgatgttcacgattcacatgggctgccacggcttccgtgaccctttcgagtgtaacatgtgtggatatcgaagccatgatcggtatgagttctcgtctcacatagccagaggagaacacagagccctgctgaagtgaatatctggtctcagggattgctcctatgtattcagcatcgtttctaaaaaccaatgacctcgcctaacagattgctctcaaaacatactcagttccaaacttcttttcataccatttttagctgtgttcacaggggtagccagggaaacactgtcttccttcagaaattattcgcaggtctagcatattattacttttgtgaaacctttgttttcccatcagggacttgaattttatggaatttaaaagccaaaaaggtatttggtcattatcttctacagcagtggaatgagtggtcccggagatgtgctatatgaaacattctttctgagatatatcaaccacacgtggaaaagcctttcagtcatacatgcaaatccacaaagaggaagagctgaccagctgaccttgctgggaagcctcacccttctgcccttcacaggctgaagggttaagatctaatctccctaatctaaatgacagtctaagagtaagtaaaagaacag

SEQ ID NO: 2007 - DNA, 1362 bp, Homo sapiens
  source 1..1362: mol_type = genomic DNA
atggaagatatacaaacaaatgcggaactgaaaagcactcaggagcagtctgtgcccgcagaaagtgcagcggttttgaatgactacagtttaaccaaatctcatgaaatggaaaatgtggacagtggagaaggcccagccaatgaagatgaagacataggagatgattcaatgaaagtgaaagatgaatacagtgaaagagatgagaatgttttaaagtcagaacccatgggaaatgcagaagagcctgaaatcccttacagctattcaagagaatataatgaatatgaaaacattaagttggagagacatgttgtctcattcgatagtagcaggccaaccagtggaaagatgaactgcgatgtgtgtggattatcctgcatcagcttcaatgtcttaatggttcataagcgaagccatactgtggagaaaccctacaaatgtgagttttgtggaaggagttacaagcagagaagttcccttgaggagcacaaggagcgctgccgtacatttcttcagagcactgacccaggggacactgcaagtgcggaggcaagacacatcaaagcagagatgggaagtgaaagagctctcgtactggacagattagcaagcaatgtggcaaaacgaaaaagctcaatgcctcagaaattcattggtgagaagcgccactgctttgatgtcaactataattcaagttacatgtatgagaaagagagtgagctcatacagacccgcatgatggaccaagccatcaataacgccatcagctatcttggcgccgaagccctgcgccccttggtccagacaccgcctgctcccacctcggagatggttccagttatcagcagcatgtatcccatagccctcacccgggctgagatgtcaaacggtgcccctcaagagctggaaaagaaaagcatccaccttccagagaagagcgtgccttctgagagaggcctctctcccaacaatagtggccacgactccacggacactgacagcaaccatgaagaacgccagaatcacatctatcagcaaaatcacatggtcctgtctcgggcccgcaatgggatgccacttctgaaggaggttccccgctcttacgaactcctcaagcccccgcccatctgcccaagagactccgtcaaagtgatcaacaaggaaggggaggtgatggatgtgtatcggtgtgaccactgccgcgtcctcttcctggactatgtgatgttcacgattcacatgggctgccacggcttccgtgaccctttcgagtgtaacatgtgtggatatcgaagccatgatcggtatgagttctcgtctcacatagccagaggagaacacagagccctgctgaagtga

SEQ ID NO: 2008 - DNA, 9667 bp, Homo sapiens
  source 1..9667: mol_type = genomic DNA
gcaggagcacgtggagaggccgagtagccacagcggcagctccagcccggcccggcagcgacatggaagatatacaaacaaatgcggaactgaaaagcactcaggagcagtctgtgcccgcagaaagtgcagcggttttgaatgactacagtttaaccaaatctcatgaaatggaaaatgtggacagtggagaaggcccagccaatgaagatgaagacataggagatgattcaatgaaagtgaaagatgaatacagtgaaagagatgagaatgttttaaagtcagaacccatgggaaatgcagaagagcctgaaatcccttacagctattcaagagaatataatgaatatgaaaacattaagttggagagacatgttgtctcattcgatagtagcaggccaaccagtggaaagatgaactgcgatgtgtgtggattatcctgcatcagcttcaatgtcttaatggttcataagcgaagccatactggtgaacgcccattccagtgtaatcagtgtggggcatcttttactcagaaaggtaacctcctccgccacattaaactgcacacaggggaaaaaccttttaagtgtcacctctgcaactatgcatgccaaagaagagatgcgctcacggggcatcttaggacacattctgtggagaaaccctacaaatgtgagttttgtggaaggagttacaagcagagaagttcccttgaggagcacaaggagcgctgccgtacatttcttcagagcactgacccaggggacactgcaagtgcggaggcaagacacatcaaagcagagatgggaagtgaaagagctctcgtactggacagattagcaagcaatgtggcaaaacgaaaaagctcaatgcctcagaaattcattggtgagaagcgccactgctttgatgtcaactataattcaagttacatgtatgagaaagagagtgagctcatacagacccgcatgatggaccaagccatcaataacgccatcagctatcttggcgccgaagccctgcgccccttggtccagacaccgcctgctcccacctcggagatggttccagttatcagcagcatgtatcccatagccctcacccgggctgagatgtcaaacggtgcccctcaagagctggaaaagaaaagcatccaccttccagagaagagcgtgccttctgagagaggcctctctcccaacaatagtggccacgactccacggacactgacagcaaccatgaagaacgccagaatcacatctatcagcaaaatcacatggtcctgtctcgggcccgcaatgggatgccacttctgaaggaggttccccgctcttacgaactcctcaagcccccgcccatctgcccaagagactccgtcaaagtgatcaacaaggaaggggaggtgatggatgtgtatcggtgtgaccactgccgcgtcctcttcctggactatgtgatgttcacgattcacatgggctgccacggcttccgtgaccctttcgagtgtaacatgtgtggatatcgaagccatgatcggtatgagttctcgtctcacatagccagaggagaacacagagccctgctgaagtgaatatctggtctcagggattgctcctatgtattcagcatcgtttctaaaaaccaatgacctcgcctaacagattgctctcaaaacatactcagttccaaacttcttttcataccatttttagctgtgttcacaggggtagccagggaaacactgtcttccttcagaaattattcgcaggtctagcatattattacttttgtgaaacctttgttttcccatcagggacttgaattttatggaatttaaaagccaaaaaggtatttggtcattatcttctacagcagtggaatgagtggtcccggagatgtgctatatgaaacattctttctgagatatatcaaccacacgtggaaaagcctttcagtcatacatgcaaatccacaaagaggaagagctgaccagctgaccttgctgggaagcctcacccttctgcccttcacaggctgaagggttaagatctaatctccctaatctaaatgacagtctaagagtaagtaaaagaacagccataaaataagtatctgttacgagtaactgaagaccccattctccaagcatcagatccatttcctatcacaacatttttaaaaaatgtcatctgatggcacttctgcttctgtcctttaccttcccatctccagtgaaaagctgagctgctttgggctaaaccagttgtctatagaagaaaatctatgccagaagaactcatggttttaaatatagaccatcatcgaaactccagaaatttatccactgtggatgatgacatcgctttcctttggtcaaggttggcagagcaagggtataaagggggaaattgtttggcagcaccaacagaaaacaaacaaacaaaaaacagctacctaaaacttcttgaaagagttcatggagaattggtgatacagacccaaagcaaatttgccaatgatattttccacaaaaaaagtccaaaaagtatggctcagcctccccctccccacaggagaggaattggagatagatggcatgtgtgtttagatcggagttgagctccggaatggggtgaggagggacacctctattgagaggttctccttgatcaggcaggcttcggccctttttttcccatttaaatggaactgctgtattccatgaaaattcctgaaagtctgatcacggttctgcagatgtataagtcatccttgtcactcataatatgtacatactatcaggaggagtgctgttatcatggtaaaattagcactggaataggaggtcacaaaatgctggctaattagctatgtgactttgagaaatcgtttaactttttttttttttttttttttgagacaggatctcactctgttgcccaggctggagtgcagtggtgcaatcatggctcagtgcagcctcgacctccccaggctcaggtgatcctcccacctcagcctcttgagtactgggacaacaagtgcacaccaccatgtctggctacattttgttctttttgtagagataggggtctcactatgttgcccatgctggtcttgaactcctgggctcaagcaatcagcccgcctcagcctcctaaagtgctgggattacaggtgtgagccaccacacccagccttatttaactcttaaaactcagtttccggccaggctcggtggctcacacctgtaatcccaacactttgggaagccgaggcaggcgcatcatttgaggtcaggagttcgagaccagcctgacccacatggtgaaaccctgtctctactaaaaatacaaaaattagctgggcagtagtggcacatgcctgtaatcccagctactccggaggctgaggcagaaaaatcgcttaagcctgggaggttgaggttgcggtgagtggagatcacactactgcactccagtctgggcgacagagtgagaccctgtctcaaacaaaacaaaacaaaaacaaacaaacaaaaacaaaaaaaactcagtttcctcatccataaaataggaattagatttcaatgttctcttaggtcccttctagctttaattcatatgtgattatgcagtaaccacaaggtattttttaaacctcctaatgtatggatattaagcagaagagtatttatatgaatacatgtttcacattcctttggtatgaaaatggtgtgttaagtttttcctttaaccactgagttgtgaatgtgaagaaggtggtggagaggaacaaaaaacagaaaggtattttgatcttgccacaaagcatacacacaaattggcacatgcagctgtttgccaaagccttctttttttttttactttttaagaaattatgttagggaaaataaattctgcttccagggacaacttcatggagcctatttacaaattaagagtcagcttaatttgtaacatttctaccagagccaagaatcccaaattcctggtagattagtgttttatttctaaggggcttatgcattcggctccaactcaactcgtctatgtgctgccagtaattaaaatgttccacctcagactgcacaaatggcttatccttctttgtggcatggcgtctgtctcaggaaaaaaggttttatgaaattccatggcaacagtcccaacatgtttgagacttcagctaaaggaatggatgtattttggtgtgtagtcttcagtatatcactgtatttccgtaatactagactccaagctatgccagattgcttattccctttgtgaaagaggagttgctcattacgttcttgaaatatcgcacatcctgttggttcttcaagggacaagagaaagagaatttggaagcagggattagtagaagagaaaacgagggaaaggaagcctttccaccagattagtgttcaagtctttgcagaggagaccaactttttttgttttcttttgttttgagacagtctctcgctctgttgcccaggctggagtgcagtggcgcgatctcggctcacggcaacctccgcctcccgggttcaagcaattctcctgcctcagcctcccaagtagctgggattacaggtgctcaccaccaagcccggctaatttttgtatttttagtagagacaaggtttcaccatgttggccaggccagtctcaaactcctgacctcaggtgatctgcccgccttggcctcccacagtgctgggattacaggcatgagctaccgcacccagcctgagaccaccttttgcatctcaagattgtgaaaccaaggcccattccaccagcctggggactctttttatagatatgatcctcctttttcctgtgactaatgaatttgctgcatgatttctattcttctgaggttagttttctgagtaaggtgaccactcacaaaggcactttctttgtggcattctgagcctagattggggcccatcaattccagaaaaaatttatgtgtggaaactctgcatccttaagtcttgaagttgaaccagatatgcagtggttaccatcacacagataaacgctgccttctgtacataccccttatgctgtactaattaacaaaccccttgccagggctggggaggtgagggtgaaggagaatcttagcagaagggcagagtcaggacttgcatctgccactgctgggcactgaagccctggagcagcttcagatagtacctgtactttctcatgcagactccctctgaacaagagccttgtaggcccctctccttcatttcccaccagcctcttatcaggcgggctttccaccatacacccaggaggccacggtctgaggaacaaccaaacccatgcaaagggccgggcgcgatagctcacgcctgtaatgccagcactttgggaggctggggcaggcagatcacctgaggttgggagttcgagacctgcctgaccaacatggagaaacccccatctctactaaaaatacaaaattagccgggcgtgatggcacatgcctgtaatcccagctactcaggaggctgaggcaggagaatcgcttgaacccgggaggcggaggttgcggtgagccgagatggcaccactgcactccagcctcggcaacaagagcgaaactctgtctaaaacaaaaacaaacaaacaaacaaaaaaacccaggcaaagtttccttgcagccaaggtgacagaactgggctgagggtggaaaagaaacagaaccagtgctccaggtgttttttaattttttaatttatttttattttttttgtatatgtatatatatgtatgtatattttagaggaccagggtctcactatgttgcctaggccagactcaaactcctgtgctcaagcaatcctgcctcagcctcccaagtagctgggattacaggcatgcacaaacaatgcccagctctccaaatgttttctgtcactacctgaagtgttgcatcggtacttcctacggaaagaaaactaaatagaagtgtctctcccgtgagcccccaccactaccaccagaaaaaaaaaagagagaaaatgaactcatcagtctttagtttcctcaagttattctcccaaaaagacattcgccttggcacagataagccagctaatcttatgctttatgacccactgtgagctgttcctgacacagcttctgactttgtcagtgacaaaatttctcaccttttaaatgcagtgcttaacattttgttaggcccatactcaaaatcggccagatataaaatgacctcagattttgatctcctaggctcaaacaatcctcctacctcagcctcccaagtagctgggactataggcacaccaccatgcacagctaattttttttgtatttttctgcagagatggcgtttcgccatactgcccaggctagtctcaaaatcctgggctcaagcaatctgcccacctcagcctcccaaagtgctggaactacaggcaagagccactgcgcccagccacaacctcagatttctttggcaaacagaaatgtttaaaaacacaaaattttgctcaggtgaaacactgtgttactatcaaatctcacatccacataaagtttttcttttcggctttgtttcgtgaggaacagacagaacaaagtttttccaggtagcatctgtatcactattattctcctatttcctgtaccacccccacctccccaagccctactgaatgtgaggtttagaatgttttaaggagggtcaggtgcggtggctcacgcctgtaatcccagcactttgggaggccaaggcgggcggatcacctgagtttgggagttcgagaccagcctgaccaacatggagaaaccctgtctctactaaaaatacaaaattagccaggcgtggtggcacatgcctgtaatcccagctacttaggaggctgaggcaggagaatcgcttgaacccaggaggaggaggttgtggtgagccgagatcgtgccattgcactccagcctgggtgacagagtgagactccatctcgaaaaaaaaaatacaaaaattagctgggtgtggtggtgcacacctgtaatcccagctactcgggaggctgacgcaggagaattgcttgaacctgggaggtggaggttgcagtgagccgagatcgcgccattgcaatccagcctggacaacagagtgagactccatctcaaaaaaaaaaaaaaaaagaatgttttaaggaaaaaaatagtactgttacatataatcccaggtgataagaccacaatggaaatgtttaagtcctcactttaaagagtaccccactgagaagaggtatgttggactctagcagagatttggaaactctgggacactcaagatgtgaaagagcctggctatctgaggactcaaagagtcagcatcgggacttgtgagctcaagaagagaaaagggagtggtgaaactttgtcctaaaagttagcaccaggaacagaagaaaaaaacccgatatatagtgatacctcatcttttagagaatgggaagctatttttgtgttcacacagaaagtatagttcaaaaaacctctatatccagagttcagacaaggagaatgatttgagatataagtgccgatgaaggaggtcaattttgatctgaaaccagcagctggacctgggccacctcaggaaaaggactctgttctccaaggcagcacgactgaatggttctgagaataagccagggttcaggactcctgaccctttaggaccatggactcagaagagcctgaaggacaattgtgggctttaaacttctgagagcttgtaaagtaacacaagactgtgcctctcccttgccccagctgtagatagtctttgccccaccattgttatgaagatacacagggttttgcagtttgaataaattggatacaagtttcctctttttttttttctttttgagacaaagtctcgctctgtttccccaggctgagtgcagtggcacaatcaaggcttacttgccgcctcaacctcctgggctcaagcaacgagccatcctcccgtcttagcctcccaactagctgagactacaggcgtgggtcaccacacccagctaatttttgtactttttgtagagacagggtctcaccatgttgcccaggctggtcctgaactcctgggctcaagtaatctgcccacctcagcctcccaaagtgttggggttacaggcgtgaggcaccgcggctggcctgagtttcttcttaatactgtatcacaattgtgggctgtcttatgtgttgatatcgattgagctatttgaaataggaatgttaatgggtgtattaaatttttgtaaggatataacaatatctaccttccaaggatgttgtgaggttttccatgattttgtatatgagctaatgttacctttgaggggtggtgtgcattatgttggatgattgtaaattttcagtggaaaatgtaccgtgtcctaaatttaaagacatgaaaaatatcccaagatcatactagatcataatagcaattcctttacaaatgaattatggaggtaactgatctctaacagtttccttcatgttgttttaatgcacaagggcagaggatctgctgacccttggaaccagcgtgagctaaccacgtgctatagacacttcatggtgtcgcacccagggaagtcaaagcgctttgctccctcactgtctgtgagtcctcagccattagtaccccaccccccgctgctccaaaacttgagttatttcaaatgtttctcactgttcatctctccactgaccccactccagaaagcctggagagagtcccaagatgccacccaccttccccaatccctcgccacagatctgtgtctatctcacactctgtaagtgccgctttgcttcttcctctcttgaaaagactgagaacacacattttaacatgttaggaaaatggggcagcctaaaaaatgactgatcccaccgccagtgactcatgtatactccaggctagcagacaaggccctttttggtgggcctgcttctgtgggttcacagaaaccaaattactgtgggttgcaaagaattagcaggtcatttacaaagcagacatcccttcacccagactgtggttttgcatgctcaggttctcagtctatgagctttggtgcaggatcattttggctactggaaaaaccatagcttattttaaatttctggttgccaaagccaccacacgtgtggtctgtggatgaccattgtctgcagaatgacgaggaaggaacagaatgtggtttggggctcagggtggccttcccactgggagggaaggcgggagggagcccttgccctgggttttgacacagcctgtgctcacagcctctcctctcatctgcatttctcagaaatgccctccctgcccagtggtgactttccctcgtcactcctatggagttctacctggagcccagccatgtgtggaactgtgaagtttactcctctgtaaagatggtttaaagaaagtcagcttctgaaatgtaacaatgctaacccttgctggaaccctgtaagaaatagccctgctgatagttttctaggtttatcatgtttgatttttacactgaaaaataaaaaaatcctggtatgtttgaaatta

SEQ ID NO: 2009 - DNA, 1996 bp, Homo sapiens
  source 1..1996: mol_type = genomic DNA
gcaggagcacgtggagaggccgagtagccacagcggcagctccagcccggcccggcagcgacatggaagatatacaaacaaatgcggaactgaaaagcactcaggagcagtctgtgcccgcagatgattcaatgaaagtgaaagatgaatacagtgaaagagatgagaatgttttaaagtcagaacccatgggaaatgcagaagagcctgaaatcccttacagctattcaagagaatataatgaatatgaaaacattaagttggagagacatgttgtctcattcgatagtagcaggccaaccagtggaaagatgaactgcgatgtgtgtggattatcctgcatcagcttcaatgtcttaatggttcataagcgaagccatactggtgaacgcccattccagtgtaatcagtgtggggcatcttttactcagaaaggtaacctcctccgccacattaaactgcacacaggggaaaaaccttttaagtgtcacctctgcaactatgcatgccaaagaagagatgcgctcacggggcatcttaggacacattctgtggagaaaccctacaaatgtgagttttgtggaaggagttacaagcagagaagttcccttgaggagcacaaggagcgctgccgtacatttcttcagagcactgacccaggggacactgcaagtgcggaggcaagacacatcaaagcagagatgggaagtgaaagagctctcgtactggacagattagcaagcaatgtggcaaaacgaaaaagctcaatgcctcagaaattcattggtgagaagcgccactgctttgatgtcaactataattcaagttacatgtatgagaaagagagtgagctcatacagacccgcatgatggaccaagccatcaataacgccatcagctatcttggcgccgaagccctgcgccccttggtccagacaccgcctgctcccacctcggagatggttccagttatcagcagcatgtatcccatagccctcacccgggctgagatgtcaaacggtgcccctcaagagctggaaaagaaaagcatccaccttccagagaagagcgtgccttctgagagaggcctctctcccaacaatagtggccacgactccacggacactgacagcaaccatgaagaacgccagaatcacatctatcagcaaaatcacatggtcctgtctcgggcccgcaatgggatgccacttctgaaggaggttccccgctcttacgaactcctcaagcccccgcccatctgcccaagagactccgtcaaagtgatcaacaaggaaggggaggtgatggatgtgtatcggtgtgaccactgccgcgtcctcttcctggactatgtgatgttcacgattcacatgggctgccacggcttccgtgaccctttcgagtgtaacatgtgtggatatcgaagccatgatcggtatgagttctcgtctcacatagccagaggagaacacagagccctgctgaagtgaatatctggtctcagggattgctcctatgtattcagcatcgtttctaaaaaccaatgacctcgcctaacagattgctctcaaaacatactcagttccaaacttcttttcataccatttttagctgtgttcacaggggtagccagggaaacactgtcttccttcagaaattattcgcaggtctagcatattattacttttgtgaaacctttgttttcccatcagggacttgaattttatggaatttaaaagccaaaaaggtatttggtcattatcttctacagcagtggaatgagtggtcccggagatgtgctatatgaaacattctttctgagatatatcaaccacacgtggaaaagcctttcagtcatacatgcaaatccacaaagaggaagagctgaccagctgaccttgctgggaagcctcacccttctgcccttcacaggctgaagggttaagatctaatctccctaatctaaatgacagtctaagagtaagtaaaagaacag

SEQ ID NO: 2010 - DNA, 1222 bp, Homo sapiens
  source 1..1222: mol_type = genomic DNA
attccacgttcttaactgttccattttccgtatctgcttcgggcttccacctcatttttttcgctttgcccattctgtttcagccagtcgccaagaatcatgaaagtcgccagtggcagcaccgccaccgccgccgcgggccccagctgcgcgctgaaggccggcaagacagcgagcggtgcgggcgaggtggtgcgctgtctgtctgagcagagcgtggccatctcgcgctgcgccgggggcgccggggcgcgcctgcctgccctgctggacgagcagcaggtaaacgtgctgctctacgacatgaacggctgttactcacgcctcaaggagctggtgcccaccctgccccagaaccgcaaggtgagcaaggtggagattctccagcacgtcatcgactacatcagggaccttcagttggagctgaactcggaatccgaagttggaacccccgggggccgagggctgccggtccgggctccgctcagcaccctcaacggcgagatcagcgccctgacggccgaggtgagatccagatccgaccactagatcatccttataccgacggggaaacggaggccagagagggcgtgggcgcttgcaccacttccgtcccatccttgcgggtacctggctatgcgggggtgcctaaggagcctggaaaaagcgctcccccgtcgtgcttcctggggaagggggcgttcgctgcgctcggagcggcgtcccttccaacccgccggtctcatttcttctcgttttcacaggcggcatgcgttcctgcggacgatcgcatcttgtgtcgctgaagcgcctcccccagggaccggcggaccccagccatccagggggcaagaggaattacgtgctctgtgggtctcccccaacgcgcctcgccggatctgagggagaacaagaccgatcggcggccactgcgcccttaactgcatccagcctggggctgaggctgaggcactggcgaggagagggcgctcctctctgcacacctactagtcaccagagactttagggggtgggattccactcgtgtgtttctattttttgaaaagcagacattttaaaaaatggtcacgtttggtgcttctcagatttctgaggaaattgctttgtattgtatattacaatgatcaccgactgaaaatattgttttacaatagttctgtggggctgtttttttgttattaaacaaataatttagatggtg

SEQ ID NO: 2011 - DNA, 994 bp, Homo sapiens
  source 1..994: mol_type = genomic DNA
actctcattccacgttcttaactgttccattttccgtatctgcttcgggcttccacctcatttttttcgctttgcccattctgtttcagccagtcgccaagaatcatgaaagtcgccagtggcagcaccgccaccgccgccgcgggccccagctgcgcgctgaaggccggcaagacagcgagcggtgcgggcgaggtggtgcgctgtctgtctgagcagagcgtggccatctcgcgctgcgccgggggcgccggggcgcgcctgcctgccctgctggacgagcagcaggtaaacgtgctgctctacgacatgaacggctgttactcacgcctcaaggagctggtgcccaccctgccccagaaccgcaaggtgagcaaggtggagattctccagcacgtcatcgactacatcagggaccttcagttggagctgaactcggaatccgaagttggaacccccgggggccgagggctgccggtccgggctccgctcagcaccctcaacggcgagatcagcgccctgacggccgaggcggcatgcgttcctgcggacgatcgcatcttgtgtcgctgaagcgcctcccccagggaccggcggaccccagccatccagggggcaagaggaattacgtgctctgtgggtctcccccaacgcgcctcgccggatctgagggagaacaagaccgatcggcggccactgcgcccttaactgcatccagcctggggctgaggctgaggcactggcgaggagagggcgctcctctctgcacacctactagtcaccagagactttagggggtgggattccactcgtgtgtttctattttttgaaaagcagacattttaaaaaatggtcacgtttggtgcttctcagatttctgaggaaattgctttgtattgtatattacaatgatcaccgactgaaaatattgttttacaatagttctgtggggctgtttttttgttattaaacaaataatttagatggtggtaaa

SEQ ID NO: 2012 - DNA, 1348 bp, Homo sapiens
  source 1..1348: mol_type = genomic DNA
acttccggggcggatcggaagttgctttgttttgcttcgagatggctgcggggatgtatttggaacattatctggacagtattgaaaaccttccctttgaattacagagaaactttcagctcatgagggacctagaccaaagaacagaggacctgaaggctgaaattgacaagttggccactgagtatatgagtagtgcccgcagcctgagctccgaggaaaaattggcccttctcaaacagatccaggaagcctatggcaagtgcaaggaatttggtgacgacaaggtgcagcttgccatgcagacctatgagatggtggacaaacacattcggcggctggacacagacctggcccgttttgaggctgatctcaaggagaaacagattgagtcaagtgactatgacagctcttccagcaaaggccggactcaaaaggagaagaaagctgctcgtgctcgttccaaagggaaaaactcggatgaagaagcccccaagactgcccagaagaagttaaagctcgtgcgcacaagtcctgagtatgggatgccctcagtgacctttggcagtgtccacccctctgatgtgttggatatgcctgtggatcccaacgaacccacctattgcctttgtcaccaggtctcctatggagagatgattggctgtgacaaccctgattgttccattgagtggttccattttgcctgtgtggggctgacaaccaagcctcgggggaaatggttttgcccacgctgctcccaagaacggaagaagaaatagataagggccttggattccaacacagtttcttccacatcccctgacttgggctagtgggcagaggaatgcctgtgctggggccaggggttcagggaggagtggatggcacagtgctgtcatcccttctcctcccctctccccactcccggtgctgaggctgcatcagaccctggtagggaggggtgccgcagccactaacggtatgtgctctccttcagccctctcccttcggagggacgtggtcttgcccactgtccttttgcctccatgctgaggtcggtgctgtatttcagagggagggtccttttcattctccttgctttgtatttaaggactggggcatagcatgggggcagtcccccagacctcttcattccccctcctgtggtgagggctaggtgtgatcaacacttttcttctccattcccttcctgcttttttcatggtgggggatccaccaggtcatctaggctctggccctagttgaaggggcaccccttcctctgtgccaagaggattcatcctgggagagggggcaaggtggaatgcagataactcacatgtaaaag

SEQ ID NO: 2013 - DNA, 2854 bp, Homo sapiens
  source 1..2854: mol_type = genomic DNA
gcgagttgcggtagttgctgtgtaccatggtctcggaggtttctgtcccgcggcccgttaggtcctggtcgggttttcagcgaagcaggccgctcccctgcgtttcccagcgggcgtgctgtgccgcccaacaggctctgcctccaagtgccaaaaactcctagtaaagtttgcgcctcgcccgccgtccacaccccagcggccctgacgctgtcccctccgcgaccctcgcctctggaaaaagtgacaggcaaggccacgcccccgcgagggccggcctggagcccgcagcccccagggcctgggacggtgaggggcgtgaatgcggcggggggcggggccgttgccgggggagggggccggggcgcatgcgcgctgcgcagcggggctgaatgtttcccaagtgtttgaaactggtatttgggttttccacgttggacaagtgcggctcggcggccagcggagcgcgccccttcccgctgcccgctccgctcctctcttctacccagcccagtgggcgagtgggcagcggcggccgcggcgctgggccctctcccgccggtgtgtgcgcgctcgtacgcgcggcccccggcgccagccccgccgcctgagagggggcctgcgccgccggccggggcgtgcgcccgggagccaccgccaccgcggcccgcgccctcaggcgctggggtccccgcggacccggaggcggcggacgggctcggcagatgtagccgccgggccgaagcaggagccggcgggggggcgccgggagagcgagggctttgcattttgcagtgctattttttgaggggggcggggggtggaggaagcggaaagccgcgccgagtcgccggggacctccggggtgaaccatgttgagtcctgccaacggggagcagctccacctggtgaactatgtggaggactacctggactccatcgagtccctgcctttcgacttgcagagaaatgtctcgctgatgcgggagatcgacgcgaaataccaagagatcctgaaggagctagacgagtgctacgagcgcttcagtcgcgagacagacggggcgcagaagcggcggatgctgcactgtgtgcagcgcgcgctgatccgcagccaggagctgggcgacgagaagatccagatcgtgagccagatggtggagctggtggagaaccgcacgcggcaggtggacagccacgtggagctgttcgaggcgcagcaggagctgggcgacacagcgggcaacagcggcaaggctggcgcggacaggcccaaaggcgaggcggcagcgcaggctgacaagcccaacagcaagcgctcacggcggcagcgcaacaacgagaaccgtgagaacgcgtccagcaaccacgaccacgacgacggcgcctcgggcacacccaaggagaagaaggccaagacctccaagaagaagaagcgctccaaggccaaggcggagcgagaggcgtcccctgccgacctccccatcgaccccaacgaacccacgtactgtctgtgcaaccaggtctcctatggggagatgatcggctgcgacaacgacgagtgccccatcgagtggttccacttctcgtgcgtggggctcaatcataaacccaagggcaagtggtactgtcccaagtgccggggggagaacgagaagaccatggacaaagccctggagaaatccaaaaaagagagggcttacaacaggtagtttgtggacaggcgcctggtgtgaggaggacaaaataaaccgtgtatttattacattgctgcctttgttgaggtgcaaggagtgtaaaatgtatatttttaaagaatgttagtaaaggaaccattcctttcatagggatggcagtgattctgtttgccttttgttttcattggtacacgtgtaacaagaaagtggtctgtggatcagcattttagaaactacaaatataggtttgattcaacacttaagtctcagactgatttcttgcgggaggagggggactaaactcaacctaacacattaaatgtggaaggaaaatatttcatttagcttttttattttaatacaagtaatattattactttatgaacaattttttttaattggccatgtcgccaaaaatacagcctatagtaaatgtgtttcttgctgccatgatgtatatccatataacaattcagtaacaaaggtttaaagtttgaagattattttttaaaaaggtaaatggttaaattttacatgacagatattttatctattggcctgttccccaaatggccattttaaaatgcttgggtacacttctcttaagtggtctagtcaaggaacctcaagtcatgcttttgctatcaccaatcatagtgtacccatctttaatttatatcaggtgtataaatgtacatttccaaatgaacttgcacttgttatattataattggaagtgcagtcagcagatgctgttgtgaagctaatgtcacaattatgtgcaaaggtgtgcttcctgctgtatgtgagctgtaaaaatgttacgtgaagaaataaatgaaacttggccagtttgttcctctagtagtatatttaattttgacataagtaacttttaaaatttgtcttaaaaatttatacaccagcaatttagacaaagccttaagcaaattttgtattattgttctcacttattattaataatgaagtagaagttacttaattgccagcaaataaatacgtgtcaaaaaagaatctgtattcagaccctgggtcaggaaattactgcccacttgtcaagttcagcccaccatctgtttgaagattatatgaagtttaaattctagtgtccataaataaagtttcagcggaacaca

SEQ ID NO: 2014 - DNA, 1189 bp, Homo sapiens
  source 1..1189: mol_type = genomic DNA
cctccgagaacggtgtccatgacacagggcgggaagagataaggcctagggaaggcgcccctcgggcctatccacctcttctggggctcggcactaggaagcagcttccctctcaggcccctttgtctccaagccgttccaaactgagtaccgggagacgacacaaagggagggcggtgacggatggcgcaggcgcgggagccgcctaggctgctgggagtggtggtccggccgcggaatggagatcctgaaggagctagacgagtgctacgagcgcttcagtcgcgagacagacggggcgcagaagcggcggatgctgcactgtgtgcagcgcgcgctgatccgcagccaggagctgggcgacgagaagatccagatcgtgagccagatggtggagctggtggagaaccgcacgcggcaggtggacagccacgtggagctgttcgaggcgcagcaggagctgggcgacacagcgggcaacagcggcaaggctggcgcggacaggcccaaaggcgaggcggcagcgcaggctgacaagcccaacagcaagcgctcacggcggcagcgcaacaacgagaaccgtgagaacgcgtccagcaaccacgaccacgacgacggcgcctcgggcacacccaaggagaagaaggccaagacctccaagaagaagaagcgctccaaggccaaggcggagcgagaggcgtcccctgccgacctccccatcgaccccaacgaacccacgtactgtctgtgcaaccaggtctcctatggggagatgatcggctgcgacaacgacgagtgccccatcgagtggttccacttctcgtgcgtggggctcaatcataaacccaagggcaagtggtactgtcccaagtgccggggggagaacgagaagaccatggacaaagccctggagaaatccaaaaaagagagggcttacaacaggtagtttgtggacaggcgcctggtgtgaggaggacaaaataaaccgtgtatttattacattgctgcctttgttgaggtgcaaggagtgtaaaatgtatatttttaaagaatgttagtaaaggaaccattcctttcatagggatggcagtgattctgtttgccttttgttttcattggtacacgtgtaacaagaaagtggtctgtggatcagcattttagaaactacaaatataggtttgattcaaca

SEQ ID NO: 2015 - DNA, 2870 bp, Homo sapiens
  source 1..2870: mol_type = genomic DNA
agcggaggcggggaaggcgcccatctgcgctgcgctcgggggggcgcgggcagatcgctggcttggagaggactgtggcaggtgagaggacctgtgcgtcgttctctgcagacctggccgccccgggtgtcagagagaggtggcgagttcgtgtccgccgggaattgttggctgttggggaaactttcctgcgaggtcagtcaaggctttgggggctctgttttgaatgtggatcaccactcggagtttactaatgtttacaaggctgcgcagtagggaaacggaagagttgggtgggggcaaaaaaaaaaattgaccgctatccccgaaagtactagacgcctctgccgggaaggcgcccctgcgcgttctatccgagacgtagcttcgcagcgaattttataggaacttcattagcatattatggaacgtcccgcctcagccccccagtagttggctgtgatgtccttcgtggaatgtccttatcattcccctgcggaacgattggtcgctgaggcggatgaaggcgggcctagcgcaataactggtatgggtctgtgtttccgctgtcttcttttttctttttcggggaggagcggggtggagggtggacgagttgatttgaacgtcttcgggtcgctcggcctccagccttggattggttcttctcgctgctggggcgggccgtgctcttccgccctgcggtgtggttggttctcctcctggcctccgccctccaaatcggcgattcccataggcggcggctctcggggtgcggggcgagtctcccgctggcctcctccccattggctggaggcctggcgggtgtcgcccctgcccctctccccgctcagcccggccactttcgggcgcggatttatagcagtagcagtgatcccgggcctgtgggctcggggccggggctgcagttcggaccgcctcccgcgacccgcggggccggctcggagacagtttcaggccgcatctctgctgacccgagggtggggccgcgcgtggccgtggaaacagatcctgaaggagctagacgagtgctacgagcgcttcagtcgcgagacagacggggcgcagaagcggcggatgctgcactgtgtgcagcgcgcgctgatccgcagccaggagctgggcgacgagaagatccagatcgtgagccagatggtggagctggtggagaaccgcacgcggcaggtggacagccacgtggagctgttcgaggcgcagcaggagctgggcgacacagcgggcaacagcggcaaggctggcgcggacaggcccaaaggcgaggcggcagcgcaggctgacaagcccaacagcaagcgctcacggcggcagcgcaacaacgagaaccgtgagaacgcgtccagcaaccacgaccacgacgacggcgcctcgggcacacccaaggagaagaaggccaagacctccaagaagaagaagcgctccaaggccaaggcggagcgagaggcgtcccctgccgacctccccatcgaccccaacgaacccacgtactgtctgtgcaaccaggtctcctatggggagatgatcggctgcgacaacgacgagtgccccatcgagtggttccacttctcgtgcgtggggctcaatcataaacccaagggcaagtggtactgtcccaagtgccggggggagaacgagaagaccatggacaaagccctggagaaatccaaaaaagagagggcttacaacaggtagtttgtggacaggcgcctggtgtgaggaggacaaaataaaccgtgtatttattacattgctgcctttgttgaggtgcaaggagtgtaaaatgtatatttttaaagaatgttagtaaaggaaccattcctttcatagggatggcagtgattctgtttgccttttgttttcattggtacacgtgtaacaagaaagtggtctgtggatcagcattttagaaactacaaatataggtttgattcaacacttaagtctcagactgatttcttgcgggaggagggggactaaactcaacctaacacattaaatgtggaaggaaaatatttcatttagcttttttattttaatacaagtaatattattactttatgaacaattttttttaattggccatgtcgccaaaaatacagcctatagtaaatgtgtttcttgctgccatgatgtatatccatataacaattcagtaacaaaggtttaaagtttgaagattattttttaaaaaggtaaatggttaaattttacatgacagatattttatctattggcctgttccccaaatggccattttaaaatgcttgggtacacttctcttaagtggtctagtcaaggaacctcaagtcatgcttttgctatcaccaatcatagtgtacccatctttaatttatatcaggtgtataaatgtacatttccaaatgaacttgcacttgttatattataattggaagtgcagtcagcagatgctgttgtgaagctaatgtcacaattatgtgcaaaggtgtgcttcctgctgtatgtgagctgtaaaaatgttacgtgaagaaataaatgaaacttggccagtttgttcctctagtagtatatttaattttgacataagtaacttttaaaatttgtcttaaaaatttatacaccagcaatttagacaaagccttaagcaaattttgtattattgttctcacttattattaataatgaagtagaagttacttaattgccagcaaataaatacgtgtcaaaaaagaatctgtattcagaccctgggtcaggaaattactgcccacttgtcaagttcagcccaccatctgtttgaagattatatgaagtttaaattctagtgtccataaataaagtttcagcggaac

SEQ ID NO: 2016 - DNA, 1074 bp, Homo sapiens
  source 1..1074: mol_type = genomic DNA
cgccgtccacaccccagcggccctgacgctgtcccctccgcgaccctcgcctctggaaaaagtgacaggcaaggccacgcccccgcgagggccggcctggagcccgcagcccccagggcctgggacgagatcctgaaggagctagacgagtgctacgagcgcttcagtcgcgagacagacggggcgcagaagcggcggatgctgcactgtgtgcagcgcgcgctgatccgcagccaggagctgggcgacgagaagatccagatcgtgagccagatggtggagctggtggagaaccgcacgcggcaggtggacagccacgtggagctgttcgaggcgcagcaggagctgggcgacacagcgggcaacagcggcaaggctggcgcggacaggcccaaaggcgaggcggcagcgcaggctgacaagcccaacagcaagcgctcacggcggcagcgcaacaacgagaaccgtgagaacgcgtccagcaaccacgaccacgacgacggcgcctcgggcacacccaaggagaagaaggccaagacctccaagaagaagaagcgctccaaggccaaggcggagcgagaggcgtcccctgccgacctccccatcgaccccaacgaacccacgtactgtctgtgcaaccaggtctcctatggggagatgatcggctgcgacaacgacgagtgccccatcgagtggttccacttctcgtgcgtggggctcaatcataaacccaagggcaagtggtactgtcccaagtgccggggggagaacgagaagaccatggacaaagccctggagaaatccaaaaaagagagggcttacaacaggtagtttgtggacaggcgcctggtgtgaggaggacaaaataaaccgtgtatttattacattgctgcctttgttgaggtgcaaggagtgtaaaatgtatatttttaaagaatgttagtaaaggaaccattcctttcatagggatggcagtgattctgtttgccttttgttttcattggtacacgtgtaacaagaaagtggtctgtggatcagcattttagaaactacaaatataggtttgattcaaca

SEQ ID NO: 2017 - DNA, 1709 bp, Homo sapiens
  source 1..1709: mol_type = genomic DNA
acagtcacttccggggcggatcggaagttgctttgttttgcttcgagatggctgcggggatgtatttggaacattatctggacagtattgaaaaccttccctttgaattacagagaaactttcagctcatgagggacctagaccaaagaacagaggacctgaaggctgaaattgacaagttggccactgagtatatgagtagtgcccgcagcctgagctccgaggaaaaattggcccttctcaaacagatccaggaagcctatggcaagtgcaaggaatttggtgacgacaaggtgcagcttgccatgcagacctatgagatggtggacaaacacattcggcggctggacacagacctggcccgttttgaggctgatctcaaggagaaacagattgagtcaagtgactatgacagctcttccagcaaaggcaaaaagagccggactcaaaaggagaagaaagctgctcgtgctcgttccaaagggaaaaactcggatgaagaagcccccaagactgcccagaagaagttaaagctcgtgcgcacaagtcctgagtatgggatgccctcagtgacctttggcagtgtccacccctctgatgtgttggatatgcctgtggatcccaacgaacccacctattgcctttgtcaccaggtctcctatggagagatgattggctgtgacaaccctgattgttccattgagtggttccattttgcctgtgtggggctgacaaccaagcctcgggggaaatggttttgcccacgctgctcccaagaacggaagaagaaatagataagggccttggattccaacacagtttcttccacatcccctgacttgggctagtgggcagaggaatgcctgtgctggggccaggggttcagggaggagtggatggcacagtgctgtcatcccttctcctcccctctccccactcccggtgctgaggctgcatcagaccctggtagggaggggtgccgcagccactaacggtatgtgctctccttcagccctctcccttcggagggacgtggtcttgcccactgtccttttgcctccatgctgaggtcggtgctgtatttcagagggagggtccttttcattctccttgctttgtatttaaggactggggcatagcatgggggcagtcccccagacctcttcattccccctcctgtggtgagggctaggtgtgatcaacacttttcttctccattcccttcctgcttttttcatggtgggggatccaccaggtcatctaggctctggccctagttgaaggggcaccccttcctctgtgccaagaggattcatcctgggagagggggcaaggtggaatgcagataactcacatgtaaaaggaacttgggtaggtaaataaaagctatacatgttggcctgctgtgtttattgtagagacactgttttagtaaacatgctgagcattcattttgcgtcctctgggttggatgcaatgtgagaggatggcatgccagaattaggacacgacatgaaaccagagtggtgcctctgtccgagaacttgtaagttctcaacttgggaaagacagaggtgctggagggtaggcctcagaccagggggtctccaaaactttgtaaatcatgcatcttttctccataaaacatctttcacttaatttccaataaatgatgtatttgtgctatacatacgtactgctatactata

SEQ ID NO: 2018 - DNA, 1393 bp, Homo sapiens
  source 1..1393: mol_type = genomic DNA
ttccggggcggatcggaagttgctttgttttgcttcgagatggctgcggggatgtatttggaacattatctggacagtattgaaaaccttccctttgaattacagagaaactttcagctcatgagggacctagaccaaagaacagaggacctgaaggctgaaattgacaagttggccactgagtatatgagtagtgcccgcagcctgagctccgaggaaaaattggcccttctcaaacagatccaggaagcctatggcaagtgcaaggaatttggtgacgacaaggtgcagcttgccatgcagacctatgagatggtggacaaacacattcggcggctggacacagacctggcccgttttgaggctgatctcaaggagaaacagattgagtcaagtgactatgacagctcttccagcaaaggcaaaaagaaaggccggactcaaaaggagaagaaagctgctcgtgctcgttccaaagggaaaaactcggatgaagaagcccccaagactgcccagaagaagttaaagctcgtgcgcacaagtcctgagtatgggatgccctcagtgacctttggcagtgtccacccctctgatgtgttggatatgcctgtggatcccaacgaacccacctattgcctttgtcaccaggtctcctatggagagatgattggctgtgacaaccctgattgttccattgagtggttccattttgcctgtgtggggctgacaaccaagcctcgggggaaatggttttgcccacgctgctcccaagaacggaagaagaaatagataagggccttggattccaacacagtttcttccacatcccctgacttgggctagtgggcagaggaatgcctgtgctggggccaggggttcagggaggagtggatggcacagtgctgtcatcccttctcctcccctctccccactcccggtgctgaggctgcatcagaccctggtagggaggggtgccgcagccactaacggtatgtgctctccttcagccctctcccttcggagggacgtggtcttgcccactgtccttttgcctccatgctgaggtcggtgctgtatttcagagggagggtccttttcattctccttgctttgtatttaaggactggggcatagcatgggggcagtcccccagacctcttcattccccctcctgtggtgagggctaggtgtgatcaacacttttcttctccattcccttcctgcttttttcatggtgggggatccaccaggtcatctaggctctggccctagttgaaggggcaccccttcctctgtgccaagaggattcatcctgggagagggggcaaggtggaatgcagataactcacatgtaaaaggaacttgggtaggtaaataaaagctatacatgttg

SEQ ID NO: 2019 - DNA, 741 bp, Homo sapiens
  source 1..741: mol_type = genomic DNA
atggctgcggggatgtatttggaacattatctggacagtattgaaaaccttccctttgaattacagagaaactttcagctcatgagggacctagaccaaagaacagaggacctgaaggctgaaattgacaagttggccactgagtatatgagtagtgcccgcagcctgagctccgaggaaaaattggcccttctcaaacagatccaggaagcctatggcaagtgcaaggaatttggtgacgacaaggtgcagcttgccatgcagacctatgagatggtggacaaacacattcggcggctggacacagacctggcccgttttgaggctgatctcaaggagaaacagattgagtcaagtgactatgacagctcttccagcaaagaaggccggactcaaaaggagaagaaagctgctcgtgctcgttccaaagggaaaaactcggatgaagaagcccccaagactgcccagaagaagttaaagctcgtgcgcacaagtcctgagtatgggatgccctcagtgacctttggcagtgtccacccctctgatgtgttggatatgcctgtggatcccaacgaacccacctattgcctttgtcaccaggtctcctatggagagatgattggctgtgacaaccctgattgttccattgagtggttccattttgcctgtgtggggctgacaaccaagcctcgggggaaatggttttgcccacgctgctcccaagaacggaagaagaaatag

SEQ ID NO: 2020 - DNA, 602 bp, Homo sapiens
  source 1..602: mol_type = genomic DNA
atggctgcggggatgtatttggaacattatctggacagtattgaaaaccttccctttgaattacagagaaactttcagctcatgagggacctagaccaaagaacagaggacctgaaggctgaaattgacaagttggccactgagtatatgagtagtgcccgcagcctgagctccgaggaaaaattggcccttctcaaacagatccaggaagcctatggcaagtgcaaggaatttggtgacgacaaggtgcagcttgccatgcagacctatgagatggtggacaaacacattcggcggctggacacagacctggcccgttttgaggctgatctcaaggagaaacagattgagtcaagtgactatgacagctcttccagcaaaggcaaaaagaaaggccggactcaaaaggagaagaaagctgctcgtgctcgttccaaagggaaaaactcggatgaagaagcccccaagactgcccagaagaagttaaagctcgtgcgcactgttccattgagtggttccattttgcctgtgtggggctgacaaccaagcctcgggggaaatggttttgcccacgctgctcccaagaacggaagaagaaatag

SEQ ID NO: 2021 - DNA, 678 bp, Homo sapiens
  source 1..678: mol_type = genomic DNA
atggctgcggggatgtatttggaacattatctggacaacctgaaggctgaaattgacaagttggccactgagtatatgagtagtgcccgcagcctgagctccgaggaaaaattggcccttctcaaacagatccaggaagcctatggcaagtgcaaggaatttggtgacgacaaggtgcagcttgccatgcagacctatgagatggtggacaaacacattcggcggctggacacagacctggcccgttttgaggctgatctcaaggagaaacagattgagtcaagtgactatgacagctcttccagcaaaggcaaaaagaaaggccggactcaaaaggagaagaaagctgctcgtgctcgttccaaagggaaaaactcggatgaagaagcccccaagactgcccagaagaagttaaagctcgtgcgcacaagtcctgagtatgggatgccctcagtgacctttggcagtgtccacccctctgatgtgttggatatgcctgtggatcccaacgaacccacctattgcctttgtcaccaggtctcctatggagagatgattggctgtgacaaccctgattgttccattgagtggttccattttgcctgtgtggggctgacaaccaagcctcgggggaaatggttttgcccacgctgctcccaagaacggaagaagaaatag

SEQ ID NO: 2022 - DNA, 5981 bp, Homo sapiens
  source 1..5981: mol_type = genomic DNA
cggcggcgcggtcggagggggccggcgcgcagagccagacgccgccgcttgttttggttggggctctcggcaactctccgaggaggaggaggaggagggaggaggggagaagtaactgcagcggcagcgcctcccgaggaacaggcgtcttccccgaacccttcccaaacctcccccatcccctctcgcccttgtcccctcccctcctccccagccgcctggagcgaggggcagggatgagtctgtccctccggccggtccccagctgcagtggctgcccggtatcgtttcgcatggaaaagccactttctccacccgccgagatgggcccggatgggggctgcagaggacgcgcccgcgggcggcggcagcagcagcagcagcagcagcagcaacagcaacagccgcagcgccgcggtctctgcgactgagctggtatttgggcggctggtggcggctgggacggttggggggtgggaggaggcgaaggaggagggagaaccccgtgcaacgttgggacttggcaacccgcctccccctgcccaaggatatttaatttgcctcgggaatcgctgcttccagaggggaactcaggagggaaggcgcgcgcgcgcgcgcgctcctggaggggcaccgcagggacccccgactgtcgcctccctgtgccggactccagccggggcgacgagagatgcatcttcgctccttcctggtggcggcggcggctgagaggagacttggctctcggaggatcggggctgccctcaccccggacgcactgcctccccgccgggcgtgaagcgcccgaaaactccggtcgggctctctcctgggctcagcagctgcgtcctccttcagctgcccctccccggcgcggggggcggcgtggatttcagagtcggggtttctgctgcctccagccctgtttgcatgtgccgggccgcggcgaggagcctccgccccccacccggttgtttttcggagcctccctctgctcagcgttggtggtggcggtggcagcatggcgagccctccggagagcgatggcttctcggacgtgcgcaaggtgggctacctgcgcaaacccaagagcatgcacaaacgcttcttcgtactgcgcgcggccagcgaggctgggggcccggcgcgcctcgagtactacgagaacgagaagaagtggcggcacaagtcgagcgcccccaaacgctcgatcccccttgagagctgcttcaacatcaacaagcgggctgactccaagaacaagcacctggtggctctctacacccgggacgagcactttgccatcgcggcggacagcgaggccgagcaagacagctggtaccaggctctcctacagctgcacaaccgtgctaagggccaccacgacggagctgcggccctcggggcgggaggtggtgggggcagctgcagcggcagctccggccttggtgaggctggggaggacttgagctacggtgacgtgcccccaggacccgcattcaaagaggtctggcaagtgatcctgaagcccaagggcctgggtcagacaaagaacctgattggtatctaccgcctttgcctgaccagcaagaccatcagcttcgtgaagctgaactcggaggcagcggccgtggtgctgcagctgatgaacatcaggcgctgtggccactcggaaaacttcttcttcatcgaggtgggccgttctgccgtgacggggcccggggagttctggatgcaggtggatgactctgtggtggcccagaacatgcacgagaccatcctggaggccatgcgggccatgagtgatgagttccgccctcgcagcaagagccagtcctcgtccaactgctctaaccccatcagcgtccccctgcgccggcaccatctcaacaatcccccgcccagccaggtggggctgacccgccgatcacgcactgagagcatcaccgccacctccccggccagcatggtgggcgggaagccaggctccttccgtgtccgcgcctccagtgacggcgaaggcaccatgtcccgcccagcctcggtggacggcagccctgtgagtcccagcaccaacagaacccacgcccaccggcatcggggcagcgcccggctgcaccccccgctcaaccacagccgctccatccccatgccggcttcccgctgctcgccttcggccaccagcccggtcagtctgtcgtccagtagcaccagtggccatggctccacctcggattgtctcttcccacggcgatctagtgcttcggtgtctggttcccccagcgatggcggtttcatctcctcggatgagtatggctccagtccctgcgatttccggagttccttccgcagtgtcactccggattccctgggccacaccccaccagcccgcggtgaggaggagctaagcaactatatctgcatgggtggcaaggggccctccaccctgaccgcccccaacggtcactacattttgtctcggggtggcaatggccaccgctgcaccccaggaacaggcttgggcacgagtccagccttggctggggatgaagcagccagtgctgcagatctggataatcggttccgaaagagaactcactcggcaggcacatcccctaccattacccaccagaagaccccgtcccagtcctcagtggcttccattgaggagtacacagagatgatgcctgcctacccaccaggaggtggcagtggaggccgactgccgggacacaggcactccgccttcgtgcccacccgctcctacccagaggagggtctggaaatgcaccccttggagcgtcggggggggcaccaccgcccagacagctccaccctccacacggatgatggctacatgcccatgtccccaggggtggccccagtgcccagtggccgaaagggcagtggagactatatgcccatgagccccaagagcgtatctgccccacagcagatcatcaatcccatcagacgccatccccagagagtggaccccaatggctacatgatgatgtcccccagcggtggctgctctcctgacattggaggtggccccagcagcagcagcagcagcagcaacgccgtcccttccgggaccagctatggaaagctgtggacaaacggggtagggggccaccactctcatgtcttgcctcaccccaaacccccagtggagagcagcggtggtaagctcttaccttgcacaggtgactacatgaacatgtcaccagtgggggactccaacaccagcagcccctccgactgctactacggccctgaggacccccagcacaagccagtcctctcctactactcattgccaagatcctttaagcacacccagcgccccggggagccggaggagggtgcccggcatcagcacctccgcctttccactagctctggtcgccttctctatgctgcaacagcagatgattcttcctcttccaccagcagcgacagcctgggtgggggatactgcggggctaggctggagcccagccttccacatccccaccatcaggttctgcagccccatctgcctcgaaaggtggacacagctgctcagaccaatagccgcctggcccggcccacgaggctgtccctgggggatcccaaggccagcaccttacctcgggcccgagagcagcagcagcagcagcagcccttgctgcaccctccagagcccaagagcccgggggaatatgtcaatattgaatttgggagtgatcagtctggctacttgtctggcccggtggctttccacagctcaccttctgtcaggtgtccatcccagctccagccagctcccagagaggaagagactggcactgaggagtacatgaagatggacctggggccgggccggagggcagcctggcaggagagcactggggtcgagatgggcagactgggccctgcacctcccggggctgctagcatttgcaggcctacccgggcagtgcccagcagccggggtgactacatgaccatgcagatgagttgtccccgtcagagctacgtggacacctcgccagctgcccctgtaagctatgctgacatgcgaacaggcattgctgcagaggaggtgagcctgcccagggccaccatggctgctgcctcctcatcctcagcagcctctgcttccccgactgggcctcaaggggcagcagagctggctgcccactcgtccctgctggggggcccacaaggacctgggggcatgagcgccttcacccgggtgaacctcagtcctaaccgcaaccagagtgccaaagtgatccgtgcagacccacaagggtgccggcggaggcatagctccgagactttctcctcaacacccagtgccacccgggtgggcaacacagtgccctttggagcgggggcagcagtagggggcggtggcggtagcagcagcagcagcgaggatgtgaaacgccacagctctgcttcctttgagaatgtgtggctgaggcctggggagcttgggggagcccccaaggagccagccaaactgtgtggggctgctgggggtttggagaatggtcttaactacatagacctggatttggtcaaggacttcaaacagtgccctcaggagtgcacccctgaaccgcagcctcccccacccccaccccctcatcaacccctgggcagcggtgagagcagctccacccgccgctcaagtgaggatttaagcgcctatgccagcatcagtttccagaagcagccagaggaccgtcagtagctcaactggacatcacagcagaatgaagacctaaatgacctcagcaaatcctcttctaactcatgggtacccagactctaaatatttcatgattcacaactaggacctcatatcttcctcatcagtagatggtacgatgcatccatttcagtttgtttactttatccaatcctcaggatttcattgactgaactgcacgttctatattgtgccaagcgaaaaaaaaaaatgcactgtgacaccagaataatgagtctgcataaacttcatcttcaaccttaaggacttagctggccacagtgagctgatgtgcccaccaccgtgtcatgagagaatgggtttactctcaatgcattttcaagatacatttcatctgctgctgaaactgtgtacgacaaagcatcattgtaaattatttcatacaaaactgttcacgttgggtggagagagtattaaatatttaacataggttttgatttatatgtgtaattttttaaatgaaaatgtaacttttcttacagcacatcttttttttggatgtgggatggaggtatacaatgttctgttgtaaagagtggagcaaatgcttaaaacaaggcttaaaagagtagaatagggtatgatccttgttttaagattgtaattcagaaaacataatataagaatcatagtgccatagatggttctcaattgtatagttatatttgctgatactatctcttgtcatataaacctgatgttgagctgagttccttataagaattaatcttaattttgtattttttcctgtaagacaataggccatgttaattaaactgaagaaggatatatttggctgggtgttttcaaatgtcagcttaaaattggtaattgaatggaagcaaaattataagaagaggaaattaaagtcttccattgcatgtattgtaaacagaaggagatgggtgattccttcaattcaaaagctctctttggaatgaacaatgtgggcgtttgtaaattctggaaatgtctttctattcataataaactagatactgttgatcttttcttctgtcccctccccccaccacttctgtaagtttcctgctctattcccaccatttttttctgtgcacacattatgatatatttcatttcctgcattgtcttgagaaagatggtaaggcaagtgagctgttgctaaccagaaattaaaattccagtaagtgtttttcattatgaccagggc

SEQ ID NO: 2023 - DNA, 1097 bp, Homo sapiens
  source 1..1097: mol_type = genomic DNA
cttctgtttgctaaatctcactgtcactgctaaattcagagcagatagagcctgcgcaatggaataaagtcctcaaaattgaaatgtgacattgctctcaacatctcccatctctctggatttctttttgcttcattattcctgctaaccaattcattttcagactttgtacttcagaagcaatgggaaaaatcagcagtcttccaacccaattatttaagtgctgcttttgtgatttcttgaaggtgaagatgcacaccatgtcctcctcgcatctcttctacctggcgctgtgcctgctcaccttcaccagctctgccacggctggaccggagacgctctgcggggctgagctggtggatgctcttcagttcgtgtgtggagacaggggcttttatttcaacaagcccacagggtatggctccagcagtcggagggcgcctcagacaggcatcgtggatgagtgctgcttccggagctgtgatctaaggaggctggagatgtattgcgcacccctcaagcctgccaagtcagctcgctctgtccgtgcccagcgccacaccgacatgcccaagacccagaagtatcagcccccatctaccaacaagaacacgaagtctcagagaaggaaaggttggccaaagacacatccaggaggggaacagaaggaggggacagaagcaagtctgcagatcagaggaaagaagaaagagcagaggagggagattggaagtagaaatgctgaatgcagaggcaaaaaaggaaaatgaaggacaggaggattaaacagacagaggcaaggatgatgagagaggagcagacagcaagaatgaaaagcagaaaatacaatagaggaaatgaagaaaagtaggcctgctggagctagatgatgatgtgatggaaatagaagtaaccttttagagaatctcgctaagaaacatggagaaaacggaaaagaaaaatgtaatgccctagaaagcgcaaagaaagacagtggcaaaaatgaaaaaaaaaaataaaaattataaaagaggcaaaaaaagacacactattctctgcctctaaaacacaattaaataaaagaatttaaataaaaa

SEQ ID NO: 2024 - DNA, 7359 bp, Homo sapiens
  source 1..7359: mol_type = genomic DNA
gaaggcaaatgttcccccagctgtttcctgtctacagtgtctgtgttttgtagataaatgtgaggattttctctaaatccctcttctgtttgctaaatctcactgtcactgctaaattcagagcagatagagcctgcgcaatggaataaagtcctcaaaattgaaatgtgacattgctctcaacatctcccatctctctggatttctttttgcttcattattcctgctaaccaattcattttcagactttgtacttcagaagcaatgggaaaaatcagcagtcttccaacccaattatttaagtgctgcttttgtgatttcttgaaggtgaagatgcacaccatgtcctcctcgcatctcttctacctggcgctgtgcctgctcaccttcaccagctctgccacggctggaccggagacgctctgcggggctgagctggtggatgctcttcagttcgtgtgtggagacaggggcttttatttcaacaagcccacagggtatggctccagcagtcggagggcgcctcagacaggcatcgtggatgagtgctgcttccggagctgtgatctaaggaggctggagatgtattgcgcacccctcaagcctgccaagtcagctcgctctgtccgtgcccagcgccacaccgacatgcccaagacccagaaggaagtacatttgaagaacgcaagtagagggagtgcaggaaacaagaactacaggatgtaggaagaccctcctgaggagtgaagagtgacatgccaccgcaggatcctttgctctgcacgagttacctgttaaactttggaacacctaccaaaaaataagtttgataacatttaaaagatgggcgtttcccccaatgaaatacacaagtaaacattccaacattgtctttaggagtgatttgcaccttgcaaaaatggtcctggagttggtagattgctgttgatcttttatcaataatgttctatagaaaagaaaaaaaaaatatatatatatatatatcttagtccctgcctctcaagagccacaaatgcatgggtgttgtatagatccagttgcactaaattcctctctgaatcttggctgctggagccattcattcagcaaccttgtctaagtggtttatgaattgtttccttatttgcacttctttctacacaactcgggctgtttgttttacagtgtctgataatcttgttagtctatacccaccacctcccttcataacctttatatttgccgaatttggcctcctcaaaagcagcagcaagtcgtcaagaagcacaccaattctaacccacaagattccatctgtggcatttgtaccaaatataagttggatgcattttattttagacacaaagctttatttttccacatcatgcttacaaaaaagaataatgcaaatagttgcaactttgaggccaatcatttttaggcatatgttttaaacatagaaagtttcttcaactcaaaagagttccttcaaatgatgagttaatgtgcaacctaattagtaactttcctctttttattttttccatatagagcactatgtaaatttagcatatcaattatacaggatatatcaaacagtatgtaaaactctgttttttagtataatggtgctattttgtagtttgttatatgaaagagtctggccaaaacggtaatacgtgaaagcaaaacaataggggaagcctggagccaaagatgacacaaggggaagggtactgaaaacaccatccatttgggaaagaaggcaaagtccccccagttatgccttccaagaggaacttcagacacaaaagtccactgatgcaaattggactggcgagtccagagaggaaactgtggaatggaaaaagcagaaggctaggaattttagcagtcctggtttctttttctcatggaagaaatgaacatctgccagctgtgtcatggactcaccactgtgtgaccttgggcaagtcacttcacctctctgtgcctcagtttcctcatctgcaaaatgggggcaatatgtcatctacctacctcaaaggggtggtataaggtttaaaaagataaagattcagattttttttaccctgggttgctgtaagggtgcaacatcagggcgcttgagttgctgagatgcaaggaattctataaataacccattcatagcatagctagagattggtgaattgaatgctcctgacatctcagttcttgtcagtgaagctatccaaataactggccaactagttgttaaaagctaacagctcaatctcttaaaacacttttcaaaatatgtgggaagcatttgattttcaatttgattttgaattctgcatttggttttatgaatacaaagataagtgaaaagagagaaaggaaaagaaaaaggagaaaaacaaagagatttctaccagtgaaaggggaattaattactctttgttagcactcactgactcttctatgcagttactacatatctagtaaaacctcgtttaatactataaataatattctattcattttgaaaaacacaatgattccttcttttctaggcaatataaggaaagtgatccaaaatttgaaatattaaaataatatctaataaaaagtcacaaagttatcttctttaacaaactttactcttattcttagctgtatatacatttttttaaaagtttgttaaaatatgcttgactagagtttccagttgaaaggcaaaaacttccatcacaacaagaaatttcccatgcctgctcagaagggtagcccctagctctctgtgaatgtgttttatccattcaactgaaaattggtatcaagaaagtccactggttagtgtactagtccatcatagcctagaaaatgatccctatctgcagatcaagattttctcattagaacaatgaattatccagcattcagatctttctagtcaccttagaactttttggttaaaagtacccaggcttgattatttcatgcaaattctatattttacattcttggaaagtctatatgaaaaacaaaaataacatcttcagtttttctcccactgggtcacctcaaggatcagaggccaggaaaaaaaaaaaaaagactccctggatctctgaatatatgcaaaaagaaggccccatttagtggagccagcaatcctgttcagtcaacaagtattttaactctcagtccaacattatttgaattgagcacctcaagcatgcttagcaatgttctaatcactatggacagatgtaaaagaaactatacatcatttttgccctctgcctgttttccagacatacaggttctgtggaataagatactggactcctcttcccaagatggcacttctttttatttcttgtccccagtgtgtaccttttaaaattattccctctcaacaaaactttataggcagtcttctgcagacttaacgtgttttctgtcatagttagatgtgataattctaagagtgtctatgacttatttccttcacttaattctatccacagtcaaaaatcccccaaggaggaaagctgaaagatgcactgccatattatctttcttaactttttccaacacataatcctctccaactggattataaataaattgaaaataactcattataccaattcactattttattttttaatgaattaaaactagaaaacaaattgatgcaaaccctggaagtcagttgattactatatactacagcagaatgactcagatttcatagaaaggagcaaccaaaatgtcacaacccaaaactttacaagctttgcttcagaattagattgctttataattcttgaatgaggcaatttcaagatatttgtaaaagaacagtaaacattggtaagaatgagctttcaactcataggcttatttccaatttaattgaccatactggatacttaggtcaaatttctgttctctcttccccaaataatattaaagtattatttgaactttttaagatgaggcagttcccctgaaaaagttaatgcagctctccatcagaatccactcttctagggatatgaaaatctcttaacacccaccctacatacacagacacacacacacacacacacacacacacacacacacacattcaccctaaggatccaatggaatactgaaaagaaatcacttccttgaaaattttattaaaaaacaaacaaacaaacaaaaagcctgtccacccttgagaatccttcctctccttggaacgtcaatgtttgtgtagatgaaaccatctcatgctctgtggctccagggtttctgttactattttatgcacttgggagaaggcttagaataaaagatgtagcacattttgctttcccatttattgtttggccagctatgccaatgtggtgctattgtttctttaagaaagtacttgactaaaaaaaaaagaaaaaaagaaaaaaaagaaagcatagacatatttttttaaagtataaaaacaacaattctatagatagatggcttaataaaatagcattaggtctatctagccaccaccacctttcaactttttatcactcacaagtagtgtactgttcaccaaattgtgaatttgggggtgcaggggcaggagttggaaattttttaaagttagaaggctccattgttttgttggctctcaaacttagcaaaattagcaatatattatccaatcttctgaacttgatcaagagcatggagaataaacgcgggaaaaaagatcttataggcaaatagaagaatttaaaagataagtaagttccttattgatttttgtgcactctgctctaaaacagatattcagcaagtggagaaaataagaacaaagagaaaaaatacatagatttacctgcaaaaaatagcttctgccaaatcccccttgggtattctttggcatttactggtttatagaagacattctcccttcacccagacatctcaaagagcagtagctctcatgaaaagcaatcactgatctcatttgggaaatgttggaaagtatttccttatgagatgggggttatctactgataaagaaagaatttatgagaaattgttgaaagagatggctaacaatctgtgaagattttttgtttcttgtttttgttttttttttttttttactttatacagtctttatgaatttcttaatgttcaaaatgacttggttcttttcttctttttttatatcagaatgaggaataataagttaaacccacatagactctttaaaactataggctagatagaaatgtatgtttgacttgttgaagctataatcagactatttaaaatgttttgctatttttaatcttaaaagattgtgctaatttattagagcagaacctgtttggctctcctcagaagaaagaatctttccattcaaatcacatggctttccaccaatattttcaaaagataaatctgatttatgcaatggcatcatttattttaaaacagaagaattgtgaaagtttatgcccctcccttgcaaagaccataaagtccagatctggtaggggggcaacaacaaaaggaaaatgttgttgattcttggttttggattttgttttgttttcaatgctagtgtttaatcctgtagtacatatttgcttattgctattttaatattttataagaccttcctgttaggtattagaaagtgatacatagatatcttttttgtgtaatttctatttaaaaaagagagaagactgtcagaagctttaagtgcatatggtacaggataaagatatcaatttaaataaccaattcctatctggaacaatgcttttgttttttaaagaaacctctcacagataagacagaggcccaggggatttttgaagctgtctttattctgcccccatcccaacccagcccttattattttagtatctgcctcagaattttatagagggctgaccaagctgaaactctagaattaaaggaacctcactgaaaacatatatttcacgtgttccctctttttttttttcctttttgtgagatggggtctcgcactgtcccccaggctggagtgcagtggcatgatctcggctcactgcaacctccacctcctgggtttaagcgattctcctgcctcagcctcctgagtagctgggattacaggcacccaccactatgcccggctaattttttggatttttaatagagacggggttttaccatgttggccaggttggtctcaaactcctgaccttgtgatttgcccgcctcagcctcccaaattgctgggattacaggcatgagccaccacaccctgcccatgtgttccctcttaatgtatgattacatggatcttaaacatgatccttctctcctcattcttcaactatctttgatggggtctttcaaggggaaaaaaatccaagcttttttaaagtaaaaaaaaaaaaagagaggacacaaaaccaaatgttactgctcaactgaaatatgagttaagatggagacagagtttctcctaataaccggagctgaattacctttcactttcaaaaacatgaccttccacaatccttagaatctgcctttttttatattactgaggcctaaaagtaaacattactcattttattttgcccaaaatgcactgatgtaaagtaggaaaaataaaaacagagctctaaaatccctttcaagccacccattgaccccactcaccaactcatagcaaagtcacttctgttaatcccttaatctgattttgtttggatatttatcttgtacccgctgctaaacacactgcaggagggactctgaaacctcaagctgtctacttacatcttttatctgtgtctgtgtatcatgaaaatgtctattcaaaatatcaaaacctttcaaatatcacgcagcttatattcagtttacataaaggccccaaataccatgtcagatctttttggtaaaagagttaatgaactatgagaattgggattacatcatgtattttgcctcatgtatttttatcacacttataggccaagtgtgataaataaacttacagacactgaattaatttcccctgctactttgaaaccagaaaataatgactggccattcgttacatctgtcttagttgaaaagcatattttttattaaattaattctgattgtatttgaaattattattcaattcacttatggcagaggaatatcaatcctaatgacttctaaaaatgtaactaattgaatcattatcttacatttactgtttaataagcatattttgaaaatgtatggctagagtgtcataataaaatggtatatctttctttagtaattacattaaaattagtcatgtttgattaa

SEQ ID NO: 2025 - DNA, 761 bp, Homo sapiens
  source 1..761: mol_type = genomic DNA
aatgttcccccagctgtttcctgtctacagtgtctgtgttttgtagataaatactttgtacttcagaagcaatgggaaaaatcagcagtcttccaacccaattatttaagtgctgcttttgtgatttcttgaaggtgaagatgcacaccatgtcctcctcgcatctcttctacctggcgctgtgcctgctcaccttcaccagctctgccacggctggaccggagacgctctgcggggctgagctggtggatgctcttcagttcgtgtgtggagacaggggcttttatttcaacaagcccacagggtatggctccagcagtcggagggcgcctcagacaggcatcgtggatgagtgctgcttccggagctgtgatctaaggaggctggagatgtattgcgcacccctcaagcctgccaagtcagctcgctctgtccgtgcccagcgccacaccgacatgcccaagacccagaagtatcagcccccatctaccaacaagaacacgaagtctcagagaaggaaaggaagtacatttgaagaacgcaagtagagggagtgcaggaaacaagaactacaggatgtaggaagaccctcctgaggagtgaagagtgacatgccaccgcaggatcctttgctctgcacgagttacctgttaaactttggaacacctaccaaaaaataagtttgataacatttaaaagatgggcgtttcccccaatgaaatacacaagtaaacattccaacattgtctttaggagtgatt

SEQ ID NO: 2026 - DNA, 444 bp, Homo sapiens
  source 1..444: mol_type = genomic DNA
ttgaaggtgaagatgcacaccatgtcctcctcgcatctcttctacctggcgctgtgcctgctcaccttcaccagctctgccacggctggaccggagacgctctgcggggctgagctggtggatgctcttcagttcgtgtgtggagacaggggcttttatttcaacaagcccacagggtatggctccagcagtcggagggcgcctcagacaggcatcgtggatgagtgctgcttccggagctgtgatctaaggaggctggagatgtattgcgcacccctcaagcctgccaagtcagctcgctctgtccgtgcccagcgccacaccgacatgcccaagacccagaagtatcagcccccatctaccaacaagaacacgaagtctcagagaaggaaaggaagtacatttgaagaacgcaagtagagggagtgcaggaaacaagaacta

SEQ ID NO: 2027 - DNA, 612 bp, Homo sapiens
  source 1..612: mol_type = genomic DNA
gcatacctgcctgggtgtccaaatgtaactagatgctttcacaaaccccacccacaaagcagcacatgtttttaagacttcagttttctattcacatcggcctcataatacccaccctgacctgctgtaaaagacctggaacaaacaaaaatgattacacctacagtgaagatgcacaccatgtcctcctcgcatctcttctacctggcgctgtgcctgctcaccttcaccagctctgccacggctggaccggagacgctctgcggggctgagctggtggatgctcttcagttcgtgtgtggagacaggggcttttatttcaacaagcccacagggtatggctccagcagtcggagggcgcctcagacaggcatcgtggatgagtgctgcttccggagctgtgatctaaggaggctggagatgtattgcgcacccctcaagcctgccaagtcagctcgctctgtccgtgcccagcgccacaccgacatgcccaagacccagaaggaagtacatttgaagaacgcaagtagagggagtgcaggaaacaagaactacaggatgtaggaagaccctcctgaggagtgaagagtgacatgccaccgcaggatcctt

SEQ ID NO: 2028 - DNA, 7370 bp, Homo sapiens
  source 1..7370: mol_type = genomic DNA
ttttgtagataaatgtgaggattttctctaaatccctcttctgtttgctaaatctcactgtcactgctaaattcagagcagatagagcctgcgcaatggaataaagtcctcaaaattgaaatgtgacattgctctcaacatctcccatctctctggatttctttttgcttcattattcctgctaaccaattcattttcagactttgtacttcagaagcaatgggaaaaatcagcagtcttccaacccaattatttaagtgctgcttttgtgatttcttgaaggtgaagatgcacaccatgtcctcctcgcatctcttctacctggcgctgtgcctgctcaccttcaccagctctgccacggctggaccggagacgctctgcggggctgagctggtggatgctcttcagttcgtgtgtggagacaggggcttttatttcaacaagcccacagggtatggctccagcagtcggagggcgcctcagacaggcatcgtggatgagtgctgcttccggagctgtgatctaaggaggctggagatgtattgcgcacccctcaagcctgccaagtcagctcgctctgtccgtgcccagcgccacaccgacatgcccaagacccagaagtatcagcccccatctaccaacaagaacacgaagtctcagagaaggaaaggaagtacatttgaagaacgcaagtagagggagtgcaggaaacaagaactacaggatgtaggaagaccctcctgaggagtgaagagtgacatgccaccgcaggatcctttgctctgcacgagttacctgttaaactttggaacacctaccaaaaaataagtttgataacatttaaaagatgggcgtttcccccaatgaaatacacaagtaaacattccaacattgtctttaggagtgatttgcaccttgcaaaaatggtcctggagttggtagattgctgttgatcttttatcaataatgttctatagaaaagaaaaaaaaaatatatatatatatatatcttagtccctgcctctcaagagccacaaatgcatgggtgttgtatagatccagttgcactaaattcctctctgaatcttggctgctggagccattcattcagcaaccttgtctaagtggtttatgaattgtttccttatttgcacttctttctacacaactcgggctgtttgttttacagtgtctgataatcttgttagtctatacccaccacctcccttcataacctttatatttgccgaatttggcctcctcaaaagcagcagcaagtcgtcaagaagcacaccaattctaacccacaagattccatctgtggcatttgtaccaaatataagttggatgcattttattttagacacaaagctttatttttccacatcatgcttacaaaaaagaataatgcaaatagttgcaactttgaggccaatcatttttaggcatatgttttaaacatagaaagtttcttcaactcaaaagagttccttcaaatgatgagttaatgtgcaacctaattagtaactttcctctttttattttttccatatagagcactatgtaaatttagcatatcaattatacaggatatatcaaacagtatgtaaaactctgttttttagtataatggtgctattttgtagtttgttatatgaaagagtctggccaaaacggtaatacgtgaaagcaaaacaataggggaagcctggagccaaagatgacacaaggggaagggtactgaaaacaccatccatttgggaaagaaggcaaagtccccccagttatgccttccaagaggaacttcagacacaaaagtccactgatgcaaattggactggcgagtccagagaggaaactgtggaatggaaaaagcagaaggctaggaattttagcagtcctggtttctttttctcatggaagaaatgaacatctgccagctgtgtcatggactcaccactgtgtgaccttgggcaagtcacttcacctctctgtgcctcagtttcctcatctgcaaaatgggggcaatatgtcatctacctacctcaaaggggtggtataaggtttaaaaagataaagattcagattttttttaccctgggttgctgtaagggtgcaacatcagggcgcttgagttgctgagatgcaaggaattctataaataacccattcatagcatagctagagattggtgaattgaatgctcctgacatctcagttcttgtcagtgaagctatccaaataactggccaactagttgttaaaagctaacagctcaatctcttaaaacacttttcaaaatatgtgggaagcatttgattttcaatttgattttgaattctgcatttggttttatgaatacaaagataagtgaaaagagagaaaggaaaagaaaaaggagaaaaacaaagagatttctaccagtgaaaggggaattaattactctttgttagcactcactgactcttctatgcagttactacatatctagtaaaacctcgtttaatactataaataatattctattcattttgaaaaacacaatgattccttcttttctaggcaatataaggaaagtgatccaaaatttgaaatattaaaataatatctaataaaaagtcacaaagttatcttctttaacaaactttactcttattcttagctgtatatacatttttttaaaagtttgttaaaatatgcttgactagagtttccagttgaaaggcaaaaacttccatcacaacaagaaatttcccatgcctgctcagaagggtagcccctagctctctgtgaatgtgttttatccattcaactgaaaattggtatcaagaaagtccactggttagtgtactagtccatcatagcctagaaaatgatccctatctgcagatcaagattttctcattagaacaatgaattatccagcattcagatctttctagtcaccttagaactttttggttaaaagtacccaggcttgattatttcatgcaaattctatattttacattcttggaaagtctatatgaaaaacaaaaataacatcttcagtttttctcccactgggtcacctcaaggatcagaggccaggaaaaaaaaaaaaaagactccctggatctctgaatatatgcaaaaagaaggccccatttagtggagccagcaatcctgttcagtcaacaagtattttaactctcagtccaacattatttgaattgagcacctcaagcatgcttagcaatgttctaatcactatggacagatgtaaaagaaactatacatcatttttgccctctgcctgttttccagacatacaggttctgtggaataagatactggactcctcttcccaagatggcacttctttttatttcttgtccccagtgtgtaccttttaaaattattccctctcaacaaaactttataggcagtcttctgcagacttaacgtgttttctgtcatagttagatgtgataattctaagagtgtctatgacttatttccttcacttaattctatccacagtcaaaaatcccccaaggaggaaagctgaaagatgcactgccatattatctttcttaactttttccaacacataatcctctccaactggattataaataaattgaaaataactcattataccaattcactattttattttttaatgaattaaaactagaaaacaaattgatgcaaaccctggaagtcagttgattactatatactacagcagaatgactcagatttcatagaaaggagcaaccaaaatgtcacaacccaaaactttacaagctttgcttcagaattagattgctttataattcttgaatgaggcaatttcaagatatttgtaaaagaacagtaaacattggtaagaatgagctttcaactcataggcttatttccaatttaattgaccatactggatacttaggtcaaatttctgttctctcttccccaaataatattaaagtattatttgaactttttaagatgaggcagttcccctgaaaaagttaatgcagctctccatcagaatccactcttctagggatatgaaaatctcttaacacccaccctacatacacagacacacacacacacacacacacacacacacacacacacattcaccctaaggatccaatggaatactgaaaagaaatcacttccttgaaaattttattaaaaaacaaacaaacaaacaaaaagcctgtccacccttgagaatccttcctctccttggaacgtcaatgtttgtgtagatgaaaccatctcatgctctgtggctccagggtttctgttactattttatgcacttgggagaaggcttagaataaaagatgtagcacattttgctttcccatttattgtttggccagctatgccaatgtggtgctattgtttctttaagaaagtacttgactaaaaaaaaaagaaaaaaagaaaaaaaagaaagcatagacatatttttttaaagtataaaaacaacaattctatagatagatggcttaataaaatagcattaggtctatctagccaccaccacctttcaactttttatcactcacaagtagtgtactgttcaccaaattgtgaatttgggggtgcaggggcaggagttggaaattttttaaagttagaaggctccattgttttgttggctctcaaacttagcaaaattagcaatatattatccaatcttctgaacttgatcaagagcatggagaataaacgcgggaaaaaagatcttataggcaaatagaagaatttaaaagataagtaagttccttattgatttttgtgcactctgctctaaaacagatattcagcaagtggagaaaataagaacaaagagaaaaaatacatagatttacctgcaaaaaatagcttctgccaaatcccccttgggtattctttggcatttactggtttatagaagacattctcccttcacccagacatctcaaagagcagtagctctcatgaaaagcaatcactgatctcatttgggaaatgttggaaagtatttccttatgagatgggggttatctactgataaagaaagaatttatgagaaattgttgaaagagatggctaacaatctgtgaagattttttgtttcttgtttttgttttttttttttttttactttatacagtctttatgaatttcttaatgttcaaaatgacttggttcttttcttctttttttatatcagaatgaggaataataagttaaacccacatagactctttaaaactataggctagatagaaatgtatgtttgacttgttgaagctataatcagactatttaaaatgttttgctatttttaatcttaaaagattgtgctaatttattagagcagaacctgtttggctctcctcagaagaaagaatctttccattcaaatcacatggctttccaccaatattttcaaaagataaatctgatttatgcaatggcatcatttattttaaaacagaagaattgtgaaagtttatgcccctcccttgcaaagaccataaagtccagatctggtaggggggcaacaacaaaaggaaaatgttgttgattcttggttttggattttgttttgttttcaatgctagtgtttaatcctgtagtacatatttgcttattgctattttaatattttataagaccttcctgttaggtattagaaagtgatacatagatatcttttttgtgtaatttctatttaaaaaagagagaagactgtcagaagctttaagtgcatatggtacaggataaagatatcaatttaaataaccaattcctatctggaacaatgcttttgttttttaaagaaacctctcacagataagacagaggcccaggggatttttgaagctgtctttattctgcccccatcccaacccagcccttattattttagtatctgcctcagaattttatagagggctgaccaagctgaaactctagaattaaaggaacctcactgaaaacatatatttcacgtgttccctctttttttttttcctttttgtgagatggggtctcgcactgtcccccaggctggagtgcagtggcatgatctcggctcactgcaacctccacctcctgggtttaagcgattctcctgcctcagcctcctgagtagctgggattacaggcacccaccactatgcccggctaattttttggatttttaatagagacggggttttaccatgttggccaggttggtctcaaactcctgaccttgtgatttgcccgcctcagcctcccaaattgctgggattacaggcatgagccaccacaccctgcccatgtgttccctcttaatgtatgattacatggatcttaaacatgatccttctctcctcattcttcaactatctttgatggggtctttcaaggggaaaaaaatccaagcttttttaaagtaaaaaaaaaaaaagagaggacacaaaaccaaatgttactgctcaactgaaatatgagttaagatggagacagagtttctcctaataaccggagctgaattacctttcactttcaaaaacatgaccttccacaatccttagaatctgcctttttttatattactgaggcctaaaagtaaacattactcattttattttgcccaaaatgcactgatgtaaagtaggaaaaataaaaacagagctctaaaatccctttcaagccacccattgaccccactcaccaactcatagcaaagtcacttctgttaatcccttaatctgattttgtttggatatttatcttgtacccgctgctaaacacactgcaggagggactctgaaacctcaagctgtctacttacatcttttatctgtgtctgtgtatcatgaaaatgtctattcaaaatatcaaaacctttcaaatatcacgcagcttatattcagtttacataaaggccccaaataccatgtcagatctttttggtaaaagagttaatgaactatgagaattgggattacatcatgtattttgcctcatgtatttttatcacacttataggccaagtgtgataaataaacttacagacactgaattaatttcccctgctactttgaaaccagaaaataatgactggccattcgttacatctgtcttagttgaaaagcatattttttattaaattaattctgattgtatttgaaattattattcaattcacttatggcagaggaatatcaatcctaatgacttctaaaaatgtaactaattgaatcattatcttacatttactgtttaataagcatattttgaaaatgtatggctagagtgtcataataaaatggtatatctttctttagtaattacattaaaattagtcatgtttgattaattagttc

SEQ ID NO: 2029 - DNA, 11803 bp, Homo sapiens
  source 1..11803: mol_type = genomic DNA
gggaaggagctcgccgcggcggcggcggcgctgagggaggaggcggcggcgagcggagccaggaggaggaggaggagggggagccgctcattcattttgactccgcgtttctgcccctcgccggcctcgcctgtgacccggacttcggggcgatcttgcgaactgcgtcgcgccctcccgcggcggaagctcgggcgtccggccgcctcccgcgcggccagggccgggcttgtttttcctcgcctaggcagatttgggctttgccccctttctttgcagttttccccccttcctgcctctccgggtttgaaaatggaggccgacgacgccgacagcccgccccggcgcgcctcgggttcccgactccgccgagccctgggccgctgctgccggcgctgaggggccgccccgcgccgcccgccccgtccgcgcacccggagggccccggcggcgccgccttcggagtattgtttccttcgcccttgtttttggagggggagcgaagactgagtttgagacttgtttcctttcatttcctttttttcttttcttttcttttttttttttttttttttttttgagaaaggggaatttcatcccaaataaaaggaatgaagtctggctccggaggagggtccccgacctcgctgtgggggctcctgtttctctccgccgcgctctcgctctggccgacgagtggagaaatctgcgggccaggcatcgacatccgcaacgactatcagcagctgaagcgcctggagaactgcacggtgatcgagggctacctccacatcctgctcatctccaaggccgaggactaccgcagctaccgcttccccaagctcacggtcattaccgagtacttgctgctgttccgagtggctggcctcgagagcctcggagacctcttccccaacctcacggtcatccgcggctggaaactcttctacaactacgccctggtcatcttcgagatgaccaatctcaaggatattgggctttacaacctgaggaacattactcggggggccatcaggattgagaaaaatgctgacctctgttacctctccactgtggactggtccctgatcctggatgcggtgtccaataactacattgtggggaataagcccccaaaggaatgtggggacctgtgtccagggaccatggaggagaagccgatgtgtgagaagaccaccatcaacaatgagtacaactaccgctgctggaccacaaaccgctgccagaaaatgtgcccaagcacgtgtgggaagcgggcgtgcaccgagaacaatgagtgctgccaccccgagtgcctgggcagctgcagcgcgcctgacaacgacacggcctgtgtagcttgccgccactactactatgccggtgtctgtgtgcctgcctgcccgcccaacacctacaggtttgagggctggcgctgtgtggaccgtgacttctgcgccaacatcctcagcgccgagagcagcgactccgaggggtttgtgatccacgacggcgagtgcatgcaggagtgcccctcgggcttcatccgcaacggcagccagagcatgtactgcatcccttgtgaaggtccttgcccgaaggtctgtgaggaagaaaagaaaacaaagaccattgattctgttacttctgctcagatgctccaaggatgcaccatcttcaagggcaatttgctcattaacatccgacgggggaataacattgcttcagagctggagaacttcatggggctcatcgaggtggtgacgggctacgtgaagatccgccattctcatgccttggtctccttgtccttcctaaaaaaccttcgcctcatcctaggagaggagcagctagaagggaattactccttctacgtcctcgacaaccagaacttgcagcaactgtgggactgggaccaccgcaacctgaccatcaaagcagggaaaatgtactttgctttcaatcccaaattatgtgtttccgaaatttaccgcatggaggaagtgacggggactaaagggcgccaaagcaaaggggacataaacaccaggaacaacggggagagagcctcctgtgaaagtgacgtcctgcatttcacctccaccaccacgtcgaagaatcgcatcatcataacctggcaccggtaccggccccctgactacagggatctcatcagcttcaccgtttactacaaggaagcaccctttaagaatgtcacagagtatgatgggcaggatgcctgcggctccaacagctggaacatggtggacgtggacctcccgcccaacaaggacgtggagcccggcatcttactacatgggctgaagccctggactcagtacgccgtttacgtcaaggctgtgaccctcaccatggtggagaacgaccatatccgtggggccaagagtgagatcttgtacattcgcaccaatgcttcagttccttccattcccttggacgttctttcagcatcgaactcctcttctcagttaatcgtgaagtggaaccctccctctctgcccaacggcaacctgagttactacattgtgcgctggcagcggcagcctcaggacggctacctttaccggcacaattactgctccaaagacaaaatccccatcaggaagtatgccgacggcaccatcgacattgaggaggtcacagagaaccccaagactgaggtgtgtggtggggagaaagggccttgctgcgcctgccccaaaactgaagccgagaagcaggccgagaaggaggaggctgaataccgcaaagtctttgagaatttcctgcacaactccatcttcgtgcccagacctgaaaggaagcggagagatgtcatgcaagtggccaacaccaccatgtccagccgaagcaggaacaccacggccgcagacacctacaacatcaccgacccggaagagctggagacagagtaccctttctttgagagcagagtggataacaaggagagaactgtcatttctaaccttcggcctttcacattgtaccgcatcgatatccacagctgcaaccacgaggctgagaagctgggctgcagcgcctccaacttcgtctttgcaaggactatgcccgcagaaggagcagatgacattcctgggccagtgacctgggagccaaggcctgaaaactccatctttttaaagtggccggaacctgagaatcccaatggattgattctaatgtatgaaataaaatacggatcacaagttgaggatcagcgagaatgtgtgtccagacaggaatacaggaagtatggaggggccaagctaaaccggctaaacccggggaactacacagcccggattcaggccacatctctctctgggaatgggtcgtggacagatcctgtgttcttctatgtccaggccaaaacaggatatgaaaacttcatccatctgatcatcgctctgcccgtcgctgtcctgttgatcgtgggagggttggtgattatgctgtacgtcttccatagaaagagaaataacagcaggctggggaatggagtgctgtatgcctctgtgaacccggagtacttcagcgctgctgatgtgtacgttcctgatgagtgggaggtggctcgggagaagatcaccatgagccgggaacttgggcaggggtcgtttgggatggtctatgaaggagttgccaagggtgtggtgaaagatgaacctgaaaccagagtggccattaaaacagtgaacgaggccgcaagcatgcgtgagaggattgagtttctcaacgaagcttctgtgatgaaggagttcaattgtcaccatgtggtgcgattgctgggtgtggtgtcccaaggccagccaacactggtcatcatggaactgatgacacggggcgatctcaaaagttatctccggtctctgaggccagaaatggagaataatccagtcctagcacctccaagcctgagcaagatgattcagatggccggagagattgcagacggcatggcatacctcaacgccaataagttcgtccacagagaccttgctgcccggaattgcatggtagccgaagatttcacagtcaaaatcggagattttggtatgacgcgagatatctatgagacagactattaccggaaaggagggaaagggctgctgcccgtgcgctggatgtctcctgagtccctcaaggatggagtcttcaccacttactcggacgtctggtccttcggggtcgtcctctgggagatcgccacactggccgagcagccctaccagggcttgtccaacgagcaagtccttcgcttcgtcatggagggcggccttctggacaagccagacaactgtcctgacatgctgtttgaactgatgcgcatgtgctggcagtataaccccaagatgaggccttccttcctggagatcatcagcagcatcaaagaggagatggagcctggcttccgggaggtctccttctactacagcgaggagaacaagctgcccgagccggaggagctggacctggagccagagaacatggagagcgtccccctggacccctcggcctcctcgtcctccctgccactgcccgacagacactcaggacacaaggccgagaacggccccggccctggggtgctggtcctccgcgccagcttcgacgagagacagccttacgcccacatgaacgggggccgcaagaacgagcgggccttgccgctgccccagtcttcgacctgctgatccttggatcctgaatctgtgcaaacagtaacgtgtgcgcacgcgcagcggggtggggggggagagagagttttaacaatccattcacaagcctcctgtacctcagtggatcttcagaactgcccttgctgcccgcgggagacagcttctctgcagtaaaacacatttgggatgttccttttttcaatatgcaagcagctttttattccctgcccaaacccttaactgacatgggcctttaagaaccttaatgacaacacttaatagcaacagagcacttgagaaccagtctcctcactctgtccctgtccttccctgttctccctttctctctcctctctgcttcataacggaaaaataattgccacaagtccagctgggaagccctttttatcagtttgaggaagtggctgtccctgtggccccatccaaccactgtacacacccgcctgacaccgtgggtcattacaaaaaaacacgtggagatggaaatttttacctttatctttcacctttctagggacatgaaatttacaaagggccatcgttcatccaaggctgttaccattttaacgctgcctaattttgccaaaatcctgaactttctccctcatcggcccggcgctgattcctcgtgtccggaggcatgggtgagcatggcagctggttgctccatttgagagacacgctggcgacacactccgtccatccgactgcccctgctgtgctgctcaaggccacaggcacacaggtctcattgcttctgactagattattatttgggggaactggacacaataggtctttctctcagtgaaggtggggagaagctgaaccggcttccctgccctgcctccccagccccctgcccaacccccaagaatctggtggccatgggccccgaagcagcctggcggacaggcttggagtcaaggggccccatgcctgcttctctcccagccccagctcccccgcccgcccccaaggacacagatgggaaggggtttccagggactcagccccactgttgatgcaggtttgcaaggaaagaaattcaaacaccacaacagcagtaagaagaaaagcagtcaatggattcaagcattctaagctttgttgacattttctctgttcctaggacttcttcatgggtcttacagttctatgttagaccatgaaacatttgcatacacatcgtctttaatgtcacttttataacttttttacggttcagatattcatctatacgtctgtacagaaaaaaaaaagctgctattttttttgttcttgatctttgtggatttaatctatgaaaaccttcaggtccaccctctcccctttctgctcactccaagaaacttcttatgctttgtactagagtgcgtgactttcttcctcttttcccggtaatggatacttctatcacataatttgccatgaactgttggatgcctttttataaatacatcccccatccctgctcccacctgcccctttagttgttttctaacccgtaggctctctgggcacgaggcagaaagcaggccgggcacccatcctgagagggccgcgctcctctccccagcctgccctcacagcattggagcctgttacagtgcaagacatgatacaaactcaggtcagaaaaacaaaggttaaatatttcacacgtctttgttcagtgtttccactcaccgtggttgagaagcctcaccctctctttcccttgcctttgcttaggttgtgacacacatatatatatatttttttaattcttgggtacaacagcagtgttaaccgcagacactaggcatttggattactatttttcttaatggctatttaatccttccatcccacgaaaaacagctgctgagtccaagggagcagcagagcgtggtccggcagggcctgttgtggccctcgccacccccctcaccggaccgactgacctgtctttggaaccagaacatcccaagggaactccttcgcactggcgttgagtgggaccccgggatccaggctggcccagggcggcaccctcagggctgtgcccgctggagtgctaggtggaggcagcacagacgccacggtggcccaagagcccctttgcttcttgctgggggaccagggctgtggtgctggcccactttccctcggccaggaatccaggtccttggggcccaggggtcttgtcttgtttcatttttagcacttctcaccagagagatgacagcacaagagttgcttctgggatagaaatgtttaggagtaagaacaaagctgggatacggtgattgctagttgtgactgaagattcaacacagaaaagaaagtttatacggcttttttgctggtcagcagtttgtcccactgctttctctagtctctatcccatagcgtgttccctttaaaaaaaaaaaaaaggtattatatgtaggagttttcttttaatttattttgtgataaattaccagtttcaatcactgtagaaaagccccattatgaatttaaatttcaaggaaagggtgtgtgtgtgtgtatgtgtggggtgtgtgtgtgtgagagtgatgggacagttcttgattttttgggttttttttcccccaaacatttatctacctcactcttattttttatatgtgtatatagacaaaagaatacatctcacctttctcagcacctgacaataggccgttgatactggtaacctcatccacgccacaggcgccacacccaggtgatgcagggggaagccaggctgtattccggggtcaaagcaacactaactcacctctctgctcatttcagacagcttgcctttttctgagatgtcctgttttgtgttgctttttttgttttgttttctatcttggtttccaccaaggtgttagatttctcctcctcctagccaggtggccctgtgaggccaacgagggcaccagagcacacctgggggagccaccaggctgtccctggctggttgtctttggaacaaactgcttctgtgcagatggaatgaccaacacatttcgtccttaagagagcagtggttcctcaggttctgaggagaggaaggtgtccaggcagcaccatctctgtgcgaatccccagggtaaaggcgtggggcattgggtttgctccccttgctgctgctccatccctgcaggaggctcgcgctgaggcaggaccgtgcggccatggctgctgcattcattgagcacaaaggtgcagctgcagcagcagctggagagcaagagtcacccagcctgtgcgccagaatgcagaggctcctgacctcacagccagtccctgatagaacacacgcaggagcagagtcccctccccctccaggctgccctctcaacttctccctcacctccttccctaggggtagacagagatgtaccaaaccttccggctggaaagcccagtggccggcgccgaggctcgtggcgtcacgccccccccgccagggctgtacctccgtctccctggtcctgctgctcacaggacagacggctcgctcccctcttccagcagctgctcttacaggcactgatgatttcgctgggaagtgtggcgggcagctttgcctaagcgtggatggctcctcggcaattccagcctaagtgaaggcgctcaggagcctcctgctggaacgcgacccatctctcccaggaccccggggatcttaaggtcattgagaaatactgttggatcagggttttgttcttccacactgtaggtgaccccttggaataacggcctctcctctcgtgcacatacctaccggtttccacaactggatttctacagatcattcagctggttataagggttttgtttaaactgtccgagttactgatgtcattttgtttttgttttatgtaggtagcttttaagtagaaaacactaacagtgtagtgcccatcatagcaaatgcttcagaaacacctcaataaaagagaaaacttggcttgtgtgatggtgcagtcactttactggaccaacccacccaccttgactataccaaggcatcatctatccacagttctagcctaacttcatgctgatttctctgcctcttgatttttctctgtgtgttccaaataatcttaagctgagttgtggcattttccatgcaacctccttctgccagcagctcacactgcttgaagtcatatgaaccactgaggcacatcatggaattgatgtgagcattaagacgttctcccacacagcccttccctgaggcagcaggagctggtgtgtactggagacactgttgaacttgatcaagacccagaccaccccaggtctccttcgtgggatgtcatgacgtttgacatacctttggaacgagcctcctccttggaagatggaagaccgtgttcgtggccgacctggcctctcctggcctgtttcttaagatgcggagtcacatttcaatggtacgaaaagtggcttcgtaaaatagaagagcagtcactgtggaactaccaaatggcgagatgctcggtgcacattggggtgctttgggataaaagatttatgagccaactattctctggcaccagattctaggccagtttgttccactgaagcttttcccacagcagtccacctctgcaggctggcagccgaatggcttgccagtggctctgtggcaagatcacactgagatcgatgggtgagaaggctaggatgcttgtctagtgttcttagctgtcacgttggctccttccagggtggccagacggtgttggccactcccttctaaaacacaggcgccctcctggtgacagtgacccgccgtggtatgccttggcccattccagcagtcccagttatgcatttcaagtttggggtttgttcttttcgttaatgttcctctgtgttgtcagctgtcttcatttcctgggctaagcagcattgggagatgtggaccagagatccactccttaagaaccagtggcgaaagacactttctttcttcactctgaagtagctggtggtacaaatgagaacttcaagagaggatgttatttagactgaacctctgttgccagagatgctgaagatacagaccttggacaggtcagagggtttcatttttggccttcatcttagatgactggttgcgtcatttggagaagtgagtgctccttgatggtggaatgaccgggtggtgggtacagaaccattgtcacagggatcctggcacagagaagagttacgagcagcagggtgcagggcttggaaggaatgtgggcaaggttttgaacttgattgttcttgaagctatcagaccacatcgaggctcagcagtcatccgtgggcatttggtttcaacaaagaaacctaacatcctactctggaaactgatctcggagttaaggcgaattgttcaagaacacaaactacatcgcactcgtcagttgtcagttctggggcatgactttagcgttttgtttctgcgagaacataacgatcactcatttttatgtcccacgtgtgtgtgtccgcatctttctggtcaacattgttttaactagtcactcattagcgttttcaatagggctcttaagtccagtagattacgggtagtcagttgacgaagatctggtttacaagaactaattaaatgtttcattgcatttttgtaagaacagaataattttataaaatgtttgtagtttataattgccgaaaataatttaaagacactttttttttctctgtgtgtgcaaatgtgtgtttgtgatccattttttttttttttttttaggacacctgtttactagctagctttacaatatgccaaaaaaggatttctccctgaccccatccgtggttcaccctcttttccccccatgctttttgccctagtttataacaaaggaatgatgatgatttaaaaagtagttctgtatcttcagtatcttggtcttccagaaccctctggttgggaaggggatcattttttactggtcatttccctttggagtgtagctactttaacagatggaaagaacctcattggccatggaaacagccgaggtgttggagcccagcagtgcatggcaccgttcggcatctggcttgattggtctggctgccgtcattgtcagcacagtgccatggacatgggaagacttgactgcacagccaatggttttcatgatgattacagcatacacagtgatcacataaacgatgacagctatggggcacacaggccatttgcttacatgcctcgtatcatgactgattactgctttgttagaacacagaagagaccctattttatttaaggcagaaccccgaagatacgtatttccaatacagaaaagaatttttaataaaaactataacatacacaaaaattggttttaaagttgactccacttcctctaactccagtggattgttggccatgtctccccaactccacaatatctctatcatgggaaacacctggggtttttgcgctacataggagaaagatctggaaactatttgggttttgttttcaacttttcatttggatgtttggcgttgcacacacacatccaccggtggaagagacgcccggtgaaaacacctgtctgctttctaagccagtgaggttgaggtgagaggtttgccagagtttgtctacctctgggtatccctttgtctgggataaaaaaaatcaaaccagaaggcgggatggaatggatgcaccgcaaataatgcattttctgagttttcttgttaaaaaaaaatttttttaagtaagaaaaaaaaaggtaataacatggccaatttgttacataaaatgactttctgtgtataaattattcctaaaaaatcctgtttatataaaaaatcagtagatgaaaaaaatttcaaaatgtttttgtatattctgttgtaagaatttattcctgttattgcgatatactctggattctttacataatggaaaaaagaaactgtctattttgaatggctgaagctaaggcaacgttagtttctcttactctgcttttttctagtaaagtactacatggtttaagttaaataaaataattctgtatgca

SEQ ID NO: 2030 - DNA, 5138 bp, Homo sapiens
  source 1..5138: mol_type = genomic DNA
ccgctaatgtaccatgccctggtgctggaaagtgcctgagccagctgccccagcggcctcagcactaccaagttggcacaaagctccccaaattcggaggggctcagggaaacgagtggaggggatgaggaggtgaggggtaaacccatcatttcagttggcatttgagcaggtgccatgctcagcggagatgaggctctcccatctgtaggggccgtattaacatgcacactctaaaagtgcccttcgtttctccagcctcagctttgtccctctcctcctccacgtcaacctggccagagggtctggacgccacagccagggcaccccctgctttggtggtgactgctaatattggccaggccggcggatcatcgtccaggcagtttcggcagagagccttgggcaccagtgactccccggtcctctttatccactgtccaggagctgcggggactgcgcagggactagagtacaggggccgaagagtcaccaccgagcttgtgtgggaggaggtggattccagcccccagccccagggctctgaatcgctgccagctcagccccctgcccagcctgccccacagcctgagccccagcaggccagagagcccagtcctgaggtgagctgctgtggcctgtggcccaggcgaccccagcgctcccagaactgaggctggcagccagccccagcctcagccccaactgcgaggcagagagacaccaatgggaatcccaatggggaagtcgatgctggtgcttctcaccttcttggccttcgcctcgtgctgcattgctgcttaccgccccagtgagaccctgtgcggcggggagctggtggacaccctccagttcgtctgtggggaccgcggcttctacttcagcaggcccgcaagccgtgtgagccgtcgcagccgtggcatcgttgaggagtgctgtttccgcagctgtgacctggccctcctggagacgtactgtgctacccccgccaagtccgagagggacgtgtcgacccctccgaccgtgcttccggacaacttccccagataccccgtgggcaagttcttccaatatgacacctggaagcagtccacccagcgcctgcgcaggggcctgcctgccctcctgcgtgcccgccggggtcacgtgctcgccaaggagctcgaggcgttcagggaggccaaacgtcaccgtcccctgattgctctacccacccaagaccccgcccacgggggcgcccccccagagatggccagcaatcggaagtgagcaaaactgccgcaagtctgcagcccggcgccaccatcctgcagcctcctcctgaccacggacgtttccatcaggttccatcccgaaaatctctcggttccacgtccccctggggcttctcctgacccagtccccgtgccccgcctccccgaaacaggctactctcctcggccccctccatcgggctgaggaagcacagcagcatcttcaaacatgtacaaaatcgattggctttaaacacccttcacataccctccccccaaattatccccaattatccccacacataaaaaatcaaaacattaaactaacccccttcccccccccccacaacaaccctcttaaaactaattggctttttagaaacaccccacaaaagctcagaaattggctttaaaaaaaacaaccaccaaaaaaaatcaattggctaaaaaaaaaaagtattaaaaacgaattggctgagaaacaattggcaaaataaaggaatttggcactccccacccccctctttctcttctcccttggactttgagtcaaattggcctggacttgagtccctgaaccagcaaagagaaaagaaggaccccagaaatcacaggtgggcacgtcgctgctaccgccatctcccttctcacgggaattttcagggtaaactggccatccgaaaatagcaacaacccagactggctcctcactcccttttccatcactaaaaatcacagagcagtcagagggacccagtaagaccaaaggaggggaggacagagcatgaaaaccaaaatccatgcaaatgaaatgtaattggcacgaccctcacccccaaatcttacatctcaattcccatcctaaaaagcactcatactttatgcatccccgcagctacacacacacaacacacagcacacgcatgaacacagcacacacacgagcacagcacacacacaaacgcacagcacacacagcacacagatgagcacacagcacacacacaaacgcacagcacacacacgcacacacatgcacacacagcacacaaacgcacggcacacacacgcacacacatgcacacacagcacacacacaaacgcacagcacacacaaacgcacagcacacacgcacacacagcacacacacgagcacacagcacacaaacgcacagcacacgcacacacatgcacacacagcacacacactagcacacagcacacacacaaagacacagcacacacatgcacacacagcacacacacgcgaacacagcacacacgaacacagcacacacagcacacacacaaacacagcacacacatgcacacagcacacgcacacacagcacacacatgaacacagcacacagcacacacatgcacacacagcacacacgcatgcacagcacacatgaacacagcacacacacaaacacacagcacacacatgcacacacagcacacacactcatgcgcagcacatacatgaacacagctcacagcacacaaacacgcagcacacacgttgcacacgcaagcacccacctgcacacacacatgcgcacacacacgcacacccccacaaaattggatgaaaacaataagcatatctaagcaactacgatatctgtatggatcaggccaaagtcccgctaagattctccaatgttttcatggtctgagccccgctcctgttcccatctccactgcccctcggccctgtctgtgccctgcctctcagaggagggggctcagatggtgcggcctgagtgtgcggccggcggcatttgggatacacccgtagggtgggcggggtgtgtcccaggcctaattccatctttccaccatgacagagatgcccttgtgaggctggcctccttggcgcctgtccccacggcccccgcagcgtgagccacgatgctccccataccccacccattcccgatacaccttacttactgtgtgttggcccagccagagtgaggaaggagtttggccacattggagatggcggtagctgagcagacatgcccccacgagtagcctgactccctggtgtgctcctggaaggaagatcttggggacccccccaccggagcacacctagggatcatctttgcccgtctcctggggaccccccaagaaatgtggagtcctcgggggccgtgcactgatgcggggagtgtgggaagtctggcggttggaggggtgggtggggggcagtgggggctgggcggggggagttctggggtaggaagtggtcccgggagattttggatggaaaagtcaggaggattgacagcagacttgcagaattacatagagaaattaggaacccccaaatttcatgtcaattgatctattccccctctttgtttcttggggcatttttccttttttttttttttttgttttttttttacccctccttagctttatgcgctcagaaaccaaattaaaccccccccccatgtaacaggggggcagtgacaaaagcaagaacgcacgaagccagcctggagaccaccacgtcctgccccccgccatttatcgccctgattggattttgtttttcatctgtccctgttgcttgggttgagttgagggtggagcctcctggggggcactggccactgagcccccttggagaagtcagaggggagtggagaaggccactgtccggcctggcttctggggacagtggctggtccccagaagtcctgagggcggaggggggggttgggcagggtctcctcaggtgtcaggagggtgctcggaggccacaggagggggctcctggctggcctgaggctggccggaggggaaggggctagcaggtgtgtaaacagagggttccatcaggctggggcagggtggccgccttccgcacacttgaggaaccctcccctctccctcggtgacatcttgcccgcccctcagcaccctgccttgtctccaggaggtccgaagctctgtgggacctcttgggggcaaggtggggtgaggccggggagtagggaggtcaggcgggtctgagcccacagagcaggagagctgccaggtctgcccatcgaccaggttgcttgggccccggagcccacgggtctggtgatgccatagcagccaccaccgcggcgcctagggctgcggcagggactcggcctctgggaggtttacctcgcccccacttgtgcccccagctcagcccccctgcacgcagcccgactagcagtctagaggcctgaggcttctgggtcctggtgacggggctggcatgaccccgggggtcgtccatgccagtccgcctcagtcgcagagggtccctcggcaagcgccctgtgagtgggccattcggaacattggacagaagcccaaagagccaaattgtcacaattgtggaacccacattggcctgagatccaaaacgcttcgaggcaccccaaattacctgcccattcgtcaggacacccacccacccagtgttatattctgcctcgccggagtgggtgttcccgggggcacttgccgaccagccccttgcgtccccaggtttgcagctctcccctgggccactaaccatcctggcccgggctgcctgtctgacctccgtgcctagtcgtggctctccatcttgtctcctccccgtgtccccaatgtcttcagtggggggccccctcttgggtcccctcctctgccatcacctgaagacccccacgccaaacactgaatgtcacctgtgcctgccgcctcggtccaccttgcggcccgtgtttgactcaactcaactcctttaacgctaatatttccggcaaaatcccatgcttgggttttgtctttaaccttgtaacgcttgcaatcccaataaagcattaaaagtcatg

SEQ ID NO: 2031 - DNA, 1047 bp, Homo sapiens
  source 1..1047: mol_type = genomic DNA
caggggccgaagagtcaccaccgagcttgtgtgggaggaggtggattccagcccccagccccagggctctgaatcgctgccagctcagccccctgcccagcctgccccacagcctgagccccagcaggccagagagcccagtcctgaggtgagctgctgtggcctgtggcccaggcgaccccagcgctcccagaactgaggctggcagccagccccagcctcagccccaactgcgaggcagagagacaccaatgggaatcccaatggggaagtcgatgctggtgcttctcaccttcttggccttcgcctcgtgctgcattgctgcttaccgccccagtgagaccctgtgcggcggggagctggtggacaccctccagttcgtctgtggggaccgcggcttctacttcagcaggcccgcaagccgtgtgagccgtcgcagccgtggcatcgttgaggagtgctgtttccgcagctgtgacctggccctcctggagacgtactgtgctacccccgccaagtccgagagggacgtgtcgacccctccgaccgtgcttccggacaacttccccagataccccgtgggcaagttcttccaatatgacacctggaagcagtccacccagcgcctgcgcaggggcctgcctgccctcctgcgtgcccgccggggtcacgtgctcgccaaggagctcgaggcgttcagggaggccaaacgtcaccgtcccctgattgctctacccacccaagaccccgcccacgggggcgcccccccagagatggccagcaatcggaagtgagcaaaactgccgcaagtctgcagcccggcgccaccatcctgcagcctcctcctgaccacggacgtttccatcaggttccatcccgaaaatctctcggttccacgtccccctggggcttctcctgacccagtccccgtgccccgcctccccgaaacaggctactctcctcggccccctccatcgggctgaggaagcacagcagcatcttcaaacatgtacaaaatcgattggctttaaacacccttcacatacc

SEQ ID NO: 2032 - DNA, 5136 bp, Homo sapiens
  source 1..5136: mol_type = genomic DNA
agccctccaggacaggctgcatcagaagaggccatcaagcagatcactgtccttctgccatggccctgtggatgcgcctcctgcccctgctggcgctgctggccctctggggacctgacccagccgcagcctttgtgaaccaacacctgtgcggctcacacctggtggaagctctctacctagtgtgcggggaacgaggcttcttctacacacccaagacccgccgggaggcagaggacctgcaggcctcagctttgtccctctcctcctccacgtcaacctggccagagggtctggacgccacagccagggcaccccctgctttggtggtgactgctaatattggccaggccggcggatcatcgtccaggcagtttcggcagagagccttgggcaccagtgactccccggtcctctttatccactgtccaggagctgcggggactgcgcagggactagagtacaggggccgaagagtcaccaccgagcttgtgtgggaggaggtggattccagcccccagccccagggctctgaatcgctgccagctcagccccctgcccagcctgccccacagcctgagccccagcaggccagagagcccagtcctgaggtgagctgctgtggcctgtggcccaggcgaccccagcgctcccagaactgaggctggcagccagccccagcctcagccccaactgcgaggcagagagccagacaccaatgggaatcccaatggggaagtcgatgctggtgcttctcaccttcttggccttcgcctcgtgctgcattgctgcttaccgccccagtgagaccctgtgcggcggggagctggtggacaccctccagttcgtctgtggggaccgcggcttctacttcagacttccaggcaggcccgcaagccgtgtgagccgtcgcagccgtggcatcgttgaggagtgctgtttccgcagctgtgacctggccctcctggagacgtactgtgctacccccgccaagtccgagagggacgtgtcgacccctccgaccgtgcttccggacaacttccccagataccccgtgggcaagttcttccaatatgacacctggaagcagtccacccagcgcctgcgcaggggcctgcctgccctcctgcgtgcccgccggggtcacgtgctcgccaaggagctcgaggcgttcagggaggccaaacgtcaccgtcccctgattgctctacccacccaagaccccgcccacgggggcgcccccccagagatggccagcaatcggaagtgagcaaaactgccgcaagtctgcagcccggcgccaccatcctgcagcctcctcctgaccacggacgtttccatcaggttccatcccgaaaatctctcggttccacgtccccctggggcttctcctgacccagtccccgtgccccgcctccccgaaacaggctactctcctcggccccctccatcgggctgaggaagcacagcagcatcttcaaacatgtacaaaatcgattggctttaaacacccttcacataccctccccccaaattatccccaattatccccacacataaaaaatcaaaacattaaactaacccccttcccccccccccacaacaaccctcttaaaactaattggctttttagaaacaccccacaaaagctcagaaattggctttaaaaaaaacaaccaccaaaaaaaatcaattggctaaaaaaaaaaagtattaaaaacgaattggctgagaaacaattggcaaaataaaggaatttggcactccccacccccctctttctcttctcccttggactttgagtcaaattggcctggacttgagtccctgaaccagcaaagagaaaagaaggaccccagaaatcacaggtgggcacgtcgctgctaccgccatctcccttctcacgggaattttcagggtaaactggccatccgaaaatagcaacaacccagactggctcctcactcccttttccatcactaaaaatcacagagcagtcagagggacccagtaagaccaaaggaggggaggacagagcatgaaaaccaaaatccatgcaaatgaaatgtaattggcacgaccctcacccccaaatcttacatctcaattcccatcctaaaaagcactcatactttatgcatccccgcagctacacacacacaacacacagcacacgcatgaacacagcacacacacgagcacagcacacacacaaacgcacagcacacacagcacacagatgagcacacagcacacacacaaacgcacagcacacacacgcacacacatgcacacacagcacacaaacgcacggcacacacacgcacacacatgcacacacagcacacacacaaacgcacagcacacacaaacgcacagcacacacgcacacacagcacacacacgagcacacagcacacaaacgcacagcacacgcacacacatgcacacacagcacacacactagcacacagcacacacacaaagacacagcacacacatgcacacacagcacacacacgcgaacacagcacacacgaacacagcacacacagcacacacacaaacacagcacacacatgcacacagcacacgcacacacagcacacacatgaacacagcacacagcacacacatgcacacacagcacacacgcatgcacagcacacatgaacacagcacacacacaaacacacagcacacacatgcacacacagcacacacactcatgcgcagcacatacatgaacacagctcacagcacacaaacacgcagcacacacgttgcacacgcaagcacccacctgcacacacacatgcgcacacacacgcacacccccacaaaattggatgaaaacaataagcatatctaagcaactacgatatctgtatggatcaggccaaagtcccgctaagattctccaatgttttcatggtctgagccccgctcctgttcccatctccactgcccctcggccctgtctgtgccctgcctctcagaggagggggctcagatggtgcggcctgagtgtgcggccggcggcatttgggatacacccgtagggtgggcggggtgtgtcccaggcctaattccatctttccaccatgacagagatgcccttgtgaggctggcctccttggcgcctgtccccacggcccccgcagcgtgagccacgatgctccccataccccacccattcccgatacaccttacttactgtgtgttggcccagccagagtgaggaaggagtttggccacattggagatggcggtagctgagcagacatgcccccacgagtagcctgactccctggtgtgctcctggaaggaagatcttggggacccccccaccggagcacacctagggatcatctttgcccgtctcctggggaccccccaagaaatgtggagtcctcgggggccgtgcactgatgcggggagtgtgggaagtctggcggttggaggggtgggtggggggcagtgggggctgggcggggggagttctggggtaggaagtggtcccgggagattttggatggaaaagtcaggaggattgacagcagacttgcagaattacatagagaaattaggaacccccaaatttcatgtcaattgatctattccccctctttgtttcttggggcatttttccttttttttttttttttgttttttttttacccctccttagctttatgcgctcagaaaccaaattaaaccccccccccatgtaacaggggggcagtgacaaaagcaagaacgcacgaagccagcctggagaccaccacgtcctgccccccgccatttatcgccctgattggattttgtttttcatctgtccctgttgcttgggttgagttgagggtggagcctcctggggggcactggccactgagcccccttggagaagtcagaggggagtggagaaggccactgtccggcctggcttctggggacagtggctggtccccagaagtcctgagggcggaggggggggttgggcagggtctcctcaggtgtcaggagggtgctcggaggccacaggagggggctcctggctggcctgaggctggccggaggggaaggggctagcaggtgtgtaaacagagggttccatcaggctggggcagggtggccgccttccgcacacttgaggaaccctcccctctccctcggtgacatcttgcccgcccctcagcaccctgccttgtctccaggaggtccgaagctctgtgggacctcttgggggcaaggtggggtgaggccggggagtagggaggtcaggcgggtctgagcccacagagcaggagagctgccaggtctgcccatcgaccaggttgcttgggccccggagcccacgggtctggtgatgccatagcagccaccaccgcggcgcctagggctgcggcagggactcggcctctgggaggtttacctcgcccccacttgtgcccccagctcagcccccctgcacgcagcccgactagcagtctagaggcctgaggcttctgggtcctggtgacggggctggcatgaccccgggggtcgtccatgccagtccgcctcagtcgcagagggtccctcggcaagcgccctgtgagtgggccattcggaacattggacagaagcccaaagagccaaattgtcacaattgtggaacccacattggcctgagatccaaaacgcttcgaggcaccccaaattacctgcccattcgtcaggacacccacccacccagtgttatattctgcctcgccggagtgggtgttcccgggggcacttgccgaccagccccttgcgtccccaggtttgcagctctcccctgggccactaaccatcctggcccgggctgcctgtctgacctccgtgcctagtcgtggctctccatcttgtctcctccccgtgtccccaatgtcttcagtggggggccccctcttgggtcccctcctctgccatcacctgaagacccccacgccaaacactgaatgtcacctgtgcctgccgcctcggtccaccttgcggcccgtgtttgactcaactcaactcctttaacgctaatatttccggcaaaatcccatgcttgggttttgtctttaaccttgtaacgcttgcaatcccaataaagcattaaaagtc

SEQ ID NO: 2033 - DNA, 828 bp, Homo sapiens
  source 1..828: mol_type = genomic DNA
aactggacattagcttctcctgtgaaagagacttccagcttcctcctcctcctcttcctcctcctcctcctgccccagcgagccttctgctgagctacaccaatgggaatcccaatggggaagtcgatgctggtgcttctcaccttcttggccttcgcctcgtgctgcattgctgcttaccgccccagtgagaccctgtgcggcggggagctggtggacaccctccagttcgtctgtggggaccgcggcttctacttcagacttccaggcaggcccgcaagccgtgtgagccgtcgcagccgtggcatcgttgaggagtgctgtttccgcagctgtgacctggccctcctggagacgtactgtgctacccccgccaagtccgagagggacgtgtcgacccctccgaccgtgcttccggacaacttccccagataccccgtgggcaagttcttccaatatgacacctggaagcagtccacccagcgcctgcgcaggggcctgcctgccctcctgcgtgcccgccggggtcacgtgctcgccaaggagctcgaggcgttcagggaggccaaacgtcaccgtcccctgattgctctacccacccaagaccccgcccacgggggcgcccccccagagatggccagcaatcggaagtgagcaaaactgccgcaagtctgcagcccggcgccaccatcctgcagcctcctcctgaccacggacgtttccatcaggttccatcccgaaaatctctcggttccacgtccccctggggcttctcctgacccagtccccgtgccccgcctccccgaaacaggctactctcctcggccc

SEQ ID NO: 2034 - DNA, 1023 bp, Homo sapiens
  source 1..1023: mol_type = genomic DNA
tccccgggtcttccaacggactgggcgttgctcccggacactgaggactggccccggggtctcgctcaccttcagcagcgtccaccgcctgccacagagcgttcgatcgctcgctgcctgagctcctggtgcgcccgcggacgcagcctccagcttcgcgacaccaatgggaatcccaatggggaagtcgatgctggtgcttctcaccttcttggccttcgcctcgtgctgcattgctgcttaccgccccagtgagaccctgtgcggcggggagctggtggacaccctccagttcgtctgtggggaccgcggcttctacttcagcaggcccgcaagccgtgtgagccgtcgcagccgtggcatcgttgaggagtgctgtttccgcagctgtgacctggccctcctggagacgtactgtgctacccccgccaagtccgagagggacgtgtcgacccctccgaccgtgcttccggacaacttccccagataccccgtgggcaagttcttccaatatgacacctggaagcagtccacccagcgcctgcgcaggggcctgcctgccctcctgcgtgcccgccggggtcacgtgctcgccaaggagctcgaggcgttcagggaggccaaacgtcaccgtcccctgattgctctacccacccaagaccccgcccacgggggcgcccccccagagatggccagcaatcggaagtgagcaaaactgccgcaagtctgcagcccggcgccaccatcctgcagcctcctcctgaccacggacgtttccatcaggttccatcccgaaaatctctcggttccacgtccccctggggcttctcctgacccagtccccgtgccccgcctccccgaaacaggctactctcctcggccccctccatcgggctgaggaagcacagcagcatcttcaaacatgtacaaaatcgattggctttaaacacccttcacataccctccccccaaattatccccaattatccccacacataaaaaatcaaaacattaaactaaccc

SEQ ID NO: 2035 - DNA, 1005 bp, Homo sapiens
  source 1..1005: mol_type = genomic DNA
aactggacattagcttctcctgtgaaagagacttccagcttcctcctcctcctcttcctcctcctcctcctgccccagcgagccttctgctgagctgtagacaccaatgggaatcccaatggggaagtcgatgctggtgcttctcaccttcttggccttcgcctcgtgctgcattgctgcttaccgccccagtgagaccctgtgcggcggggagctggtggacaccctccagttcgtctgtggggaccgcggcttctacttcagacttccaggcaggcccgcaagccgtgtgagccgtcgcagccgtggcatcgttgaggagtgctgtttccgcagctgtgacctggccctcctggagacgtactgtgctacccccgccaagtccgagagggacgtgtcgacccctccgaccgtgcttccggacaacttccccagataccccgtgggcaagttcttccaatatgacacctggaagcagtccacccagcgcctgcgcaggggcctgcctgccctcctgcgtgcccgccggggtcacgtgctcgccaaggagctcgaggcgttcagggaggccaaacgtcaccgtcccctgattgctctacccacccaagaccccgcccacgggggcgcccccccagagatggccagcaatcggaagtgagcaaaactgccgcaagtctgcagcccggcgccaccatcctgcagcctcctcctgaccacggacgtttccatcaggttccatcccgaaaatctctcggttccacgtccccctggggcttctcctgacccagtccccgtgccccgcctccccgaaacaggctactctcctcggccccctccatcgggctgaggaagcacagcagcatcttcaaacatgtacaaaatcgattggctttaaacacccttcacataccctccccccaaattatccccaattatccccacacataaaaaatcaaaacattaaactaacccccttcccccccccccacaacaaccctcttaaaa

SEQ ID NO: 2036 - DNA, 4527 bp, Homo sapiens
  source 1..4527: mol_type = genomic DNA
gcaaactggacattagcttctcctgtgaaagagacttccagcttcctcctcctcctcttcctcctcctcctcctgccccagcgagccttctgctgagctgtagacaccaatgggaatcccaatggggaagtcgatgctggtgcttctcaccttcttggccttcgcctcgtgctgcattgctgcttaccgccccagtgagaccctgtgcggcggggagctggtggacaccctccagttcgtctgtggggaccgcggcttctacttcagcaggcccgcaagccgtgtgagccgtcgcagccgtggcatcgttgaggagtgctgtttccgcagctgtgacctggccctcctggagacgtactgtgctacccccgccaagtccgagagggacgtgtcgacccctccgaccgtgcttccggacaacttccccagataccccgtgggcaagttcttccaatatgacacctggaagcagtccacccagcgcctgcgcaggggcctgcctgccctcctgcgtgcccgccggggtcacgtgctcgccaaggagctcgaggcgttcagggaggccaaacgtcaccgtcccctgattgctctacccacccaagaccccgcccacgggggcgcccccccagagatggccagcaatcggaagtgagcaaaactgccgcaagtctgcagcccggcgccaccatcctgcagcctcctcctgaccacggacgtttccatcaggttccatcccgaaaatctctcggttccacgtccccctggggcttctcctgacccagtccccgtgccccgcctccccgaaacaggctactctcctcggccccctccatcgggctgaggaagcacagcagcatcttcaaacatgtacaaaatcgattggctttaaacacccttcacataccctccccccaaattatccccaattatccccacacataaaaaatcaaaacattaaactaacccccttcccccccccccacaacaaccctcttaaaactaattggctttttagaaacaccccacaaaagctcagaaattggctttaaaaaaaacaaccaccaaaaaaaatcaattggctaaaaaaaaaaagtattaaaaacgaattggctgagaaacaattggcaaaataaaggaatttggcactccccacccccctctttctcttctcccttggactttgagtcaaattggcctggacttgagtccctgaaccagcaaagagaaaagaaggaccccagaaatcacaggtgggcacgtcgctgctaccgccatctcccttctcacgggaattttcagggtaaactggccatccgaaaatagcaacaacccagactggctcctcactcccttttccatcactaaaaatcacagagcagtcagagggacccagtaagaccaaaggaggggaggacagagcatgaaaaccaaaatccatgcaaatgaaatgtaattggcacgaccctcacccccaaatcttacatctcaattcccatcctaaaaagcactcatactttatgcatccccgcagctacacacacacaacacacagcacacgcatgaacacagcacacacacgagcacagcacacacacaaacgcacagcacacacagcacacagatgagcacacagcacacacacaaacgcacagcacacacacgcacacacatgcacacacagcacacaaacgcacggcacacacacgcacacacatgcacacacagcacacacacaaacgcacagcacacacaaacgcacagcacacacgcacacacagcacacacacgagcacacagcacacaaacgcacagcacacgcacacacatgcacacacagcacacacactagcacacagcacacacacaaagacacagcacacacatgcacacacagcacacacacgcgaacacagcacacacgaacacagcacacacagcacacacacaaacacagcacacacatgcacacagcacacgcacacacagcacacacatgaacacagcacacagcacacacatgcacacacagcacacacgcatgcacagcacacatgaacacagcacacacacaaacacacagcacacacatgcacacacagcacacacactcatgcgcagcacatacatgaacacagctcacagcacacaaacacgcagcacacacgttgcacacgcaagcacccacctgcacacacacatgcgcacacacacgcacacccccacaaaattggatgaaaacaataagcatatctaagcaactacgatatctgtatggatcaggccaaagtcccgctaagattctccaatgttttcatggtctgagccccgctcctgttcccatctccactgcccctcggccctgtctgtgccctgcctctcagaggagggggctcagatggtgcggcctgagtgtgcggccggcggcatttgggatacacccgtagggtgggcggggtgtgtcccaggcctaattccatctttccaccatgacagagatgcccttgtgaggctggcctccttggcgcctgtccccacggcccccgcagcgtgagccacgatgctccccataccccacccattcccgatacaccttacttactgtgtgttggcccagccagagtgaggaaggagtttggccacattggagatggcggtagctgagcagacatgcccccacgagtagcctgactccctggtgtgctcctggaaggaagatcttggggacccccccaccggagcacacctagggatcatctttgcccgtctcctggggaccccccaagaaatgtggagtcctcgggggccgtgcactgatgcggggagtgtgggaagtctggcggttggaggggtgggtggggggcagtgggggctgggcggggggagttctggggtaggaagtggtcccgggagattttggatggaaaagtcaggaggattgacagcagacttgcagaattacatagagaaattaggaacccccaaatttcatgtcaattgatctattccccctctttgtttcttggggcatttttccttttttttttttttttgttttttttttacccctccttagctttatgcgctcagaaaccaaattaaaccccccccccatgtaacaggggggcagtgacaaaagcaagaacgcacgaagccagcctggagaccaccacgtcctgccccccgccatttatcgccctgattggattttgtttttcatctgtccctgttgcttgggttgagttgagggtggagcctcctggggggcactggccactgagcccccttggagaagtcagaggggagtggagaaggccactgtccggcctggcttctggggacagtggctggtccccagaagtcctgagggcggaggggggggttgggcagggtctcctcaggtgtcaggagggtgctcggaggccacaggagggggctcctggctggcctgaggctggccggaggggaaggggctagcaggtgtgtaaacagagggttccatcaggctggggcagggtggccgccttccgcacacttgaggaaccctcccctctccctcggtgacatcttgcccgcccctcagcaccctgccttgtctccaggaggtccgaagctctgtgggacctcttgggggcaaggtggggtgaggccggggagtagggaggtcaggcgggtctgagcccacagagcaggagagctgccaggtctgcccatcgaccaggttgcttgggccccggagcccacgggtctggtgatgccatagcagccaccaccgcggcgcctagggctgcggcagggactcggcctctgggaggtttacctcgcccccacttgtgcccccagctcagcccccctgcacgcagcccgactagcagtctagaggcctgaggcttctgggtcctggtgacggggctggcatgaccccgggggtcgtccatgccagtccgcctcagtcgcagagggtccctcggcaagcgccctgtgagtgggccattcggaacattggacagaagcccaaagagccaaattgtcacaattgtggaacccacattggcctgagatccaaaacgcttcgaggcaccccaaattacctgcccattcgtcaggacacccacccacccagtgttatattctgcctcgccggagtgggtgttcccgggggcacttgccgaccagccccttgcgtccccaggtttgcagctctcccctgggccactaaccatcctggcccgggctgcctgtctgacctccgtgcctagtcgtggctctccatcttgtctcctccccgtgtccccaatgtcttcagtggggggccccctcttgggtcccctcctctgccatcacctgaagacccccacgccaaacactgaatgtcacctgtgcctgccgcctcggtccaccttgcggcccgtgtttgactcaactcaactcctttaacgctaatatttccggcaaaatcccatgcttgggttttgtctttaaccttgtaacgcttgcaatcccaataaagcattaaaagtcatgatcttc

SEQ ID NO: 2037 - DNA, 5179 bp, Homo sapiens
  source 1..5179: mol_type = genomic DNA
cgcctgtccccctcccgaggcccgggctcgcgacggcagagggctccgtcggcccaaaccgagctgggcgcccgcggtccgggtgcagcctccactccgccccccagtcaccgcctcccccggcccctcgacgtggcgcccttccctccgcttctctgtgctccccgcgcccctcttggcgtctggccccggcccccgctctttctcccgcaaccttcccttcgctccctcccgtcccccccagctcctagcctccgactccctccccccctcacgcccgccctctcgccttcgccgaaccaaagtggattaattacacgctttctgtttctctccgtgctgttctctcccgctgtgcgcctgcccgcctctcgctgtcctctctccccctcgccctctcttcggcccccccctttcacgttcactctgtctctcccactatctctgcccccctctatccttgatacaacagctgacctcatttcccgataccttttcccccccgaaaagtacaacatctggcccgccccagcccgaagacagcccgtcctccctggacaatcagacgaattctccccccccccccaaaaaaaagccatccccccgctctgccccgtcgcacattcggcccccgcgactcggccagagcggcgctggcagaggagtgtccggcaggagggccaacgcccgctgttcggtttgcgacacgcagcagggaggtgggcggcagcgtcgccggcttccagacaccaatgggaatcccaatggggaagtcgatgctggtgcttctcaccttcttggccttcgcctcgtgctgcattgctgcttaccgccccagtgagaccctgtgcggcggggagctggtggacaccctccagttcgtctgtggggaccgcggcttctacttcagacttccaggcaggcccgcaagccgtgtgagccgtcgcagccgtggcatcgttgaggagtgctgtttccgcagctgtgacctggccctcctggagacgtactgtgctacccccgccaagtccgagagggacgtgtcgacccctccgaccgtgcttccggacaacttccccagataccccgtgggcaagttcttccaatatgacacctggaagcagtccacccagcgcctgcgcaggggcctgcctgccctcctgcgtgcccgccggggtcacgtgctcgccaaggagctcgaggcgttcagggaggccaaacgtcaccgtcccctgattgctctacccacccaagaccccgcccacgggggcgcccccccagagatggccagcaatcggaagtgagcaaaactgccgcaagtctgcagcccggcgccaccatcctgcagcctcctcctgaccacggacgtttccatcaggttccatcccgaaaatctctcggttccacgtccccctggggcttctcctgacccagtccccgtgccccgcctccccgaaacaggctactctcctcggccccctccatcgggctgaggaagcacagcagcatcttcaaacatgtacaaaatcgattggctttaaacacccttcacataccctccccccaaattatccccaattatccccacacataaaaaatcaaaacattaaactaacccccttcccccccccccacaacaaccctcttaaaactaattggctttttagaaacaccccacaaaagctcagaaattggctttaaaaaaaacaaccaccaaaaaaaatcaattggctaaaaaaaaaaagtattaaaaacgaattggctgagaaacaattggcaaaataaaggaatttggcactccccacccccctctttctcttctcccttggactttgagtcaaattggcctggacttgagtccctgaaccagcaaagagaaaagaaggaccccagaaatcacaggtgggcacgtcgctgctaccgccatctcccttctcacgggaattttcagggtaaactggccatccgaaaatagcaacaacccagactggctcctcactcccttttccatcactaaaaatcacagagcagtcagagggacccagtaagaccaaaggaggggaggacagagcatgaaaaccaaaatccatgcaaatgaaatgtaattggcacgaccctcacccccaaatcttacatctcaattcccatcctaaaaagcactcatactttatgcatccccgcagctacacacacacaacacacagcacacgcatgaacacagcacacacacgagcacagcacacacacaaacgcacagcacacacagcacacagatgagcacacagcacacacacaaacgcacagcacacacacgcacacacatgcacacacagcacacaaacgcacggcacacacacgcacacacatgcacacacagcacacacacaaacgcacagcacacacaaacgcacagcacacacgcacacacagcacacacacgagcacacagcacacaaacgcacagcacacgcacacacatgcacacacagcacacacactagcacacagcacacacacaaagacacagcacacacatgcacacacagcacacacacgcgaacacagcacacacgaacacagcacacacagcacacacacaaacacagcacacacatgcacacagcacacgcacacacagcacacacatgaacacagcacacagcacacacatgcacacacagcacacacgcatgcacagcacacatgaacacagcacacacacaaacacacagcacacacatgcacacacagcacacacactcatgcgcagcacatacatgaacacagctcacagcacacaaacacgcagcacacacgttgcacacgcaagcacccacctgcacacacacatgcgcacacacacgcacacccccacaaaattggatgaaaacaataagcatatctaagcaactacgatatctgtatggatcaggccaaagtcccgctaagattctccaatgttttcatggtctgagccccgctcctgttcccatctccactgcccctcggccctgtctgtgccctgcctctcagaggagggggctcagatggtgcggcctgagtgtgcggccggcggcatttgggatacacccgtagggtgggcggggtgtgtcccaggcctaattccatctttccaccatgacagagatgcccttgtgaggctggcctccttggcgcctgtccccacggcccccgcagcgtgagccacgatgctccccataccccacccattcccgatacaccttacttactgtgtgttggcccagccagagtgaggaaggagtttggccacattggagatggcggtagctgagcagacatgcccccacgagtagcctgactccctggtgtgctcctggaaggaagatcttggggacccccccaccggagcacacctagggatcatctttgcccgtctcctggggaccccccaagaaatgtggagtcctcgggggccgtgcactgatgcggggagtgtgggaagtctggcggttggaggggtgggtggggggcagtgggggctgggcggggggagttctggggtaggaagtggtcccgggagattttggatggaaaagtcaggaggattgacagcagacttgcagaattacatagagaaattaggaacccccaaatttcatgtcaattgatctattccccctctttgtttcttggggcatttttccttttttttttttttttgttttttttttacccctccttagctttatgcgctcagaaaccaaattaaaccccccccccatgtaacaggggggcagtgacaaaagcaagaacgcacgaagccagcctggagaccaccacgtcctgccccccgccatttatcgccctgattggattttgtttttcatctgtccctgttgcttgggttgagttgagggtggagcctcctggggggcactggccactgagcccccttggagaagtcagaggggagtggagaaggccactgtccggcctggcttctggggacagtggctggtccccagaagtcctgagggcggaggggggggttgggcagggtctcctcaggtgtcaggagggtgctcggaggccacaggagggggctcctggctggcctgaggctggccggaggggaaggggctagcaggtgtgtaaacagagggttccatcaggctggggcagggtggccgccttccgcacacttgaggaaccctcccctctccctcggtgacatcttgcccgcccctcagcaccctgccttgtctccaggaggtccgaagctctgtgggacctcttgggggcaaggtggggtgaggccggggagtagggaggtcaggcgggtctgagcccacagagcaggagagctgccaggtctgcccatcgaccaggttgcttgggccccggagcccacgggtctggtgatgccatagcagccaccaccgcggcgcctagggctgcggcagggactcggcctctgggaggtttacctcgcccccacttgtgcccccagctcagcccccctgcacgcagcccgactagcagtctagaggcctgaggcttctgggtcctggtgacggggctggcatgaccccgggggtcgtccatgccagtccgcctcagtcgcagagggtccctcggcaagcgccctgtgagtgggccattcggaacattggacagaagcccaaagagccaaattgtcacaattgtggaacccacattggcctgagatccaaaacgcttcgaggcaccccaaattacctgcccattcgtcaggacacccacccacccagtgttatattctgcctcgccggagtgggtgttcccgggggcacttgccgaccagccccttgcgtccccaggtttgcagctctcccctgggccactaaccatcctggcccgggctgcctgtctgacctccgtgcctagtcgtggctctccatcttgtctcctccccgtgtccccaatgtcttcagtggggggccccctcttgggtcccctcctctgccatcacctgaagacccccacgccaaacactgaatgtcacctgtgcctgccgcctcggtccaccttgcggcccgtgtttgactcaactcaactcctttaacgctaatatttccggcaaaatcccatgcttgggttttgtctttaaccttgtaacgcttgcaatcccaataaagcattaaaagtcatgatcttc

SEQ ID NO: 2038 - DNA, 5585 bp, Homo sapiens
  source 1..5585: mol_type = genomic DNA
gcctgctctccggcggagctgcgtgaggcccggccggccccggccccccccttccggccgcccccgcctcctggcccacgcctgcccgcgctctgcccaccagcgcctccatcgggcaaggcggccccgcgtcgacgccgcccgctgcctcgctgctgactcccgtcccgggcgccgtccgcggggtcgcgctccgccgggcctgcggattccccgccgcctcctcttcatctacctcaactccccccatccccgcttcgcccgaggaggcggttccccccgcaggcagtccggctcgcaggccgccggcgttgtcacccccccccgcgctccccctccagccctccccccggcgcgcagcctcgggccgctcccctttccgcgctgcgtcccggagcggccccggtgccgccaccgcctgtccccctcccgaggcccgggctcgcgacggcagagggctccgtcggcccaaaccgagctgggcgcccgcggtccgggtgcagcctccactccgccccccagtcaccgcctcccccggcccctcgacgtggcgcccttccctccgcttctctgtgctccccgcgcccctcttggcgtctggccccggcccccgctctttctcccgcaaccttcccttcgctccctcccgtcccccccagctcctagcctccgactccctccccccctcacgcccgccctctcgccttcgccgaaccaaagtggattaattacacgctttctgtttctctccgtgctgttctctcccgctgtgcgcctgcccgcctctcgctgtcctctctccccctcgccctctcttcggcccccccctttcacgttcactctgtctctcccactatctctgcccccctctatccttgatacaacagctgacctcatttcccgataccttttcccccccgaaaagtacaacatctggcccgccccagcccgaagacagcccgtcctccctggacaatcagacgaattctccccccccccccaaaaaaaagccatccccccgctctgccccgtcgcacattcggcccccgcgactcggccagagcggcgctggcagaggagtgtccggcaggagggccaacgcccgctgttcggtttgcgacacgcagcagggaggtgggcggcagcgtcgccggcttccagacaccaatgggaatcccaatggggaagtcgatgctggtgcttctcaccttcttggccttcgcctcgtgctgcattgctgcttaccgccccagtgagaccctgtgcggcggggagctggtggacaccctccagttcgtctgtggggaccgcggcttctacttcagcaggcccgcaagccgtgtgagccgtcgcagccgtggcatcgttgaggagtgctgtttccgcagctgtgacctggccctcctggagacgtactgtgctacccccgccaagtccgagagggacgtgtcgacccctccgaccgtgcttccggacaacttccccagataccccgtgggcaagttcttccaatatgacacctggaagcagtccacccagcgcctgcgcaggggcctgcctgccctcctgcgtgcccgccggggtcacgtgctcgccaaggagctcgaggcgttcagggaggccaaacgtcaccgtcccctgattgctctacccacccaagaccccgcccacgggggcgcccccccagagatggccagcaatcggaagtgagcaaaactgccgcaagtctgcagcccggcgccaccatcctgcagcctcctcctgaccacggacgtttccatcaggttccatcccgaaaatctctcggttccacgtccccctggggcttctcctgacccagtccccgtgccccgcctccccgaaacaggctactctcctcggccccctccatcgggctgaggaagcacagcagcatcttcaaacatgtacaaaatcgattggctttaaacacccttcacataccctccccccaaattatccccaattatccccacacataaaaaatcaaaacattaaactaacccccttcccccccccccacaacaaccctcttaaaactaattggctttttagaaacaccccacaaaagctcagaaattggctttaaaaaaaacaaccaccaaaaaaaatcaattggctaaaaaaaaaaagtattaaaaacgaattggctgagaaacaattggcaaaataaaggaatttggcactccccacccccctctttctcttctcccttggactttgagtcaaattggcctggacttgagtccctgaaccagcaaagagaaaagaaggaccccagaaatcacaggtgggcacgtcgctgctaccgccatctcccttctcacgggaattttcagggtaaactggccatccgaaaatagcaacaacccagactggctcctcactcccttttccatcactaaaaatcacagagcagtcagagggacccagtaagaccaaaggaggggaggacagagcatgaaaaccaaaatccatgcaaatgaaatgtaattggcacgaccctcacccccaaatcttacatctcaattcccatcctaaaaagcactcatactttatgcatccccgcagctacacacacacaacacacagcacacgcatgaacacagcacacacacgagcacagcacacacacaaacgcacagcacacacagcacacagatgagcacacagcacacacacaaacgcacagcacacacacgcacacacatgcacacacagcacacaaacgcacggcacacacacgcacacacatgcacacacagcacacacacaaacgcacagcacacacaaacgcacagcacacacgcacacacagcacacacacgagcacacagcacacaaacgcacagcacacgcacacacatgcacacacagcacacacactagcacacagcacacacacaaagacacagcacacacatgcacacacagcacacacacgcgaacacagcacacacgaacacagcacacacagcacacacacaaacacagcacacacatgcacacagcacacgcacacacagcacacacatgaacacagcacacagcacacacatgcacacacagcacacacgcatgcacagcacacatgaacacagcacacacacaaacacacagcacacacatgcacacacagcacacacactcatgcgcagcacatacatgaacacagctcacagcacacaaacacgcagcacacacgttgcacacgcaagcacccacctgcacacacacatgcgcacacacacgcacacccccacaaaattggatgaaaacaataagcatatctaagcaactacgatatctgtatggatcaggccaaagtcccgctaagattctccaatgttttcatggtctgagccccgctcctgttcccatctccactgcccctcggccctgtctgtgccctgcctctcagaggagggggctcagatggtgcggcctgagtgtgcggccggcggcatttgggatacacccgtagggtgggcggggtgtgtcccaggcctaattccatctttccaccatgacagagatgcccttgtgaggctggcctccttggcgcctgtccccacggcccccgcagcgtgagccacgatgctccccataccccacccattcccgatacaccttacttactgtgtgttggcccagccagagtgaggaaggagtttggccacattggagatggcggtagctgagcagacatgcccccacgagtagcctgactccctggtgtgctcctggaaggaagatcttggggacccccccaccggagcacacctagggatcatctttgcccgtctcctggggaccccccaagaaatgtggagtcctcgggggccgtgcactgatgcggggagtgtgggaagtctggcggttggaggggtgggtggggggcagtgggggctgggcggggggagttctggggtaggaagtggtcccgggagattttggatggaaaagtcaggaggattgacagcagacttgcagaattacatagagaaattaggaacccccaaatttcatgtcaattgatctattccccctctttgtttcttggggcatttttccttttttttttttttttgttttttttttacccctccttagctttatgcgctcagaaaccaaattaaaccccccccccatgtaacaggggggcagtgacaaaagcaagaacgcacgaagccagcctggagaccaccacgtcctgccccccgccatttatcgccctgattggattttgtttttcatctgtccctgttgcttgggttgagttgagggtggagcctcctggggggcactggccactgagcccccttggagaagtcagaggggagtggagaaggccactgtccggcctggcttctggggacagtggctggtccccagaagtcctgagggcggaggggggggttgggcagggtctcctcaggtgtcaggagggtgctcggaggccacaggagggggctcctggctggcctgaggctggccggaggggaaggggctagcaggtgtgtaaacagagggttccatcaggctggggcagggtggccgccttccgcacacttgaggaaccctcccctctccctcggtgacatcttgcccgcccctcagcaccctgccttgtctccaggaggtccgaagctctgtgggacctcttgggggcaaggtggggtgaggccggggagtagggaggtcaggcgggtctgagcccacagagcaggagagctgccaggtctgcccatcgaccaggttgcttgggccccggagcccacgggtctggtgatgccatagcagccaccaccgcggcgcctagggctgcggcagggactcggcctctgggaggtttacctcgcccccacttgtgcccccagctcagcccccctgcacgcagcccgactagcagtctagaggcctgaggcttctgggtcctggtgacggggctggcatgaccccgggggtcgtccatgccagtccgcctcagtcgcagagggtccctcggcaagcgccctgtgagtgggccattcggaacattggacagaagcccaaagagccaaattgtcacaattgtggaacccacattggcctgagatccaaaacgcttcgaggcaccccaaattacctgcccattcgtcaggacacccacccacccagtgttatattctgcctcgccggagtgggtgttcccgggggcacttgccgaccagccccttgcgtccccaggtttgcagctctcccctgggccactaaccatcctggcccgggctgcctgtctgacctccgtgcctagtcgtggctctccatcttgtctcctccccgtgtccccaatgtcttcagtggggggccccctcttgggtcccctcctctgccatcacctgaagacccccacgccaaacactgaatgtcacctgtgcctgccgcctcggtccaccttgcggcccgtgtttgactcaactcaactcctttaacgctaatatttccggcaaaatcccatgcttgggttttgtctttaaccttgtaacgcttgcaatcccaataaagcattaaaagtcatgatcttc

SEQ ID NO: 2039 - DNA, 934 bp, Homo sapiens
  source 1..934: mol_type = genomic DNA
ggcactgaccagcctgcaaactggacattagcttctcctgtgaaagagacttccagcttcctcctcctcctcttcctcctcctcctcctgccccagcgagccttctgctgagctacaccaatgggaatcccaatggggaagtcgatgctggtgcttctcaccttcttggccttcgcctcgtgctgcattgctgcttaccgccccagtgagaccctgtgcggcggggagctggtggacaccctccagttcgtctgtggggaccgcggcttctacttcagcaggcccgcaagccgtgtgagccgtcgcagccgtggcatcgttgaggagtgctgtttccgcagctgtgacctggccctcctggagacgtactgtgctacccccgccaagtccgagagggacgtgtcgacccctccgaccgtgcttccggacaacttccccagataccccgtgggcaagttcttccaatatgacacctggaagcagtccacccagcgcctgcgcaggggcctgcctgccctcctgcgtgcccgccggggtcacgtgctcgccaaggagctcgaggcgttcagggaggccaaacgtcaccgtcccctgattgctctacccacccaagaccccgcccacgggggcgcccccccagagatggccagcaatcggaagtgagcaaaactgccgcaagtctgcagcccggcgccaccatcctgcagcctcctcctgaccacggacgtttccatcaggttccatcccgaaaatctctcggttccacgtccccctggggcttctcctgacccagtccccgtgccccgcctccccgaaacaggctactctcctcggccccctccatcgggctgaggaagcacagcagcatcttcaaacatgtacaaaatcgattggctttaaacacccttcacataccctccccccaaattatccc

SEQ ID NO: 2040 - DNA, 1583 bp, Homo sapiens
  source 1..1583: mol_type = genomic DNA
cactgcagcttccccaaccccgcgcacagcgggcactggtttcgggcctctctgtctcctacgaagtccccagagcaactcggatttgggaaatttctctctagcgttgcccaaacacacttgggtcggccgcgcgccctcaggacgtggacagggagggcttccccgtgtccaggaaagcgaccgggcattgcccccagtctcccccaaatttgggcattgtccccgggtcttccaacggactgggcgttgctcccggacactgaggactggccccggggtctcgctcaccttcagcagcgtccaccgcctgccacagagcgttcgatcgctcgctgcctgagctcctggtgcgcccgcggacgcagcctccagcttcgcggagatggtttccccagacccccaaattatcgtggtggcccccgagaccgaactcgcgtctatgcaagtccaacgcactgaggacggggtaaccattatccagatattttgggtgggccgcaaaggcgagctacttagacgcaccccggtgagctcggccatgcagacaccaatgggaatcccaatggggaagtcgatgctggtgcttctcaccttcttggccttcgcctcgtgctgcattgctgcttaccgccccagtgagaccctgtgcggcggggagctggtggacaccctccagttcgtctgtggggaccgcggcttctacttcagcaggcccgcaagccgtgtgagccgtcgcagccgtggcatcgttgaggagtgctgtttccgcagctgtgacctggccctcctggagacgtactgtgctacccccgccaagtccgagagggacgtgtcgacccctccgaccgtgcttccggacaacttccccagataccccgtgggcaagttcttccaatatgacacctggaagcagtccacccagcgcctgcgcaggggcctgcctgccctcctgcgtgcccgccggggtcacgtgctcgccaaggagctcgaggcgttcagggaggccaaacgtcaccgtcccctgattgctctacccacccaagaccccgcccacgggggcgcccccccagagatggccagcaatcggaagtgagcaaaactgccgcaagtctgcagcccggcgccaccatcctgcagcctcctcctgaccacggacgtttccatcaggttccatcccgaaaatctctcggttccacgtccccctggggcttctcctgacccagtccccgtgccccgcctccccgaaacaggctactctcctcggccccctccatcgggctgaggaagcacagcagcatcttcaaacatgtacaaaatcgattggctttaaacacccttcacataccctccccccaaattatccccaattatccccacacataaaaaatcaaaacattaaactaacccccttcccccccccccacaacaaccctcttaaaactaattggctttttagaaacaccccacaaaagctcagaaattggctttaaaaaaaacaaccaccaaaaaaaatcaattggctaaaaaaaaaaagtattaaaaacgaattggctgagaaacaattggcaaaataaaggaat

SEQ ID NO: 2041 - DNA, 2508 bp, Homo sapiens
  source 1..2508: mol_type = genomic DNA
ccagatgcgagcactgcggctgggcgctgaggatcagccgcttcctgcctggattccacagcttcgcgccgtgtactgtcgccccatccctgcgcgcccagcctgccaagcagcgtgccccggttgcaggcgtcatgcagcgggcgcgacccacgctctgggccgctgcgctgactctgctggtgctgctccgcgggccgccggtggcgcgggctggcgcgagctcggcgggcttgggtcccgtggtgcgctgcgagccgtgcgacgcgcgtgcactggcccagtgcgcgcctccgcccgccgtgtgcgcggagctggtgcgcgagccgggctgcggctgctgcctgacgtgcgcactgagcgagggccagccgtgcggcatctacaccgagcgctgtggctccggccttcgctgccagccgtcgcccgacgaggcgcgaccgctgcaggcgctgctggacggccgcgggctctgcgtcaacgctagtgccgtcagccgcctgcgcgcctacctgctgccagcgccgccagctccaggaaatgctagtgagtcggaggaagaccgcagcgccggcagtgtggagagcccgtccgtctccagcacgcaccgggtgtctgatcccaagttccaccccctccattcaaagataatcatcatcaagaaagggcatgctaaagacagccagcgctacaaagttgactacgagtctcagagcacagatacccagaacttctcctccgagtccaagcgggagacagaatatggtccctgccgtagagaaatggaagacacactgaatcacctgaagttcctcaatgtgctgagtcccaggggtgtacacattcccaactgtgacaagaagggattttataagaaaaagcagtgtcgcccttccaaaggcaggaagcggggcttctgctggtgtgtggataagtatgggcagcctctcccaggctacaccaccaaggggaaggaggacgtgcactgctacagcatgcagagcaagtagacgcctgccgcaaggttaatgtggagctcaaatatgccttattttgcacaaaagactgccaaggacatgaccagcagctggctacagcctcgatttatatttctgtttgtggtgaactgattttttttaaaccaaagtttagaaagaggtttttgaaatgcctatggtttctttgaatggtaaacttgagcatcttttcactttccagtagtcagcaaagagcagtttgaattttcttgtcgcttcctatcaaaatattcagagactcgagcacagcacccagacttcatgcgcccgtggaatgctcaccacatgttggtcgaagcggccgaccactgactttgtgacttaggcggctgtgttgcctatgtagagaacacgcttcacccccactccccgtacagtgcgcacaggctttatcgagaataggaaaacctttaaaccccggtcatccggacatcccaacgcatgctcctggagctcacagccttctgtggtgtcatttctgaaacaagggcgtggatccctcaaccaagaagaatgtttatgtcttcaagtgacctgtactgcttggggactattggagaaaataaggtggagtcctacttgtttaaaaaatatgtatctaagaatgttctagggcactctgggaacctataaaggcaggtatttcgggccctcctcttcaggaatcttcctgaagacatggcccagtcgaaggcccaggatggcttttgctgcggccccgtggggtaggagggacagagagacagggagagtcagcctccacattcagaggcatcacaagtaatggcacaattcttcggatgactgcagaaaatagtgttttgtagttcaacaactcaagacgaagcttatttctgaggataagctctttaaaggcaaagctttattttcatctctcatcttttgtcctccttagcacaatgtaaaaaagaatagtaatatcagaacaggaaggaggaatggcttgctggggagcccatccaggacactgggagcacatagagattcacccatgtttgttgaacttagagtcattctcatgcttttctttataattcacacatatatgcagagaagatatgttcttgttaacattgtatacaacatagccccaaatatagtaagatctatactagataatcctagatgaaatgttagagatgctatatgatacaactgtggccatgactgaggaaaggagctcacgcccagagactgggctgctctcccggaggccaaacccaagaaggtctggcaaagtcaggctcagggagactctgccctgctgcagacctcggtgtggacacacgctgcatagagctctccttgaaaacagaggggtctcaagacattctgcctacctattagcttttctttatttttttaactttttggggggaaaagtatttttgagaagtttgtcttgcaatgtatttataaatagtaaataaagtttttaccattaaaaaaa

SEQ ID NO: 2042 - DNA, 1050 bp, Homo sapiens
  source 1..1050: mol_type = genomic DNA
gcgctgaggatcagccgcttcctgcctggattccacagcttcgcgccgtgtactgtcgccccatccctgcgcgcccagcctgccaagcagcgtgccccggttgcaggcgtcatgcagcgggcgcgacccacgctctgggccgctgcgctgactctgctggtgctgctccgcgggccgccggtggcgcgggctggcgcgagctcggcgggcttgggtcccgtggtgcgctgcgagccgtgcgacgcgcgtgcactggcccagtgcgcgcctccgcccgccgtgtgcgcggagctggtgcgcgagccgggctgcggctgctgcctgacgtgcgcactgagcgagggccagccgtgcggcatctacaccgagcgctgtggctccggccttcgctgccagccgtcgcccgacgaggcgcgaccgctgcaggcgctgctggacggccgcgggctctgcgtcaacgctagtgccgtcagccgcctgcgcgcctacctgctgccagcgccgccagctccaggtgagccgcccgcgccaggaaatgctagtgagtcggaggaagaccgcagcgccggcagtgtggagagcccgtccgtctccagcacgcaccgggtgtctgatcccaagttccaccccctccattcaaagataatcatcatcaagaaagggcatgctaaagacagccagcgctacaaagttgactacgagtctcagagcacagatacccagaacttctcctccgagtccaagcgggagacagaatatggtccctgccgtagagaaatggaagacacactgaatcacctgaagttcctcaatgtgctgagtcccaggggtgtacacattcccaactgtgacaagaagggattttataagaaaaagcagtgtcgcccttccaaaggcaggaagcggggcttctgctggtgtgtggataagtatgggcagcctctcccaggctacaccaccaaggggaaggaggacgtgcactgctacagcatgcagagcaagtagacgcctgccgcaaggttaatgtggagctcaaatatgccttatttt

SEQ ID NO: 2043 - DNA, 2208 bp, Homo sapiens
  source 1..2208: mol_type = genomic DNA
agatgcgagcactgcggctgggcgctgaggatcagccgcttcctgcctggattccacagcttcgcgccgtgtactgtcgccccatccctgcgcgcccagcctgccaagcagcgtgccccggttgcaggcgtcatgcagcgggcgcgaccgctgcaggcgctgctggacggccgcgggctctgcgtcaacgctagtgccgtcagccgcctgcgcgcctacctgctgccagcgccgccagctccaggaaatgctagtgagtcggaggaagaccgcagcgccggcagtgtggagagcccgtccgtctccagcacgcaccgggtgtctgatcccaagttccaccccctccattcaaagataatcatcatcaagaaagggcatgctaaagacagccagcgctacaaagttgactacgagtctcagagcacagatacccagaacttctcctccgagtccaagcgggagacagaatatggtccctgccgtagagaaatggaagacacactgaatcacctgaagttcctcaatgtgctgagtcccaggggtgtacacattcccaactgtgacaagaagggattttataagaaaaagcagtgtcgcccttccaaaggcaggaagcggggcttctgctggtgtgtggataagtatgggcagcctctcccaggctacaccaccaaggggaaggaggacgtgcactgctacagcatgcagagcaagtagacgcctgccgcaaggttaatgtggagctcaaatatgccttattttgcacaaaagactgccaaggacatgaccagcagctggctacagcctcgatttatatttctgtttgtggtgaactgattttttttaaaccaaagtttagaaagaggtttttgaaatgcctatggtttctttgaatggtaaacttgagcatcttttcactttccagtagtcagcaaagagcagtttgaattttcttgtcgcttcctatcaaaatattcagagactcgagcacagcacccagacttcatgcgcccgtggaatgctcaccacatgttggtcgaagcggccgaccactgactttgtgacttaggcggctgtgttgcctatgtagagaacacgcttcacccccactccccgtacagtgcgcacaggctttatcgagaataggaaaacctttaaaccccggtcatccggacatcccaacgcatgctcctggagctcacagccttctgtggtgtcatttctgaaacaagggcgtggatccctcaaccaagaagaatgtttatgtcttcaagtgacctgtactgcttggggactattggagaaaataaggtggagtcctacttgtttaaaaaatatgtatctaagaatgttctagggcactctgggaacctataaaggcaggtatttcgggccctcctcttcaggaatcttcctgaagacatggcccagtcgaaggcccaggatggcttttgctgcggccccgtggggtaggagggacagagagacagggagagtcagcctccacattcagaggcatcacaagtaatggcacaattcttcggatgactgcagaaaatagtgttttgtagttcaacaactcaagacgaagcttatttctgaggataagctctttaaaggcaaagctttattttcatctctcatcttttgtcctccttagcacaatgtaaaaaagaatagtaatatcagaacaggaaggaggaatggcttgctggggagcccatccaggacactgggagcacatagagattcacccatgtttgttgaacttagagtcattctcatgcttttctttataattcacacatatatgcagagaagatatgttcttgttaacattgtatacaacatagccccaaatatagtaagatctatactagataatcctagatgaaatgttagagatgctatatgatacaactgtggccatgactgaggaaaggagctcacgcccagagactgggctgctctcccggaggccaaacccaagaaggtctggcaaagtcaggctcagggagactctgccctgctgcagacctcggtgtggacacacgctgcatagagctctccttgaaaacagaggggtctcaagacattctgcctacctattagcttttctttatttttttaactttttggggggaaaagtatttttgagaagtttgtcttgcaatgtatttataaatagtaaataaagtttttaccatt

SEQ ID NO: 2044 - DNA, 810 bp, Homo sapiens
  source 1..810: mol_type = genomic DNA
gtcggaggaagaccgcagcgccggcagtgtggagagcccgtccgtctccagcacgcaccgggtgtctgatcccaagttccaccccctccattcaaagataatcatcatcaagaaagggcatgctaaagacagccagcgctacaaagttgactacgagtctcagagcacagatacccagaacttctcctccgagtccaagcgggagacagaatatggtccctgccgtagagaaatggaagacacactgaatcacctgaagttcctcaatgtgctgagtcccaggggtgtacacattcccaactgtgacaagaagggattttataagaaaaagcagtgtcgcccttccaaaggcaggaagcggggcttctgctggtgtgtggataagtatgggcagcctctcccaggctacaccaccaaggggaaggaggacgtgcactgctacagcatgcagagcaagtagacgcctgccgcaagggtgagtactcaggaggggcagcctggggctccagggcctcactgtccttggaccagcctcaggggctgggcgtggccactggcccttccccaggcttacagacccaggagctgcagctcagggccagaaagagcaaagcaaataggacagagccctcagaagggtgcagggagagggagaccccatcaacccaaccaaacaagtgtggggaaggaggccggccagtgcacctcagggacactctgctttatctcagatacctcacagcacctaagctatcattcatccacacacaaagtgaagattttcaaagttaggctttacccgtgaggtct

SEQ ID NO: 2045 - DNA, 894 bp, Homo sapiens
  source 1..894: mol_type = genomic DNA
tggagagcccgtccgtctccagcacgcaccgggtgtctgatcccaagttccaccccctccattcaaagataatcatcatcaagaaagggcatgctaaagacagccagcgctacaaagttgactacgagtctcagagcacagatacccagaacttctcctccgagtccaagcgggagacagaatatggtccctgccgtagagaaatggaagacacactgaatcacctgaagttcctcaatgtgctgagtcccaggggtgtacacattcccaactgtgacaagaagggattttataagaaaaagcagtgtcgcccttccaaaggcaggaagcggggcttctgctggtgtgtggataagtatgggcagcctctcccaggctacaccaccaaggggaaggaggacgtgcactgctacagcatgcagagcaagtagacgcctgccgcaaggatacctcacagcacctaagctatcattcatccacacacaaagtgaagattttcaaagttaggctttacccgtgaggtctggaggtccatttatcttcacagagaaaccgttttaatccgcaagaacctgctaaagatacatgtttctaaattaaagatgtgaatgtgagacagctgaaatagctcagttgggagagcatcagtttgaagatgcagctttttttttctgtaaaatatataatgaatattctgttagtctgtggctaatataattttaataaagttaatttaaatctgatagaaaaatgaaattttaaacgataattttagagaatgctattatatccagtcttcttttttcttttaataaatgagggaactattgggggaaaggaataaatacattttctttcattttattaagacaaatttagtaagcagaagaaatt

SEQ ID NO: 2046 - DNA, 792 bp, Homo sapiens
  source 1..792: mol_type = genomic DNA
atgcagcgggcgcgacccacgctctgggccgcttgcgagccgtgcgacgcgcgtgcactggcccagtgcgcgcctccgcccgccgtgtgcgcggagctggtgcgcgagccgggctgcggctgctgcctgacgtgcgcactgagcgagggccagccgtgcggcatctacaccgagcgctgtggctccggccttcgctgccagccgtcgcccgacgaggcgcgaccgctgcaggcgctgctggacggccgcgggctctgcgtcaacgctagtgccgtcagccgcctgcgcgcctacctgctgccagcgccgccagctccaggaaatgctagtgagtcggaggaagaccgcagcgccggcagtgtggagagcccgtccgtctccagcacgcaccgggtgtctgatcccaagttccaccccctccattcaaagataatcatcatcaagaaagggcatgctaaagacagccagcgctacaaagttgactacgagtctcagagcacagatacccagaacttctcctccgagtccaagcgggagacagaatatggtccctgccgtagagaaatggaagacacactgaatcacctgaagttcctcaatgtgctgagtcccaggggtgtacacattcccaactgtgacaagaagggattttataagaaaaagcagtgtcgcccttccaaaggcaggaagcggggcttctgctggtgtgtggataagtatgggcagcctctcccaggctacaccaccaaggggaaggaggacgtgcactgctacagcatgcagagcaagtag

SEQ ID NO: 2047 - DNA, 2327 bp, Homo sapiens
  source 1..2327: mol_type = genomic DNA
agatgcgagcactgcggctgggcgctgaggatcagccgcttcctgcctggattccacagcttcgcgccgtgtactgtcgccccatccctgcgcgcccagcctgccaagcagcgtgccccggttgcaggcgtcatgcagcgggcgcgacccacgctctgggccgctgcgctgactctgctggtgctgctccgcgggccgccggtggcgcgggctggcgcgagctcggcgggcttgggtcccgtggtgcgctgcgagccgtgcggcatctacaccgagcgctgctggacggccgcgggctctgcgtcaacgctagtgccgtcagccgcctgcgcgcctacctgctgccagcgccgccagctccaggaaatgctagtgagtcggaggaagaccgcagcgccggcagtgtggagagcccgtccgtctccagcacgcaccgggtgtctgatcccaagttccaccccctccattcaaagataatcatcatcaagaaagggcatgctaaagacagccagcgctacaaagttgactacgagtctcagagcacagatacccagaacttctcctccgagtccaagcgggagacagaatatggtccctgccgtagagaaatggaagacacactgaatcacctgaagttcctcaatgtgctgagtcccaggggtgtacacattcccaactgtgacaagaagggattttataagaaaaagcagtgtcgcccttccaaaggcaggaagcggggcttctgctggtgtgtggataagtatgggcagcctctcccaggctacaccaccaaggggaaggaggacgtgcactgctacagcatgcagagcaagtagacgcctgccgcaaggttaatgtggagctcaaatatgccttattttgcacaaaagactgccaaggacatgaccagcagctggctacagcctcgatttatatttctgtttgtggtgaactgattttttttaaaccaaagtttagaaagaggtttttgaaatgcctatggtttctttgaatggtaaacttgagcatcttttcactttccagtagtcagcaaagagcagtttgaattttcttgtcgcttcctatcaaaatattcagagactcgagcacagcacccagacttcatgcgcccgtggaatgctcaccacatgttggtcgaagcggccgaccactgactttgtgacttaggcggctgtgttgcctatgtagagaacacgcttcacccccactccccgtacagtgcgcacaggctttatcgagaataggaaaacctttaaaccccggtcatccggacatcccaacgcatgctcctggagctcacagccttctgtggtgtcatttctgaaacaagggcgtggatccctcaaccaagaagaatgtttatgtcttcaagtgacctgtactgcttggggactattggagaaaataaggtggagtcctacttgtttaaaaaatatgtatctaagaatgttctagggcactctgggaacctataaaggcaggtatttcgggccctcctcttcaggaatcttcctgaagacatggcccagtcgaaggcccaggatggcttttgctgcggccccgtggggtaggagggacagagagacagggagagtcagcctccacattcagaggcatcacaagtaatggcacaattcttcggatgactgcagaaaatagtgttttgtagttcaacaactcaagacgaagcttatttctgaggataagctctttaaaggcaaagctttattttcatctctcatcttttgtcctccttagcacaatgtaaaaaagaatagtaatatcagaacaggaaggaggaatggcttgctggggagcccatccaggacactgggagcacatagagattcacccatgtttgttgaacttagagtcattctcatgcttttctttataattcacacatatatgcagagaagatatgttcttgttaacattgtatacaacatagccccaaatatagtaagatctatactagataatcctagatgaaatgttagagatgctatatgatacaactgtggccatgactgaggaaaggagctcacgcccagagactgggctgctctcccggaggccaaacccaagaaggtctggcaaagtcaggctcagggagactctgccctgctgcagacctcggtgtggacacacgctgcatagagctctccttgaaaacagaggggtctcaagacattctgcctacctattagcttttctttatttttttaactttttggggggaaaagtatttttgagaagtttgtcttgcaatgtatttataaatagtaaataaagtttttaccatt

SEQ ID NO: 2048 - DNA, 2193 bp, Homo sapiens
  source 1..2193: mol_type = genomic DNA
agatgcgagcactgcggctgggcgctgaggatcagccgcttcctgcctggattccacagcttcgcgccgtgtactgtcgccccatccctgcgcgcccagcctgccaagcagcgtgccccggttgcaggcgtcatgcagcgggcgcgacccacgctctgggccgctgcgctgactctgctggacggccgcgggctctgcgcctacctgctgccagcgccgccagctccaggaaatgctagtgagtcggaggaagaccgcagcgccggcagtgtggagagcccgtccgtctccagcacgcaccgggtgtctgatcccaagttccaccccctccattcaaagataatcatcatcaagaaagggcatgctaaagacagccagcgctacaaagttgactacgagtctcagagcacagatacccagaacttctcctccgagtccaagcgggagacagaatatggtccctgccgtagagaaatggaagacacactgaatcacctgaagttcctcaatgtgctgagtcccaggggtgtacacattcccaactgtgacaagaagggattttataagaaaaagcagtgtcgcccttccaaaggcaggaagcggggcttctgctggtgtgtggataagtatgggcagcctctcccaggctacaccaccaaggggaaggaggacgtgcactgctacagcatgcagagcaagtagacgcctgccgcaaggttaatgtggagctcaaatatgccttattttgcacaaaagactgccaaggacatgaccagcagctggctacagcctcgatttatatttctgtttgtggtgaactgattttttttaaaccaaagtttagaaagaggtttttgaaatgcctatggtttctttgaatggtaaacttgagcatcttttcactttccagtagtcagcaaagagcagtttgaattttcttgtcgcttcctatcaaaatattcagagactcgagcacagcacccagacttcatgcgcccgtggaatgctcaccacatgttggtcgaagcggccgaccactgactttgtgacttaggcggctgtgttgcctatgtagagaacacgcttcacccccactccccgtacagtgcgcacaggctttatcgagaataggaaaacctttaaaccccggtcatccggacatcccaacgcatgctcctggagctcacagccttctgtggtgtcatttctgaaacaagggcgtggatccctcaaccaagaagaatgtttatgtcttcaagtgacctgtactgcttggggactattggagaaaataaggtggagtcctacttgtttaaaaaatatgtatctaagaatgttctagggcactctgggaacctataaaggcaggtatttcgggccctcctcttcaggaatcttcctgaagacatggcccagtcgaaggcccaggatggcttttgctgcggccccgtggggtaggagggacagagagacagggagagtcagcctccacattcagaggcatcacaagtaatggcacaattcttcggatgactgcagaaaatagtgttttgtagttcaacaactcaagacgaagcttatttctgaggataagctctttaaaggcaaagctttattttcatctctcatcttttgtcctccttagcacaatgtaaaaaagaatagtaatatcagaacaggaaggaggaatggcttgctggggagcccatccaggacactgggagcacatagagattcacccatgtttgttgaacttagagtcattctcatgcttttctttataattcacacatatatgcagagaagatatgttcttgttaacattgtatacaacatagccccaaatatagtaagatctatactagataatcctagatgaaatgttagagatgctatatgatacaactgtggccatgactgaggaaaggagctcacgcccagagactgggctgctctcccggaggccaaacccaagaaggtctggcaaagtcaggctcagggagactctgccctgctgcagacctcggtgtggacacacgctgcatagagctctccttgaaaacagaggggtctcaagacattctgcctacctattagcttttctttatttttttaactttttggggggaaaagtatttttgagaagtttgtcttgcaatgtatttataaatagtaaataaagtttttaccatt

SEQ ID NO: 2049 - DNA, 2406 bp, Homo sapiens
  source 1..2406: mol_type = genomic DNA
atgcagcgggcgcgacccacgctctgggccgctgcgctgactctgctggtgctgctccgcgggccgccggtggcgcgggctggcgcgagctcggcgggcttgggtcccgtggtgcgccgcgagccgggctgcggctgctgcctgacgtgcgcactgagcgagggccagccgtgcggcatctacaccgagcgctgtggctccggccttcgctgccagccgtcgcccgacgaggcgcgaccgctgcaggcgctgctggacggccgcgggctctgcgtcaacgctagtgccgtcagccgcctgcgcgcctacctgctgccagcgccgccagctccaggaaatgctagtgagtcggaggaagaccgcagcgccggcagtgtggagagcccgtccgtctccagcacgcaccgggtgtctgatcccaagttccaccccctccattcaaagataatcatcatcaagaaagggcatgctaaagacagccagcgctacaaagttgactacgagtctcagagcacagatacccagaacttctcctccgagtccaagcgggagacagaatatggtccctgccgtagagaaatggaagacacactgaatcacctgaagttcctcaatgtgctgagtcccaggggtgtacacattcccaactgtgacaagaagggattttataagaaaaagcagtgtcgcccttccaaaggcaggaagcggggcttctgctggtgtgtggataagtatgggcagcctctcccaggctacaccaccaaggggaaggaggacgtgcactgctacagcatgcagagcaagtagacgcctgccgcaaggttaatgtggagctcaaatatgccttattttgcacaaaagactgccaaggacatgaccagcagctggctacagcctcgatttatatttctgtttgtggtgaactgattttttttaaaccaaagtttagaaagaggtttttgaaatgcctatggtttctttgaatggtaaacttgagcatcttttcactttccagtagtcagcaaagagcagtttgaattttcttgtcgcttcctatcaaaatattcagagactcgagcacagcacccagacttcatgcgcccgtggaatgctcaccacatgttggtcgaagcggccgaccactgactttgtgacttaggcggctgtgttgcctatgtagagaacacgcttcacccccactccccgtacagtgcgcacaggctttatcgagaataggaaaacctttaaaccccggtcatccggacatcccaacgcatgctcctggagctcacagccttctgtggtgtcatttctgaaacaagggcgtggatccctcaaccaagaagaatgtttatgtcttcaagtgacctgtactgcttggggactattggagaaaataaggtggagtcctacttgtttaaaaaatatgtatctaagaatgttctagggcactctgggaacctataaaggcaggtatttcgggccctcctcttcaggaatcttcctgaagacatggcccagtcgaaggcccaggatggcttttgctgcggccccgtggggtaggagggacagagagacagggagagtcagcctccacattcagaggcatcacaagtaatggcacaattcttcggatgactgcagaaaatagtgttttgtagttcaacaactcaagacgaagcttatttctgaggataagctctttaaaggcaaagctttattttcatctctcatcttttgtcctccttagcacaatgtaaaaaagaatagtaatatcagaacaggaaggaggaatggcttgctggggagcccatccaggacactgggagcacatagagattcacccatgtttgttgaacttagagtcattctcatgcttttctttataattcacacatatatgcagagaagatatgttcttgttaacattgtatacaacatagccccaaatatagtaagatctatactagataatcctagatgaaatgttagagatgctatatgatacaactgtggccatgactgaggaaaggagctcacgcccagagactgggctgctctcccggaggccaaacccaagaaggtctggcaaagtcaggctcagggagactctgccctgctgcagacctcggtgtggacacacgctgcatagagctctccttgaaaacagaggggtctcaagacattctgcctacctattagcttttctttatttttttaactttttggggggaaaagtatttttgagaagtttgtcttgcaatgtatttataaatagtaaataaagtttttaccattaaaaaaatatctttccctttgttattgaccatctctgggctttgtatcactaattattttattttattatataataattattttattataataaaatcctgaaagggg

SEQ ID NO: 2050 - DNA, 6215 bp, Homo sapiens
  source 1..6215: mol_type = genomic DNA
ggggaaaagagctaggaaagagctgcaaagcagtgtgggctttttcccttttttgctccttttcattacccctcctccgttttcacccttctccggacttcgcgtagaacctgcgaatttcgaagaggaggtggcaaagtgggagaaaagaggtgttagggtttggggtttttttgtttttgtttttgttttttaatttcttgatttcaacattttctcccaccctctcggctgcagccaacgcctcttacctgttctgcggcgccgcgcaccgctggcagctgagggttagaaagcggggtgtattttagattttaagcaaaaattttaaagataaatccatttttctctcccacccccaacgccatctccactgcatccgatctcattatttcggtggttgcttgggggtgaacaattttgtggctttttttcccctataattctgacccgctcaggcttgagggtttctccggcctccgctcactgcgtgcacctggcgctgccctgcttcccccaacctgttgcaaggctttaattcttgcaactgggacctgctcgcaggcaccccagccctccacctctctctacatttttgcaagtgtctgggggagggcacctgctctacctgccagaaattttaaaacaaaaacaaaaacaaaaaaatctccgggggccctcttggcccctttatccctgcactctcgctctcctgccccaccccgaggtaaagggggcgactaagagaagatggtgttgctcaccgcggtcctcctgctgctggccgcctatgcggggccggcccagagcctgggctccttcgtgcactgcgagccctgcgacgagaaagccctctccatgtgcccccccagccccctgggctgcgagctggtcaaggagccgggctgcggctgctgcatgacctgcgccctggccgaggggcagtcgtgcggcgtctacaccgagcgctgcgcccaggggctgcgctgcctcccccggcaggacgaggagaagccgctgcacgccctgctgcacggccgcggggtttgcctcaacgaaaagagctaccgcgagcaagtcaagatcgagagagactcccgtgagcacgaggagcccaccacctctgagatggccgaggagacctactcccccaagatcttccggcccaaacacacccgcatctccgagctgaaggctgaagcagtgaagaaggaccgcagaaagaagctgacccagtccaagtttgtcgggggagccgagaacactgcccacccccggatcatctctgcacctgagatgagacaggagtctgagcagggcccctgccgcagacacatggaggcttccctgcaggagctcaaagccagcccacgcatggtgccccgtgctgtgtacctgcccaattgtgaccgcaaaggattctacaagagaaagcagtgcaaaccttcccgtggccgcaaacgtggcatctgctggtgcgtggacaagtacgggatgaagctgccaggcatggagtacgttgacggggactttcagtgccacaccttcgacagcagcaacgttgagtgatgcgtccccccccaacctttccctcaccccctcccacccccagccccgactccagccagcgcctccctccaccccaggacgccactcatttcatctcatttaagggaaaaatatatatctatctatttgaggaaactgaggacctcggaatctctagcaagggctcaacttcgaaaatggcaacaacagagatgcaaaaagctaaaaagacaccccccccctttaaatggttttctttttgaggcaagttggatgaacagagaagggaagagaggaagaacgagaggaagagaagggaaggaagtgtttgtgtagaagagagagaaagacgaatagagttaggaaaaggaagacaagcaggtgggcaggaaggacatgcaccgagaccaggcaggggcccaactttcacgtccagccctggcctggggtcgggagaggtgggcgctagaagatgcagcccaggatgtggcaatcaatgacactattggggtttcccaggatggattggtcagggggagaaaggaaaaggcaaaacactccaggacctctcccggatctgtctcctcctctagccagcagtatggacagctggacccctgaacttcctctcctcttacctgggcagagtgttgtctctccccaaatttataaaaactaaaatgcattccattcctctgaaagcaaaacaaattcataattgagtgatattaaatagagaggttttcggaagcagatctgtgaatatgaaatacatgtgcatatttcattccccaggcagacattttttagaaatcaatacatgccccaatattggaaagacttgttcttccacggtgactacagtacatgctgaagcgtgccgtttcagccctcatttaattcaatttgtaagtagcgcagcagcctctgtgggggaggataggctgaaaaaaaaaagtgggctcgtatttatctacaggactccatatagtcatatataggcatataaatctattctttttctttgtttttttctttcttcctttctttcaaaggtttgcattaacttttcaaagtagttcctataggggcattgaggagcttcctcattctgggaaaactgagaaaacccatattctcctaatacaacccgtaatagcatttttgcctgcctcgaggcagagtttcccgtgagcaataaactcagcttttttgtggggcacagtactggatttgacagtgattccccacgtgtgttcatctgcacccaccgagccaggcagaggccagccctccgtggtgcacacagcacgcgcctcagtccatcccattttagtctttaaaccctcaggaagtcacagtctccggacaccacaccacatgagcccaacaggtccacgatggatccaccagtcccaccccagccttttcctttcatctgaacagaatgtgcatttttggaagcctccctcactctccatgctggcagagcaggagggagactgaagtaagagatggcagagggagatggtggcaaaaaggtttagatgcaggagaacagtaagatggatggttccggccagagtcgatgtggggaggaacagagggctgaagggagagggggctgactgttccattctagctttggcacaaagcagcagaaagggggaaaagccaatagaaatttccttagcttccccaccatatgtattttctaggatttgagaggaaagagaggaaaatgggggaatgggttgcaaaatagaaatgagcttaatccaggccgcagagccagggaaggtgagtaactttaggagggtgctagactttagaagccagataggaagaatcagtctaaactggccatgctttggaagggacaagactatgtgctccgctgcccaccttcagcctgcaatgagggactgaggcccacgagtctttccagctcttcctccattctggccagtccctgcatcctccctggggtggaggatggaaggaaagctgggacaagcagggaacgcatgattcagggatgctgtcactcggcagccagattccgaaactcccattctccaatgacttcctcaaccaatgggtggccttgtgactgttctttaaggctgaagatatccaggaaagggggcttggacactggccaaggagaccccttcgtgctgtggacacagctctcttcactctttgctcatggcatgacacagcggagaccgcctccaacaacgaatttggggctacgaagaggaatagcgaaaaagcaaatctgtttcaactgatgggaaccctatagctatagaacttgggggctatctcctatgcccctggacaggacagttggctggggacaggagaagtgctcaatcttcatgagacaaaggggcccgatagggccagcagccacaaggccttgacctgccgagtcagcatgccccatctctctgcacagctgtcccctaaacccaactcacgtttctgtatgtcttaggccagtatcccaaacctcttccacgtcactgttctttccacccattctccctttgcatcttgagcagttatccaactaggatctgccaagtggatactggggtgccactcccctgagaaaagactgagccaggaactacaagctccccccacattcctcccagcctggacctaattcttgagaggggctctctcttcacggactgtgtctggactttgagcaggcttctgccccttgcgttggctctttgctgccagccatcaggtgggggattagagcctggtgtaagtgcgccagactcttccggtttccaaagttcgtgcctgcgaacccaaacctgtgagtctcttctgcatgcaggagtttctcctgggcagctggtcactccccagagaagctgggccttcatggacacatggaactaagcctcccaaatgggagttctggctgagcccagggtggggagatcctgggaagggaggcactggaggaagacggcacctcttcccccatggcagggtgtgagggaggcaggtttggaatggtgcgagtatggcaatctaagcaggggtctggtctctttgactccaggctggcctttggccgactgtctgctcacccagagaccttggactccggactatccatggctccgaatctaagtgctgcccactcccatgctcacacccacagaaggtcttcccatcccctttagattcgtgcctcactccaccagtgaggaagatgcctctgtctttcccacgactgccaggagatagggaagcccagccaggactgaccctccttcctccagcctgccctgacccacctggcaaagcagggcacatggggaggaagagactggaacctttctttgacagccaggcctagacagacaggcctggggacactggccccatgaggggaggaaggcaggcgcacgaggtccagggaggcccttttctgatcatgccccttctctcccaccccatctccccaccaccacctctgtggcctccatggtacccccacagggctggcctcccctagagggtgggcctcaaccacctgctcccgccacgcaccggttagtgagacagggctgccacggcaaccgccaagcccccctcaaggtgggacagtaccccggacccatccactcactcctgagagggctccggcccagaatgggaacctcagagaagagctctaaggagaagaaaccccatagcgtcagagaggatatgtctggcttccaagagaaaggaggctccgttttgcaaagtggaggagggacgagggacaggggtttcaccagccagcaacctgggccttgtactgtctgtgtttttaaaaccactaaagtgcaagaattacattgcactgtttctccactttttattttctcttaggcttttgtttctatttcaaacatactttcttggttttctaatggagtatatagtttagtcatttcacagactctggcctcctctcctgaaatccttttggatggggaaagggaaggtggggagggtccgaggggaaggggaccccagcttccctgtgcccgctcaccccactccaccagtccccggtcgccagccggagtctcctctctaccgccactgtcacaccgtagcccacatggatagcacagttgtcagacaagattccttcagattccgagttgcctaccggttgttttcgttgttgttgttgttgtttttctttttctttttttttttgaagacagcaataaccacagtacatattactgtagttctctatagttttacatacattcataccataactctgttctctcctcttttttgttttcaactttaaaaacaaaaataaacgatgataatctttactggtgaaaaggatggaaaaataaatcaacaaatgcaaccagtttgtgagaaaaaaaaaaaaaagccgaaaaaaaaaaaaaaaacacctgaatgcggaagagctcggctcccgtttagcattttgtacttaaggaaataaaaaaccaacaaaggatctcacattttcttaaaaagtgaagattgctgtatactatttattcaacttataatttatgttactccttgatctttgtcttttgtcatgacaaagcatttatttaataaagttatgcattcagtta

SEQ ID NO: 2051 - DNA, 4189 bp, Homo sapiens
  source 1..4189: mol_type = genomic DNA
gccatcccgcgctctgcgggctgggaggcccgggccaggacgcgagtcctgcgcagccgaggttccccagcgccccctgcagccgcgcgtaggcagagacggagcccggccctgcgcctccgcaccacgcccgggaccccacccagcggcccgtacccggagaagcagcgcgagcacccgaagctcccggctggcggcagaaaccgggagtggggccgggcgagtgcgcggcatcccaggccggcccgaacgctccgcccgcggtgggccgacttcccctcctcttccctctctccttcctttagcccgctggcgccggacacgctgcgcctcatctcttggggcgttcttccccgttggccaaccgtcgcatcccgtgcaactttggggtagtggccgtttagtgttgaatgttccccaccgagagcgcatggcttgggaagcgaggcgcgaacccggcccccgaagggccgccgtccgggagacggtgatgctgttgctgtgcctgggggtcccgaccggccgcccctacaacgtggacactgagagcgcgctgctttaccagggcccccacaacacgctgttcggctactcggtcgtgctgcacagccacggggcgaaccgatggctcctagtgggtgcgcccactgccaactggctcgccaacgcttcagtgatcaatcccggggcgatttacagatgcaggatcggaaagaatcccggccagacgtgcgaacagctccagctgggtagccctaatggagaaccttgtggaaagacttgtttggaagagagagacaatcagtggttgggggtcacactttccagacagccaggagaaaatggatccatcgtgacttgtgggcatagatggaaaaatatattttacataaagaatgaaaataagctccccactggtggttgctatggagtgccccctgatttacgaacagaactgagtaaaagaatagctccgtgttatcaagattatgtgaaaaaatttggagaaaattttgcatcatgtcaagctggaatatccagtttttacacaaaggatttaattgtgatgggggccccaggatcatcttactggactggctctctttttgtctacaatataactacaaataaatacaaggcttttttagacaaacaaaatcaagtaaaatttggaagttatttaggatattcagtcggagctggtcattttcggagccagcatactaccgaagtagtcggaggagctcctcaacatgagcagattggtaaggcatatatattcagcattgatgaaaaagaactaaatatcttacatgaaatgaaaggtaaaaagcttggatcgtactttggagcttctgtctgtgctgtggacctcaatgcagatggcttctcagatctgctcgtgggagcacccatgcagagcaccatcagagaggaaggaagagtgtttgtgtacatcaactctggctcgggagcagtaatgaatgcaatggaaacaaacctcgttggaagtgacaaatatgctgcaagatttggggaatctatagttaatcttggcgacattgacaatgatggctttgaagatgttgctatcggagctccacaagaagatgacttgcaaggtgctatttatatttacaatggccgtgcagatgggatctcgtcaaccttctcacagagaattgaaggacttcagatcagcaaatcgttaagtatgtttggacagtctatatcaggacaaattgatgcagataataatggctatgtagatgtagcagttggtgcttttcggtctgattctgctgtcttgctaaggacaagacctgtagtaattgttgacgcttctttaagccaccctgagtcagtaaatagaacgaaatttgactgtgttgaaaatggatggccttctgtgtgcatagatctaacactttgtttctcatataagggcaaggaagttccaggttacattgttttgttttataacatgagtttggatgtgaacagaaaggcagagtctccaccaagattctatttctcttctaatggaacttctgacgtgattacaggaagcatacaggtgtccagcagagaagctaactgtagaacacatcaagcatttatgcggaaagatgtgcgggacatcctcaccccaattcagattgaagctgcttaccaccttggtcctcatgtcatcagtaaacgaagtacagaggaattcccaccacttcagccaattcttcagcagaagaaagaaaaagacataatgaaaaaaacaataaactttgcaaggttttgtgcccatgaaaattgttctgctgatttacaggtttctgcaaagattgggtttttgaagccccatgaaaataaaacatatcttgctgttgggagtatgaagacattgatgttgaatgtgtccttgtttaatgctggagatgatgcatatgaaacgactctacatgtcaaactacccgtgggtctttatttcattaagattttagagctggaagagaagcaaataaactgtgaagtcacagataactctggcgtggtacaacttgactgcagtattggctatatatatgtagatcatctctcaaggatagatattagctttctcctggatgtgagctcactcagcagagcggaagaggacctcagtatcacagtgcatgctacctgtgaaaatgaagaggaaatggacaatctaaagcacagcagagtgactgtagcaatacctttaaaatatgaggttaagctgactgttcatgggtttgtaaacccaacttcatttgtgtatggatcaaatgatgaaaatgagcctgaaacgtgcatggtggagaaaatgaacttaactttccatgttatcaacactggcaatagtatggctcccaatgttagtgtggaaataatggtaccaaattcttttagcccccaaactgataagctgttcaacattttggatgtccagactactactggagaatgccactttgaaaattatcaaagagtgtgtgcattagagcagcaaaagagtgcaatgcagaccttgaaaggcatagtccggttcttgtccaagactgataagaggctattgtactgcataaaagctgatccacattgtttaaatttcttgtgtaattttgggaaaatggaaagtggaaaagaagccagtgttcatatccaactggaaggccggccatccattttagaaatggatgagacttcagcactcaagtttgaaataagagcaacaggttttccagagccaaatccaagagtaattgaactaaacaaggatgagaatgttgcgcatgttctactggaaggactacatcatcaaagacccaaacgttatttcaccatagtgattatttcaagtagcttgctacttggacttattgtacttctattgatctcatatgttatgtggaaggctggcttctttaaaagacaatacaaatctatcctacaagaagaaaacagaagagacagttggagttatatcaacagtaaaagcaatgatgattaaggacttctttcaaattgagagaatggaaaacagactcaggttgtagtaaagaaatttaaaagacactgtttacaagaaaaaatgaattttgtttggacttcttttactcatgatcttgtgacatattatgtcttcatgcaaggggaaaatctcagcaatgattactctttgagatagaagaactgcaaaggtaataatacagccaaagataatctctcagcttttaaatgggtagagaaacactaaagcattcaatttattcaagaaaagtaagcccttgaagatatcttgaaatgaaagtataactgagttaaattatactggagaagtcttagacttgaaatactacttaccatatgtgcttgcctcagtaaaatgaaccccactgggtgggcagaggttcatttcaaatacatctttgatacttgttcaaaatatgttctttaaaaatataattttttagagagctgttcccaaattttctaacgagtggaccattatcactttaaagccctttatttataatacatttcctacgggctgtgttccaacaaccattttttttcagcagactatgaatattatagtattataggccaaactggcaaacttcagactgaacatgtacactggtttgagcttagtgaaattacttctgga

SEQ ID NO: 2052 - DNA, 2617 bp, Homo sapiens
  source 1..2617: mol_type = genomic DNA
ataacgtctttgtcactaaaatgttccccaggggccttcggcgagtctttttgtttggttttttgtttttaatctgtggctcttgataatttatctagtggttgcctacacctgaaaaacaagacacagtgtttaactatcaacgaaagaactggacggctccccgccgcagtcccactccccgagtttgtggctggcatttgggccacgccgggctgggcggtcacagcgaggggcgcgcagtttggggtcacacagctccgcttctaggccccaaccaccgttaaaaggggaagcccgtgccccatcaggtccgctcttgctgagcccagagccatcccgcgctctgcgggctgggaggcccgggccaggacgcgagtcctgcgcagccgaggttccccagcgccccctgcagccgcgcgtaggcagagacggagcccggccctgcgcctccgcaccacgcccgggaccccacccagcggcccgtacccggagaagcagcgcgagcacccgaagctcccggctggcggcagaaaccgggagtggggccgggcgagtgcgcggcatcccaggccggcccgaacgctccgcccgcggtgggccgacttcccctcctcttccctctctccttcctttagcccgctggcgccggacacgctgcgcctcatctcttggggcgttcttccccgttggccaaccgtcgcatcccgtgcaactttggggtagtggccgtttagtgttgaatgttccccaccgagagcgcatggcttgggaagcgaggcgcgaacccggcccccgaagggccgccgtccgggagacggtgatgctgttgctgtgcctgggggtcccgaccggccgcccctacaacgtggacactgagagcgcgctgctttaccagggcccccacaacacgctgttcggctactcggtcgtgctgcacagccacggggcgaaccgatggctcctagtgggtgcgcccactgccaactggctcgccaacgcttcagtgatcaatcccggggcgatttacagatgcaggatcggaaagaatcccggccagacgtgcgaacagctccagctgggtagccctaatggagaaccttgtggaaagacttgtttggaagagagagacaatcagtggttgggggtcacactttccagacagccaggagaaaatggatccatcgtgacttgtgggcatagatggaaaaatatattttacataaagaatgaaaataagctccccactggtggttgctatggagtgccccctgatttacgaacagaactgagtaaaagaatagctccgtgttatcaagattatgtgaaaaaatttggagaaaattttgcatcatgtcaagctggaatatccagtttttacacaaaggatttaattgtgatgggggccccaggatcatcttactggactggctctctttttgtctacaatataactacaaataaatacaaggcttttttagacaaacaaaatcaagtaaaatttggaagttatttaggatattcagtcggagctggtcattttcggagccagcatactaccgaagtagtcggaggagctcctcaacatgagcagattggtaaggcatatatattcagcattgatgaaaaagaactaaatatcttacatgaaatgaaaggtaaaaagcttggatcgtactttggagcttctgtctgtgctgtggacctcaatgcagatggcttctcagatctgctcgtgggagcacccatgcagagcaccatcagagaggaaggaagagtgtttgtgtacatcaactctggctcgggagcagtaatgaatgcaatggaaacaaacctcgttggaagtgacaaatatgctgcaagatttggggaatctatagttaatcttggcgacattgacaatgatggctttgaagatgttgctatcggagctccacaagaagatgacttgcaaggtgctatttatatttacaatggccgtgcagatgggatctcgtcaaccttctcacagagaattgaaggacttcagatcagcaaatcgttaagtatgtttggacagtctatatcaggacaaattgatgcagataataatggctatgtagatgtagcagttggtgcttttcggtctgattctgctgtcttgctaaggacaagacctgtagtaattgttgacgcttctttaagccaccctgagtcagtaaatagaacgaaatttgactgtgttgaaaatggatggccttctgtgtgcatagatctaacactttgtttctcatataagggcaaggaagttccaggttacattgttttgttttataacatgagtttggatgtgaacagaaaggcagagtctccaccaagattctatttctcttctaatggaacttctgacgtgattacaggaagcatacaggtgtccagcagagaagctaactgtagaacacatcaagcatttatgcggaaagatgtgcgggacatcctcaccccaattcagattgaagctgcttaccaccttggtcctcatgtcatcagtaaacgaagtacagaggaattcccaccacttcagccaattcttcagcagaagaaagaaaaagacataatgaaaaaaacaaagaagtga
